United States Patent Application Publication US 2007/0214517 A1 - sequence listing, part 32

SEQ ID NO: 37979 - DNA, 907 bp, Arabidopsis thaliana
  misc_feature (1)..(907): Ceres Seq. ID no. 13646188
  misc_feature: MA Experiment ID: 20000185 Result: Up-regulated in Transcription
  misc_feature: MA Experiment 20000185 PARAMETER Experiment Name: At_Roots__P Parameter: Age (day) Value: 7 vs. 21
  misc_feature: MA Experiment 20000185 PARAMETER Experiment Name: At_Roots__P Parameter: Organism Value: A. thaliana
  misc_feature: MA Experiment 20000185 PARAMETER Experiment Name: At_Roots__P Parameter: Tissue Value: Roots vs. Whole Plant
  misc_feature: MA Experiment ID: 20000439 Result: Up-regulated in Transcription
  misc_feature: MA Experiment 20000439 PARAMETER Experiment Name: At_Roots__P Parameter: Age (day) Value: 14 vs. 21
  misc_feature: MA Experiment 20000439 PARAMETER Experiment Name: At_Roots__P Parameter: Organism Value: A. thaliana
  misc_feature: MA Experiment 20000439 PARAMETER Experiment Name: At_Roots__P Parameter: Tissue Value: Roots vs. Whole Plant
  misc_feature: MA Experiment ID: 20001556 Result: Down-regulated in Transcription
  misc_feature: MA Experiment 20001556 PARAMETER Experiment Name: At_Drought_Soil_Dry_P Parameter: Age (day) Value: 26
  misc_feature: MA Experiment 20001556 PARAMETER Experiment Name: At_Drought_Soil_Dry_P Parameter: Organism Value: A. thaliana
  misc_feature: MA Experiment 20001556 PARAMETER Experiment Name: At_Drought_Soil_Dry_P Parameter: Plant Line Value: WS
  misc_feature: MA Experiment 20001556 PARAMETER Experiment Name: At_Drought_Soil_Dry_P Parameter: Post Timepoint (hr) Value: None
  misc_feature: MA Experiment 20001556 PARAMETER Experiment Name: At_Drought_Soil_Dry_P Parameter: Post-Treatment Value: None
  misc_feature: MA Experiment 20001556 PARAMETER Experiment Name: At_Drought_Soil_Dry_P Parameter: Timepoint (day) Value: 12
  misc_feature: MA Experiment 20001556 PARAMETER Experiment Name: At_Drought_Soil_Dry_P Parameter: Treatment Value: Drought vs. No Drought
  misc_feature: MA Experiment ID: 20001906 Result: Down-regulated in Transcription
  misc_feature: MA Experiment 20001906 PARAMETER Experiment Name: At_Drought_Reproduction_P Parameter: Age (day) Value: 35
  misc_feature: MA Experiment 20001906 PARAMETER Experiment Name: At_Drought_Reproduction_P Parameter: Organism Value: A. thaliana
  misc_feature: MA Experiment 20001906 PARAMETER Experiment Name: At_Drought_Reproduction_P Parameter: Plant Line Value: WS
  misc_feature: MA Experiment 20001906 PARAMETER Experiment Name: At_Drought_Reproduction_P Parameter: Timepoint (day) Value: 5
  misc_feature: MA Experiment 20001906 PARAMETER Experiment Name: At_Drought_Reproduction_P Parameter: Tissue Value: Siliques
  misc_feature: MA Experiment 20001906 PARAMETER Experiment Name: At_Drought_Reproduction_P Parameter: Treatment Value: Drought vs. No Drought
agaaattaaacaagtgtatctatatcgtatatatggactgcttacagatggtgttcaagttatttccaaactggaaacgtgaggcagaagttaaaaagctcgttgcaggttacaaggttcatggcgatcctttctccaccaacacaaggcgtgtcctcgctgttctccatgagaaaagactctcttacgagcctattaccgtcaaattgcaaaccggtgaacacaaaaccgaacctttcctctctctcaacccatttggtcaagtccctgtttttgaggatggaagtgttaagctgtatgaatcccgagccatcacacaatacatcgcatatgttcatagctcaagaggcacacagcttctgaatcttagaagtcacgagacaatggcaactctaacaatgtggatggaaatcgaagctcatcagtttgatccacccgcatcgaaactcacttgggaacaagtcattaagcctatctacggtctagagactgaccaaacaatcgtcaaagagaacgaggctattctagagaaagttctaaatatctacgagaaacgactcgaagaatctagattcttggcttgtaatagctttactttggttgatcttcatcacctaccaaacatacaataccttttgggaactccaacgaagaaattgttcgaaaaaagatctaaagtgcgtaagtgggtggatgagattacgagtagagaggcttggaaaatggcatgtgatcaagagaaatcttggtttaataagccaaggaactaactgaaagcagaagtaatctttacgtgtgaatgtgtgtgtatgtgtatgttgagtttgggtctttgtttgtaagcttgtgcgtgttgtttgttgccttgcgaatcttattttatgtttggttaatatatgtttcatgc

SEQ ID NO: 37980 - protein, 255 aa, Arabidopsis thaliana
  peptide (1)..(255): Ceres Seq. ID no. 13646189
  misc_feature (34)..(238): Homolog of NCBI NO: 31790097 NR Description: glutathione S-transferase 3 [Brassica juncea]
  misc_feature (34)..(236): Homolog of NCBI NO: 15218640 NR Description: glutathione transferase, putative [Arabidopsis
  misc_feature (34)..(238): Homolog of NCBI NO: 15227063 NR Description: glutathione transferase, putative [Arabidopsis
  misc_feature (34)..(240): Homolog of NCBI NO: 17377644 NR Description: Glutathione S-transferase 11 (GST class-phi)
  misc_feature (34)..(240): Homolog of NCBI NO: 15218639 NR Description: glutathione transferase, putative [Arabidopsis
  misc_feature (37)..(255): Homolog of NCBI NO: 25518742 NR Description: hypothetical protein F22D16.6 - Arabidopsis
  misc_feature (37)..(255): Homolog of NCBI NO: 15218641 NR Description: glutathione transferase, putative [Arabidopsis
  misc_feature (16)..(255): Homolog of NCBI NO: 25287129 NR Description: hypothetical protein F22D16.5 - Arabidopsis
  misc_feature (11)..(255): Homolog of NCBI NO: 18379034 NR Description: glutathione transferase, putative [Arabidopsis
  misc_feature (11)..(255): Homolog of NCBI NO: 30678437 NR Description: glutathione transferase, putative [Arabidopsis
KLNKCIYIVYMDCLQMVFKLFPNWKREAEVKKLVAGYKVHGDPFSTNTRRVLAVLHEKRLSYEPITVKLQTGEHKTEPFLSLNPFGQVPVFEDGSVKLYESRAITQYIAYVHSSRGTQLLNLRSHETMATLTMWMEIEAHQFDPPASKLTWEQVIKPIYGLETDQTIVKENEAILEKVLNIYEKRLEESRFLACNSFTLVDLHHLPNIQYLLGTPTKKLFEKRSKVRKWVDEITSREAWKMACDQEKSWFNKPRN

SEQ ID NO: 37981 - protein, 245 aa, Arabidopsis thaliana
  peptide (1)..(245): Ceres Seq. ID no. 13646190
  misc_feature (24)..(228): Homolog of NCBI NO: 31790097 NR Description: glutathione S-transferase 3 [Brassica juncea]
  misc_feature (24)..(226): Homolog of NCBI NO: 15218640 NR Description: glutathione transferase, putative [Arabidopsis
  misc_feature (24)..(228): Homolog of NCBI NO: 15227063 NR Description: glutathione transferase, putative [Arabidopsis
  misc_feature (24)..(230): Homolog of NCBI NO: 17377644 NR Description: Glutathione S-transferase 11 (GST class-phi)
  misc_feature (24)..(230): Homolog of NCBI NO: 15218639 NR Description: glutathione transferase, putative [Arabidopsis
  misc_feature (27)..(245): Homolog of NCBI NO: 25518742 NR Description: hypothetical protein F22D16.6 - Arabidopsis
  misc_feature (27)..(245): Homolog of NCBI NO: 15218641 NR Description: glutathione transferase, putative [Arabidopsis
  misc_feature (6)..(245): Homolog of NCBI NO: 25287129 NR Description: hypothetical protein F22D16.5 - Arabidopsis
  misc_feature (1)..(245): Homolog of NCBI NO: 18379034 NR Description: glutathione transferase, putative [Arabidopsis
  misc_feature (1)..(245): Homolog of NCBI NO: 30678437 NR Description: glutathione transferase, putative [Arabidopsis
MDCLQMVFKLFPNWKREAEVKKLVAGYKVHGDPFSTNTRRVLAVLHEKRLSYEPITVKLQTGEHKTEPFLSLNPFGQVPVFEDGSVKLYESRAITQYIAYVHSSRGTQLLNLRSHETMATLTMWMEIEAHQFDPPASKLTWEQVIKPIYGLETDQTIVKENEAILEKVLNIYEKRLEESRFLACNSFTLVDLHHLPNIQYLLGTPTKKLFEKRSKVRKWVDEITSREAWKMACDQEKSWFNKPRN

SEQ ID NO: 37982 - protein, 240 aa, Arabidopsis thaliana
  peptide (1)..(240): Ceres Seq. ID no. 13646191
  misc_feature (19)..(223): Homolog of NCBI NO: 31790097 NR Description: glutathione S-transferase 3 [Brassica juncea]
  misc_feature (19)..(221): Homolog of NCBI NO: 15218640 NR Description: glutathione transferase, putative [Arabidopsis
  misc_feature (19)..(223): Homolog of NCBI NO: 15227063 NR Description: glutathione transferase, putative [Arabidopsis
  misc_feature (19)..(225): Homolog of NCBI NO: 17377644 NR Description: Glutathione S-transferase 11 (GST class-phi)
  misc_feature (19)..(225): Homolog of NCBI NO: 15218639 NR Description: glutathione transferase, putative [Arabidopsis
  misc_feature (22)..(240): Homolog of NCBI NO: 25518742 NR Description: hypothetical protein F22D16.6 - Arabidopsis
  misc_feature (22)..(240): Homolog of NCBI NO: 15218641 NR Description: glutathione transferase, putative [Arabidopsis
  misc_feature (1)..(240): Homolog of NCBI NO: 25287129 NR Description: hypothetical protein F22D16.5 - Arabidopsis
  misc_feature (1)..(240): Homolog of NCBI NO: 18379034 NR Description: glutathione transferase, putative [Arabidopsis
  misc_feature (1)..(240): Homolog of NCBI NO: 30678437 NR Description: glutathione transferase, putative [Arabidopsis
MVFKLFPNWKREAEVKKLVAGYKVHGDPFSTNTRRVLAVLHEKRLSYEPITVKLQTGEHKTEPFLSLNPFGQVPVFEDGSVKLYESRAITQYIAYVHSSRGTQLLNLRSHETMATLTMWMEIEAHQFDPPASKLTWEQVIKPIYGLETDQTIVKENEAILEKVLNIYEKRLEESRFLACNSFTLVDLHHLPNIQYLLGTPTKKLFEKRSKVRKWVDEITSREAWKMACDQEKSWFNKPRN

SEQ ID NO: 37983 - DNA, 972 bp, Arabidopsis thaliana
  misc_feature (1)..(972): Ceres Seq. ID no. 12330362
  misc_feature: MA Experiment ID: 108573 Result: Up-regulated in Transcription
  misc_feature: MA Experiment 108573 PARAMETER Experiment Name: At_Drought_cDNA_P Parameter: Timepoint (hr) Value: 6
  misc_feature: MA Experiment 108573 PARAMETER Experiment Name: At_Drought_cDNA_P Parameter: Tissue Value: Aerial
  misc_feature: MA Experiment 108573 PARAMETER Experiment Name: At_Drought_cDNA_P Parameter: Treatment Value: Drought vs. No Drought
aaaaaacggattcttgtgatattgagcgtcgtcttctcttccttagccaaagccagatctgcttctttttcgctgcgtcgtcgagaggtctctctttgaggaagctaattccttcttcttcttcaccatccgtttcaagaataacaatggaaggaagcggtggtgacagtggttcgatggctacgcctgtacaaaagaaagtacatgaggcatggagggtttaccaatattatctggacaagactacacctcattcaactaacaggtggatcggaacacttgttgtctttcttatctactgtttgagggtttactctattcacggattctacatcatctcctatggtcttggaatctacctcctgaatctgcttatcgggtttttgtctcctcttgttgatcctgagctcgaggtatctgatggagctactctgcctactcgaggttctgatgagttcaagccatttatccgccgtctcccggagtttaaattctggtactccatgactaaggcattctgcatagcctttcttatgacattcttctcggtgtttgatgttcccgtcttctggcccatactgctttgctactgggtcgttctctttgtcctcaccatgagacgccaaatagcccacatgatcaagcacaagtacattcctttcagcatcggaaaacagaaatatagcggccggaaatcttctgcgaacagcggcggcggctctcgtgctgattgatttcaacttgcagccacattttctgcagaaaaagaatgaaaaaaagttgggttttcacgttggaacgttttgtagtgatgaattactagtattgttatgcttctacaatgaagaagaaggaaacagaaaagggtcattagtttttatgttgcaggaatattgttctttgttagttccctttaatccaagtacctctgctgtaaatataattcaattttatttcgaaacaaattcattc

SEQ ID NO: 37984 - protein, 243 aa, Arabidopsis thaliana
  peptide (1)..(243): Ceres Seq. ID no. 12330363
  misc_feature (50)..(230): Pfam Name: Rer1 family Pfam Description: Rer1 family
  misc_feature (51)..(224): Homolog of NCBI NO: 18398679 NR Description: putative integral membrane protein; protein id:
  misc_feature (35)..(225): Homolog of NCBI NO: 7488292 NR Description: probable integral membrane protein At2g23310
  misc_feature (35)..(231): Homolog of NCBI NO: 30682033 NR Description: integral membrane protein -related [Arabidopsis
  misc_feature (150)..(225): Homolog of NCBI NO: 35210534 NR Description: putative endoplasmatic reticulum retrieval
  misc_feature (37)..(166): Homolog of NCBI NO: 35210534 NR Description: putative endoplasmatic reticulum retrieval
  misc_feature (35)..(231): Homolog of NCBI NO: 18400234 NR Description: putative integral membrane protein
  misc_feature (29)..(226): Homolog of NCBI NO: 34894094 NR Description: putative Rer1A protein (AtRer1A)
  misc_feature (49)..(243): Homolog of NCBI NO: 15234975 NR Description: AtRer1A
  misc_feature (49)..(243): Homolog of NCBI NO: 15226596 NR Description: AtRer1B
  misc_feature (49)..(243): Homolog of NCBI NO: 11281669 NR Description: endoplasmatic reticulum retrieval protein Rer1B
KTDSCDIERRLLFLSQSQICFFFAASSRGLSLRKLIPSSSSPSVSRITMEGSGGDSGSMATPVQKKVHEAWRVYQYYLDKTTPHSTNRWIGTLVVFLIYCLRVYSIHGFYIISYGLGIYLLNLLIGFLSPLVDPELEVSDGATLPTRGSDEFKPFIRRLPEFKFWYSMTKAFCIAFLMTFFSVFDVPVFWPILLCYWVVLFVLTMRRQIAHMIKHKYIPFSIGKQKYSGRKSSANSGGGSRAD

SEQ ID NO: 37985 - protein, 195 aa, Arabidopsis thaliana
  peptide (1)..(195): Ceres Seq. ID no. 12330364
  misc_feature (2)..(182): Pfam Name: Rer1 family Pfam Description: Rer1 family
  misc_feature (3)..(176): Homolog of NCBI NO: 18398679 NR Description: putative integral membrane protein; protein id:
  misc_feature (1)..(177): Homolog of NCBI NO: 7488292 NR Description: probable integral membrane protein At2g23310
  misc_feature (1)..(183): Homolog of NCBI NO: 30682033 NR Description: integral membrane protein -related [Arabidopsis
  misc_feature (102)..(177): Homolog of NCBI NO: 35210534 NR Description: putative endoplasmatic reticulum retrieval
  misc_feature (1)..(118): Homolog of NCBI NO: 35210534 NR Description: putative endoplasmatic reticulum retrieval
  misc_feature (1)..(183): Homolog of NCBI NO: 18400234 NR Description: putative integral membrane protein
  misc_feature (1)..(178): Homolog of NCBI NO: 34894094 NR Description: putative Rer1A protein (AtRer1A)
  misc_feature (1)..(195): Homolog of NCBI NO: 15234975 NR Description: AtRer1A
  misc_feature (1)..(195): Homolog of NCBI NO: 15226596 NR Description: AtRer1B
  misc_feature (1)..(195): Homolog of NCBI NO: 11281669 NR Description: endoplasmatic reticulum retrieval protein Rer1B
MEGSGGDSGSMATPVQKKVHEAWRVYQYYLDKTTPHSTNRWIGTLVVFLIYCLRVYSIHGFYIISYGLGIYLLNLLIGFLSPLVDPELEVSDGATLPTRGSDEFKPFIRRLPEFKFWYSMTKAFCIAFLMTFFSVFDVPVFWPILLCYWVVLFVLTMRRQIAHMIKHKYIPFSIGKQKYSGRKSSANSGGGSRAD

SEQ ID NO: 37986 - protein, 185 aa, Arabidopsis thaliana
  peptide (1)..(185): Ceres Seq. ID no. 12330365
  misc_feature (1)..(172): Pfam Name: Rer1 family Pfam Description: Rer1 family
  misc_feature (1)..(166): Homolog of NCBI NO: 18398679 NR Description: putative integral membrane protein; protein id:
  misc_feature (1)..(167): Homolog of NCBI NO: 7488292 NR Description: probable integral membrane protein At2g23310
  misc_feature (1)..(173): Homolog of NCBI NO: 30682033 NR Description: integral membrane protein -related [Arabidopsis
  misc_feature (92)..(167): Homolog of NCBI NO: 35210534 NR Description: putative endoplasmatic reticulum retrieval
  misc_feature (1)..(108): Homolog of NCBI NO: 35210534 NR Description: putative endoplasmatic reticulum retrieval
  misc_feature (1)..(173): Homolog of NCBI NO: 18400234 NR Description: putative integral membrane protein
  misc_feature (1)..(168): Homolog of NCBI NO: 34894094 NR Description: putative Rer1A protein (AtRer1A)
  misc_feature (1)..(185): Homolog of NCBI NO: 15234975 NR Description: AtRer1A
  misc_feature (1)..(185): Homolog of NCBI NO: 15226596 NR Description: AtRer1B
  misc_feature (1)..(185): Homolog of NCBI NO: 11281669 NR Description: endoplasmatic reticulum retrieval protein Rer1B
MATPVQKKVHEAWRVYQYYLDKTTPHSTNRWIGTLVVFLIYCLRVYSIHGFYIISYGLGIYLLNLLIGFLSPLVDPELEVSDGATLPTRGSDEFKPFIRRLPEFKFWYSMTKAFCIAFLMTFFSVFDVPVFWPILLCYWVVLFVLTMRRQIAHMIKHKYIPFSIGKQKYSGRKSSANSGGGSRAD

SEQ ID NO: 37987 - DNA, 1842 bp, Arabidopsis thaliana; identical to SEQ ID NO: 37427
  misc_feature (1)..(1842): Ceres Seq. ID no. 13509651
  misc_feature: MA Experiment ID: 20000113 Result: Down-regulated in Transcription
  misc_feature: MA Experiment 20000113 PARAMETER Experiment Name: At_42deg_Heat_cDNA_P Parameter: Temperature (deg C) Value: 42 vs. 22
  misc_feature: MA Experiment 20000113 PARAMETER Experiment Name: At_42deg_Heat_cDNA_P Parameter: Timepoint (hr) Value: 8
  misc_feature: MA Experiment 20000113 PARAMETER Experiment Name: At_42deg_Heat_cDNA_P Parameter: Tissue Value: Aerial
  misc_feature: MA Experiment ID: 20000315 Result: Down-regulated in Transcription
  misc_feature: MA Experiment 20000315 PARAMETER Experiment Name: At_14day_Shoots-Roots_Sub_P Parameter: Age (day) Value: 14
  misc_feature: MA Experiment 20000315 PARAMETER Experiment Name: At_14day_Shoots-Roots_Sub_P Parameter: Organism Value: A. thaliana
  misc_feature: MA Experiment 20000315 PARAMETER Experiment Name: At_14day_Shoots-Roots_Sub_P Parameter: Plant Line Value: WS
  misc_feature: MA Experiment 20000315 PARAMETER Experiment Name: At_14day_Shoots-Roots_Sub_P Parameter: Tissue Value: Shoots vs. Whole Plant
  misc_feature: MA Experiment ID: 20000328 Result: Down-regulated in Transcription
  misc_feature: MA Experiment 20000328 PARAMETER Experiment Name: At_42deg_Heat_Sub_P Parameter: Age (day) Value: 14
  misc_feature: MA Experiment 20000328 PARAMETER Experiment Name: At_42deg_Heat_Sub_P Parameter: Organism Value: A. thaliana
  misc_feature: MA Experiment 20000328 PARAMETER Experiment Name: At_42deg_Heat_Sub_P Parameter: Plant Line Value: WS
  misc_feature: MA Experiment 20000328 PARAMETER Experiment Name: At_42deg_Heat_Sub_P Parameter: Temperature (deg C) Value: 42 vs. 22
  misc_feature: MA Experiment 20000328 PARAMETER Experiment Name: At_42deg_Heat_Sub_P Parameter: Timepoint (hr) Value: 6
  misc_feature: MA Experiment 20000328 PARAMETER Experiment Name: At_42deg_Heat_Sub_P Parameter: Tissue Value: Aerial

SEQ ID NO: 37988 - protein, 497 aa, Arabidopsis thaliana; identical to SEQ ID NO: 37428
  peptide (1)..(497): Ceres Seq. ID no. 13509652
  misc_feature (3)..(312): Homolog of NCBI NO: 21618002 NR Description: unknown [Arabidopsis thaliana]
  misc_feature (192)..(497): Homolog of NCBI NO: 18266049 NR Description: myrosinase precursor [Brassica oleracea]
  misc_feature (3)..(312): Homolog of NCBI NO: 18394314 NR Description: expressed protein [Arabidopsis thaliana]
  misc_feature (234)..(488): Homolog of NCBI NO: 14517360 NR Description: At1g80910/F23A5_21 [Arabidopsis thaliana]
  misc_feature (125)..(497): Homolog of NCBI NO: 21618002 NR Description: unknown [Arabidopsis thaliana]
  misc_feature (125)..(497): Homolog of NCBI NO: 18394314 NR Description: expressed protein [Arabidopsis thaliana]
  misc_feature (1)..(497): Homolog of NCBI NO: 38175489 NR Description: putative myrosinase precursor
  misc_feature (3)..(497): Homolog of NCBI NO: 30684673 NR Description: expressed protein [Arabidopsis thaliana]
  misc_feature (1)..(497): Homolog of NCBI NO: 15220866 NR Description: myrosinase precursor -related [Arabidopsis
  misc_feature (1)..(497): Homolog of NCBI NO: 25372816 NR Description: F23A5.27 [imported] - Arabidopsis thaliana
  misc_feature (3)..(312): Homolog of NCBI NO: 21618002 NR Description: unknown [Arabidopsis thaliana]
  misc_feature (192)..(497): Homolog of NCBI NO: 18266049 NR Description: myrosinase precursor [Brassica oleracea]
  misc_feature (3)..(312): Homolog of NCBI NO: 18394314 NR Description: expressed protein [Arabidopsis thaliana]
  misc_feature (234)..(488): Homolog of NCBI NO: 14517360 NR Description: At1g80910/F23A5_21 [Arabidopsis thaliana]
  misc_feature (125)..(497): Homolog of NCBI NO: 21618002 NR Description: unknown [Arabidopsis thaliana]
  misc_feature (125)..(497): Homolog of NCBI NO: 18394314 NR Description: expressed protein [Arabidopsis thaliana]
  misc_feature (1)..(497): Homolog of NCBI NO: 38175489 NR Description: putative myrosinase precursor
  misc_feature (3)..(497): Homolog of NCBI NO: 30684673 NR Description: expressed protein [Arabidopsis thaliana]
  misc_feature (1)..(497): Homolog of NCBI NO: 15220866 NR Description: myrosinase precursor -related [Arabidopsis
  misc_feature (1)..(497): Homolog of NCBI NO: 25372816 NR Description: F23A5.27 [imported] - Arabidopsis thaliana
  misc_feature (3)..(312): Homolog of NCBI NO: 21618002 NR Description: unknown [Arabidopsis thaliana]
  misc_feature (192)..(497): Homolog of NCBI NO: 18266049 NR Description: myrosinase precursor [Brassica oleracea]
  misc_feature (3)..(312): Homolog of NCBI NO: 18394314 NR Description: expressed protein [Arabidopsis thaliana]
  misc_feature (234)..(488): Homolog of NCBI NO: 14517360 NR Description: At1g80910/F23A5_21 [Arabidopsis thaliana]
  misc_feature (125)..(497): Homolog of NCBI NO: 21618002 NR Description: unknown [Arabidopsis thaliana]
  misc_feature (125)..(497): Homolog of NCBI NO: 18394314 NR Description: expressed protein [Arabidopsis thaliana]
  misc_feature (1)..(497): Homolog of NCBI NO: 38175489 NR Description: putative myrosinase precursor
  misc_feature (3)..(497): Homolog of NCBI NO: 30684673 NR Description: expressed protein [Arabidopsis thaliana]
  misc_feature (1)..(497): Homolog of NCBI NO: 15220866 NR Description: myrosinase precursor -related [Arabidopsis
  misc_feature (1)..(497): Homolog of NCBI NO: 25372816 NR Description: F23A5.27 [imported] - Arabidopsis thaliana

SEQ ID NO: 37989 - protein, 495 aa, Arabidopsis thaliana; identical to SEQ ID NO: 37429
  peptide (1)..(495): Ceres Seq. ID no. 13509653
  misc_feature (1)..(310): Homolog of NCBI NO: 21618002 NR Description: unknown [Arabidopsis thaliana]
  misc_feature (190)..(495): Homolog of NCBI NO: 18266049 NR Description: myrosinase precursor [Brassica oleracea]
  misc_feature (1)..(310): Homolog of NCBI NO: 18394314 NR Description: expressed protein [Arabidopsis thaliana]
  misc_feature (232)..(486): Homolog of NCBI NO: 14517360 NR Description: At1g80910/F23A5_21 [Arabidopsis thaliana]
  misc_feature (123)..(495): Homolog of NCBI NO: 21618002 NR Description: unknown [Arabidopsis thaliana]
  misc_feature (123)..(495): Homolog of NCBI NO: 18394314 NR Description: expressed protein [Arabidopsis thaliana]
  misc_feature (1)..(495): Homolog of NCBI NO: 38175489 NR Description: putative myrosinase precursor
  misc_feature (1)..(495): Homolog of NCBI NO: 30684673 NR Description: expressed protein [Arabidopsis thaliana]
  misc_feature (1)..(495): Homolog of NCBI NO: 15220866 NR Description: myrosinase precursor -related [Arabidopsis
  misc_feature (1)..(495): Homolog of NCBI NO: 25372816 NR Description: F23A5.27 [imported] - Arabidopsis thaliana
  misc_feature (1)..(310): Homolog of NCBI NO: 21618002 NR Description: unknown [Arabidopsis thaliana]
  misc_feature (190)..(495): Homolog of NCBI NO: 18266049 NR Description: myrosinase precursor [Brassica oleracea]
  misc_feature (1)..(310): Homolog of NCBI NO: 18394314 NR Description: expressed protein [Arabidopsis thaliana]
  misc_feature (232)..(486): Homolog of NCBI NO: 14517360 NR Description: At1g80910/F23A5_21 [Arabidopsis thaliana]
  misc_feature (123)..(495): Homolog of NCBI NO: 21618002 NR Description: unknown [Arabidopsis thaliana]
  misc_feature (123)..(495): Homolog of NCBI NO: 18394314 NR Description: expressed protein [Arabidopsis thaliana]
  misc_feature (1)..(495): Homolog of NCBI NO: 38175489 NR Description: putative myrosinase precursor
  misc_feature (1)..(495): Homolog of NCBI NO: 30684673 NR Description: expressed protein [Arabidopsis thaliana]
  misc_feature (1)..(495): Homolog of NCBI NO: 15220866 NR Description: myrosinase precursor -related [Arabidopsis
  misc_feature (1)..(495): Homolog of NCBI NO: 25372816 NR Description: F23A5.27 [imported] - Arabidopsis thaliana
  misc_feature (1)..(310): Homolog of NCBI NO: 21618002 NR Description: unknown [Arabidopsis thaliana]
  misc_feature (190)..(495): Homolog of NCBI NO: 18266049 NR Description: myrosinase precursor [Brassica oleracea]
  misc_feature (1)..(310): Homolog of NCBI NO: 18394314 NR Description: expressed protein [Arabidopsis thaliana]
  misc_feature (232)..(486): Homolog of NCBI NO: 14517360 NR Description: At1g80910/F23A5_21 [Arabidopsis thaliana]
  misc_feature (123)..(495): Homolog of NCBI NO: 21618002 NR Description: unknown [Arabidopsis thaliana]
  misc_feature (123)..(495): Homolog of NCBI NO: 18394314 NR Description: expressed protein [Arabidopsis thaliana]
  misc_feature (1)..(495): Homolog of NCBI NO: 38175489 NR Description: putative myrosinase precursor
  misc_feature (1)..(495): Homolog of NCBI NO: 30684673 NR Description: expressed protein [Arabidopsis thaliana]
  misc_feature (1)..(495): Homolog of NCBI NO: 15220866 NR Description: myrosinase precursor -related [Arabidopsis
  misc_feature (1)..(495): Homolog of NCBI NO: 25372816 NR Description: F23A5.27 [imported] - Arabidopsis thaliana

SEQ ID NO: 37990 - protein, 492 aa, Arabidopsis thaliana; identical to SEQ ID NO: 37430
  peptide (1)..(492): Ceres Seq. ID no. 13509654
  misc_feature (1)..(307): Homolog of NCBI NO: 21618002 NR Description: unknown [Arabidopsis thaliana]
  misc_feature (187)..(492): Homolog of NCBI NO: 18266049 NR Description: myrosinase precursor [Brassica oleracea]
  misc_feature (1)..(307): Homolog of NCBI NO: 18394314 NR Description: expressed protein [Arabidopsis thaliana]
  misc_feature (229)..(483): Homolog of NCBI NO: 14517360 NR Description: At1g80910/F23A5_21 [Arabidopsis thaliana]
  misc_feature (120)..(492): Homolog of NCBI NO: 21618002 NR Description: unknown [Arabidopsis thaliana]
  misc_feature (120)..(492): Homolog of NCBI NO: 18394314 NR Description: expressed protein [Arabidopsis thaliana]
  misc_feature (1)..(492): Homolog of NCBI NO: 38175489 NR Description: putative myrosinase precursor
  misc_feature (1)..(492): Homolog of NCBI NO: 30684673 NR Description: expressed protein [Arabidopsis thaliana]
  misc_feature (1)..(492): Homolog of NCBI NO: 15220866 NR Description: myrosinase precursor -related [Arabidopsis
  misc_feature (1)..(492): Homolog of NCBI NO: 25372816 NR Description: F23A5.27 [imported] - Arabidopsis thaliana
  misc_feature (1)..(307): Homolog of NCBI NO: 21618002 NR Description: unknown [Arabidopsis thaliana]
  misc_feature (187)..(492): Homolog of NCBI NO: 18266049 NR Description: myrosinase precursor [Brassica oleracea]
  misc_feature (1)..(307): Homolog of NCBI NO: 18394314 NR Description: expressed protein [Arabidopsis thaliana]
  misc_feature (229)..(483): Homolog of NCBI NO: 14517360 NR Description: At1g80910/F23A5_21 [Arabidopsis thaliana]
  misc_feature (120)..(492): Homolog of NCBI NO: 21618002 NR Description: unknown [Arabidopsis thaliana]
  misc_feature (120)..(492): Homolog of NCBI NO: 18394314 NR Description: expressed protein [Arabidopsis thaliana]
  misc_feature (1)..(492): Homolog of NCBI NO: 38175489 NR Description: putative myrosinase precursor
  misc_feature (1)..(492): Homolog of NCBI NO: 30684673 NR Description: expressed protein [Arabidopsis thaliana]
  misc_feature (1)..(492): Homolog of NCBI NO: 15220866 NR Description: myrosinase precursor -related [Arabidopsis
  misc_feature (1)..(492): Homolog of NCBI NO: 25372816 NR Description: F23A5.27 [imported] - Arabidopsis thaliana
  misc_feature (1)..(307): Homolog of NCBI NO: 21618002 NR Description: unknown [Arabidopsis thaliana]
  misc_feature (187)..(492): Homolog of NCBI NO: 18266049 NR Description: myrosinase precursor [Brassica oleracea]
  misc_feature (1)..(307): Homolog of NCBI NO: 18394314 NR Description: expressed protein [Arabidopsis thaliana]
  misc_feature (229)..(483): Homolog of NCBI NO: 14517360 NR Description: At1g80910/F23A5_21 [Arabidopsis thaliana]
  misc_feature (120)..(492): Homolog of NCBI NO: 21618002 NR Description: unknown [Arabidopsis thaliana]
  misc_feature (120)..(492): Homolog of NCBI NO: 18394314 NR Description: expressed protein [Arabidopsis thaliana]
  misc_feature (1)..(492): Homolog of NCBI NO: 38175489 NR Description: putative myrosinase precursor
  misc_feature (1)..(492): Homolog of NCBI NO: 30684673 NR Description: expressed protein [Arabidopsis thaliana]
  misc_feature (1)..(492): Homolog of NCBI NO: 15220866 NR Description: myrosinase precursor -related [Arabidopsis
  misc_feature (1)..(492): Homolog of NCBI NO: 25372816 NR Description: F23A5.27 [imported] - Arabidopsis thaliana

SEQ ID NO: 37991 - DNA, 883 bp, Arabidopsis thaliana
  misc_feature (1)..(883): Ceres Seq. ID no. 12560092
  misc_feature: MA Experiment ID: 108434 Result: Up-regulated in Transcription
  misc_feature: MA Experiment 108434 PARAMETER Experiment Name: At_Root_Tips_cDNA_P Parameter: Tissue Value: Root Tips
  misc_feature: MA Experiment ID: 108464 Result: Down-regulated in Transcription
  misc_feature: MA Experiment 108464 PARAMETER Experiment Name: At_Germinating_Seeds_cDNA_P Parameter: Age (day) Value: 4 vs. 0
  misc_feature: MA Experiment 108464 PARAMETER Experiment Name: At_Germinating_Seeds_cDNA_P Parameter: Tissue Value: Germinating Seeds
  misc_feature: MA Experiment ID: 108576 Result: Down-regulated in Transcription
  misc_feature: MA Experiment 108576 PARAMETER Experiment Name: At_42deg_Heat_cDNA_P Parameter: Temperature (deg C) Value: 42 vs. 22
  misc_feature: MA Experiment 108576 PARAMETER Experiment Name: At_42deg_Heat_cDNA_P Parameter: Timepoint (hr) Value: 1
  misc_feature: MA Experiment 108576 PARAMETER Experiment Name: At_42deg_Heat_cDNA_P Parameter: Tissue Value: Aerial
  misc_feature: MA Experiment ID: 108668 Result: Down-regulated in Transcription
  misc_feature: MA Experiment 108668 PARAMETER Experiment Name: At_2mM_SA_cDNA_P Parameter: Plant Line Value: WS
  misc_feature: MA Experiment 108668 PARAMETER Experiment Name: At_2mM_SA_cDNA_P Parameter: Timepoint (hr) Value: 6
  misc_feature: MA Experiment 108668 PARAMETER Experiment Name: At_2mM_SA_cDNA_P Parameter: Treatment Value: 2mM SA vs. No Treatment
  misc_feature: MA Experiment ID: 20000184 Result: Up-regulated in Transcription
  misc_feature: MA Experiment 20000184 PARAMETER Experiment Name: At_Shoots__P Parameter: Age (day) Value: 7
  misc_feature: MA Experiment 20000184 PARAMETER Experiment Name: At_Shoots__P Parameter: Tissue Value: Shoots vs. Whole Plant
  misc_feature: MA Experiment ID: 20000224 Result: Down-regulated in Transcription
  misc_feature: MA Experiment ID: 20000451 Result: Down-regulated in Transcription
  misc_feature: MA Experiment 20000451 PARAMETER Experiment Name: At_CS6879_Shoots-Roots_P Parameter: Age (day) Value: 14
  misc_feature: MA Experiment 20000451 PARAMETER Experiment Name: At_CS6879_Shoots-Roots_P Parameter: Organism Value: A. thaliana
  misc_feature: MA Experiment 20000451 PARAMETER Experiment Name: At_CS6879_Shoots-Roots_P Parameter: Plant Line Value: CS6879 vs. WS
  misc_feature: MA Experiment 20000451 PARAMETER Experiment Name: At_CS6879_Shoots-Roots_P Parameter: Tissue Value: Roots
  misc_feature: MA Experiment ID: 20000452 Result: Down-regulated in Transcription
  misc_feature: MA Experiment 20000452 PARAMETER Experiment Name: At_CS6879_Shoots-Roots_P Parameter: Age (day) Value: 14
  misc_feature: MA Experiment 20000452 PARAMETER Experiment Name: At_CS6879_Shoots-Roots_P Parameter: Organism Value: A. thaliana
  misc_feature: MA Experiment 20000452 PARAMETER Experiment Name: At_CS6879_Shoots-Roots_P Parameter: Plant Line Value: CS6879 vs. WS
  misc_feature: MA Experiment 20000452 PARAMETER Experiment Name: At_CS6879_Shoots-Roots_P Parameter: Tissue Value: Shoots
agaaccctttcttctctctctctctctccctaaaatcaatctatcttttttttaaccattgcgtttctttttttccctttccgagcagatctgagccgaaggttaactacatgaccggcgctgagaacggcgtgagaatgacgtcaccagagacgtcttcaacatcttccctcgccaccacaagtgtccacgtaagcgctctcgacggactcgtgaacgtgaactctctcttcaccatcgccgtcttcgttggtctttccttagcgactccaggacaacacagcctcgaacaacgatccagctgcgacgcaagtgctgacgtcgccaagaagctactggtcttcgaagtcgtctccttcagcttcttcctcttctcctctcttgtagctcagggtcttaagcttgccttaaaccttcttaatagcaaagacgtcaacgagattttcagagctcacatcaatatcaaggttttgagatggggaatgatggcttctgctgtcggatctgtaatgggctgtctcttcttgatgctctctatggttaatgtgattcagatccgtcttggtttgctctcttgcggcagcaaatcggcggctcaagctgttgcaacgctcgtcactctggtttcctctgctctgctgatttacatctctaccgccatttacgctttctggcattgatgctatgtcaaaattggataatgtccatggctttgttttgattagccaatgtgtaatttcatcatcaatgccttccaatctagttttttgtttttttgtttcggagaatgaagaatcaatcacaagatacagaacattggattatgagaatttgatgttaagcttttatgaacagaaatgaagcattatgtttgttgtttggt

SEQ ID NO: 37992 - protein, 225 aa, Arabidopsis thaliana
  peptide (1)..(225): Ceres Seq. ID no. 12560093
  misc_feature (62)..(223): Homolog of NCBI NO: 15232676 NR Description: putative protein; protein id: At3g46890.1
  misc_feature (156)..(225): Homolog of NCBI NO: 38345578 NR Description: OSJNBa0027H06.14 [Oryza sativa (japonica
  misc_feature (62)..(143): Homolog of NCBI NO: 38345578 NR Description: OSJNBa0027H06.14 [Oryza sativa (japonica
  misc_feature (60)..(223): Homolog of NCBI NO: 34900646 NR Description: hypothetical protein~similar to Arabidopsis
  misc_feature (60)..(223): Homolog of NCBI NO: 34395171 NR Description: unknown protein [Oryza sativa (japonica
  misc_feature (59)..(223): Homolog of NCBI NO: 15239293 NR Description: putative protein
  misc_feature (41)..(223): Homolog of NCBI NO: 15226312 NR Description: hypothetical protein; protein id: At2g01580.1
  misc_feature (39)..(225): Homolog of NCBI NO: 37531676 NR Description: hypothetical protein [Oryza sativa (japonica
  misc_feature (46)..(225): Homolog of NCBI NO: 6041846 NR Description: unknown protein [Arabidopsis thaliana]
  misc_feature (37)..(225): Homolog of NCBI NO: 18397969 NR Description: expressed protein
NPFFSLSLSLKSIYLFFNHCVSFFPFPSRSEPKVNYMTGAENGVRMTSPETSSTSSLATTSVHVSALDGLVNVNSLFTIAVFVGLSLATPGQHSLEQRSSCDASADVAKKLLVFEVVSFSFFLFSSLVAQGLKLALNLLNSKDVNEIFRAHINIKVLRWGMMASAVGSVMGCLFLMLSMVNVIQIRLGLLSCGSKSAAQAVATLVTLVSSALLIYISTAIYAFWH

SEQ ID NO: 37993 - protein, 189 aa, Arabidopsis thaliana; identical to SEQ ID NO: 37106
  peptide (1)..(189): Ceres Seq. ID no. 12560094
  misc_feature (26)..(187): Homolog of NCBI NO: 15232676 NR Description: putative protein; protein id: At3g46890.1
  misc_feature (120)..(189): Homolog of NCBI NO: 38345578 NR Description: OSJNBa0027H06.14 [Oryza sativa (japonica
  misc_feature (26)..(107): Homolog of NCBI NO: 38345578 NR Description: OSJNBa0027H06.14 [Oryza sativa (japonica
  misc_feature (24)..(187): Homolog of NCBI NO: 34900646 NR Description: hypothetical protein~similar to Arabidopsis
  misc_feature (24)..(187): Homolog of NCBI NO: 34395171 NR Description: unknown protein [Oryza sativa (japonica
  misc_feature (23)..(187): Homolog of NCBI NO: 15239293 NR Description: putative protein
  misc_feature (5)..(187): Homolog of NCBI NO: 15226312 NR Description: hypothetical protein; protein id: At2g01580.1
  misc_feature (3)..(189): Homolog of NCBI NO: 37531676 NR Description: hypothetical protein [Oryza sativa (japonica
  misc_feature (10)..(189): Homolog of NCBI NO: 6041846 NR Description: unknown protein [Arabidopsis thaliana]
  misc_feature (1)..(189): Homolog of NCBI NO: 18397969 NR Description: expressed protein

SEQ ID NO: 37994 - protein, 180 aa, Arabidopsis thaliana; identical to SEQ ID NO: 37107
  peptide (1)..(180): Ceres Seq. ID no. 12560095
  misc_feature (17)..(178): Homolog of NCBI NO: 15232676 NR Description: putative protein; protein id: At3g46890.1
  misc_feature (111)..(180): Homolog of NCBI NO: 38345578 NR Description: OSJNBa0027H06.14 [Oryza sativa (japonica
  misc_feature (17)..(98): Homolog of NCBI NO: 38345578 NR Description: OSJNBa0027H06.14 [Oryza sativa (japonica
  misc_feature (15)..(178): Homolog of NCBI NO: 34900646 NR Description: hypothetical protein~similar to Arabidopsis
  misc_feature (15)..(178): Homolog of NCBI NO: 34395171 NR Description: unknown protein [Oryza sativa (japonica
  misc_feature (14)..(178): Homolog of NCBI NO: 15239293 NR Description: putative protein
  misc_feature (1)..(178): Homolog of NCBI NO: 15226312 NR Description: hypothetical protein; protein id: At2g01580.1
  misc_feature (1)..(180): Homolog of NCBI NO: 37531676 NR Description: hypothetical protein [Oryza sativa (japonica
  misc_feature (1)..(180): Homolog of NCBI NO: 6041846 NR Description: unknown protein [Arabidopsis thaliana]
  misc_feature (1)..(180): Homolog of NCBI NO: 18397969 NR Description: expressed protein

SEQ ID NO: 37995 - DNA, 613 bp, Arabidopsis thaliana
  misc_feature (1)..(613): Ceres Seq. ID no. 12602584
  misc_feature: MA Experiment ID: 20000180 Result: Up-regulated in Transcription
  misc_feature: MA Experiment 20000180 PARAMETER Experiment Name: At_Germinating_Seeds_P Parameter: Age (hr) Value: 24 vs. 0
  misc_feature: MA Experiment 20000180 PARAMETER Experiment Name: At_Germinating_Seeds_P Parameter: Tissue Value: Germinating Seeds
  misc_feature: MA Experiment ID: 20000185 Result: Down-regulated in Transcription
  misc_feature: MA Experiment 20000185 PARAMETER Experiment Name: At_Roots__P Parameter: Age (day) Value: 7 vs. 21
  misc_feature: MA Experiment 20000185 PARAMETER Experiment Name: At_Roots__P Parameter: Organism Value: A. thaliana
  misc_feature: MA Experiment 20000185 PARAMETER Experiment Name: At_Roots__P Parameter: Tissue Value: Roots vs. Whole Plant
  misc_feature: MA Experiment ID: 20000437 Result: Down-regulated in Transcription
  misc_feature: MA Experiment 20000437 PARAMETER Experiment Name: At_Drought_P Parameter: Age (day) Value: 8
  misc_feature: MA Experiment 20000437 PARAMETER Experiment Name: At_Drought_P Parameter: Organism Value: A. thaliana
  misc_feature: MA Experiment 20000437 PARAMETER Experiment Name: At_Drought_P Parameter: Plant Line Value: WS
  misc_feature: MA Experiment 20000437 PARAMETER Experiment Name: At_Drought_P Parameter: Timepoint (hr) Value: 24
  misc_feature: MA Experiment 20000437 PARAMETER Experiment Name: At_Drought_P Parameter: Tissue Value: Whole Plant
  misc_feature: MA Experiment 20000437 PARAMETER Experiment Name: At_Drought_P Parameter: Treatment Value: Drought vs. No Drought
  misc_feature: MA Experiment ID: 20000438 Result: Up-regulated in Transcription
  misc_feature: MA Experiment 20000438 PARAMETER Experiment Name: At_Shoots__P Parameter: Age (day) Value: 14
  misc_feature: MA Experiment 20000438 PARAMETER Experiment Name: At_Shoots__P Parameter: Tissue Value: Shoots vs. Whole Plant
  misc_feature: MA Experiment ID: 20000439 Result: Down-regulated in Transcription
  misc_feature: MA Experiment 20000439 PARAMETER Experiment Name: At_Roots__P Parameter: Age (day) Value: 14 vs. 21
  misc_feature: MA Experiment 20000439 PARAMETER Experiment Name: At_Roots__P Parameter: Organism Value: A. thaliana
  misc_feature: MA Experiment 20000439 PARAMETER Experiment Name: At_Roots__P Parameter: Tissue Value: Roots vs. Whole Plant
  misc_feature: MA Experiment ID: 20000794 Result: Down-regulated in Transcription
  misc_feature: MA Experiment 20000794 PARAMETER Experiment Name: At_Petals_P Parameter: Age (day) Value: 23-25 days
  misc_feature: MA Experiment 20000794 PARAMETER Experiment Name: At_Petals_P Parameter: Plant Line Value: WS
  misc_feature: MA Experiment 20000794 PARAMETER Experiment Name: At_Petals_P Parameter: Tissue Value: Petals vs. Whole plant
  misc_feature: MA Experiment ID: 20001450 Result: Down-regulated in Transcription
  misc_feature: MA Experiment 20001450 PARAMETER Experiment Name: At_Far-red-induction_P Parameter: Age (day) Value: 7
  misc_feature: MA Experiment 20001450 PARAMETER Experiment Name: At_Far-red-induction_P Parameter: Light Value: Far-red vs. White
  misc_feature: MA Experiment 20001450 PARAMETER Experiment Name: At_Far-red-induction_P Parameter: Organism Value: A. thaliana
  misc_feature: MA Experiment 20001450 PARAMETER Experiment Name: At_Far-red-induction_P Parameter: Plant Line Value: Columbia
  misc_feature: MA Experiment 20001450 PARAMETER Experiment Name: At_Far-red-induction_P Parameter: Timepoint (hr) Value: 8
  misc_feature: MA Experiment 20001450 PARAMETER Experiment Name: At_Far-red-induction_P Parameter: Tissue Value: Whole Plant
  misc_feature: MA Experiment ID: 20001560 Result: Up-regulated in Transcription
  misc_feature: MA Experiment 20001560 PARAMETER Experiment Name: At_Drought_Soil_Dry_P Parameter: Age (day) Value: 28
  misc_feature: MA Experiment 20001560 PARAMETER Experiment Name: At_Drought_Soil_Dry_P Parameter: Organism Value: A. thaliana
  misc_feature: MA Experiment 20001560 PARAMETER Experiment Name: At_Drought_Soil_Dry_P Parameter: Plant Line Value: WS
  misc_feature: MA Experiment 20001560 PARAMETER Experiment Name: At_Drought_Soil_Dry_P Parameter: Post Timepoint (hr) Value: None
  misc_feature: MA Experiment 20001560 PARAMETER Experiment Name: At_Drought_Soil_Dry_P Parameter: Post-Treatment Value: None
  misc_feature: MA Experiment 20001560 PARAMETER Experiment Name: At_Drought_Soil_Dry_P Parameter: Timepoint (day) Value: 14
  misc_feature: MA Experiment 20001560 PARAMETER Experiment Name: At_Drought_Soil_Dry_P Parameter: Treatment Value: Drought vs. No Drought
  misc_feature: MA Experiment ID: 20001757 Result: Up-regulated in Transcription
  misc_feature: MA Experiment 20001757 PARAMETER Experiment Name: At_50mM_NH4NO3_L-to-H_P Parameter: Timepoint (hr) Value: 6
  misc_feature: MA Experiment 20001757 PARAMETER Experiment Name: At_50mM_NH4NO3_L-to-H_P Parameter: Tissue Value: Leaf
  misc_feature: MA Experiment 20001757 PARAMETER Experiment Name: At_50mM_NH4NO3_L-to-H_P Parameter: Treatment Value: 50mM NH4NO3 vs 100mM Mannitol
  misc_feature: MA Experiment ID: 20001906 Result: Down-regulated in Transcription
  misc_feature: MA Experiment 20001906 PARAMETER Experiment Name: At_Drought_Reproduction_P Parameter: Age (day) Value: 35
  misc_feature: MA Experiment 20001906 PARAMETER Experiment Name: At_Drought_Reproduction_P Parameter: Organism Value: A. thaliana
  misc_feature: MA Experiment 20001906 PARAMETER Experiment Name: At_Drought_Reproduction_P Parameter: Plant Line Value: WS
  misc_feature: MA Experiment 20001906 PARAMETER Experiment Name: At_Drought_Reproduction_P Parameter: Timepoint (day) Value: 5
  misc_feature: MA Experiment 20001906 PARAMETER Experiment Name: At_Drought_Reproduction_P Parameter: Tissue Value: Siliques
  misc_feature: MA Experiment 20001906 PARAMETER Experiment Name: At_Drought_Reproduction_P Parameter: Treatment Value: Drought vs. No Drought
atctctttcctcaatcggagtgagcgcaaaaaatcaaaaattcgccgagagcacaaaccctaatggcttctctctcaatggcttccgttaacgttagcttctgtcatcctttacgctcttcttctccaaaggtctcacttcgcagttccgttcatttcgcgacgagtctttcctcaagtcactccatttctgggcttcgcgctgttttgcctctgaagatttctacagttgcttcccccaattctcaaaagcttcattcttttaccgttttcgctcataagggctacaagatgaagacccacaaggcctcagcgaagcggttcagagtgacgggtagagggaagattgtgaggaggagatctggaaagcagcatttgttagctaagaagaacaacaagaggaaattacgtctatcgaaaatgacggaagtgaaccggagcgactatgacaacgtgatcggagctctgccctacttgaaagtcaatcgaaaggcgacttaagcagagcaggcttgatccttttcttacctgcaattctcattttgtaatctaaagttgtggtaatatccttttgtattgtgatataatttggtcaatgagttgatttttgtttc

SEQ ID NO: 37996 - protein, 145 aa, Arabidopsis thaliana
  peptide (1)..(145): Ceres Seq. ID no. 12602585
  misc_feature (77)..(135): Pfam Name: Ribosomal protein L35 Pfam Description: Ribosomal protein L35
  misc_feature (76)..(138): Homolog of NCBI NO: 17230919 NR Description: 50S ribosomal protein L35 [Nostoc sp. PCC 7120]
  misc_feature (73)..(144): Homolog of NCBI NO: 28411204 NR Description: putative plastid ribosomal protein L35 [Zea mays]
  misc_feature (73)..(144): Homolog of NCBI NO: 28411209 NR Description: putative plastid ribosomal protein L35 [Zea mays]
  misc_feature (73)..(144): Homolog of NCBI NO: 28411206 NR Description: putative plastid ribosomal protein L35 [Zea mays]
  misc_feature (47)..(144): Homolog of NCBI NO: 28411216 NR Description: putative plastid ribosomal protein L35 [Zea mays]
  misc_feature (47)..(144): Homolog of NCBI NO: 28411202 NR Description: putative plastid ribosomal protein L35 [Zea mays]
  misc_feature (2)..(143): Homolog of NCBI NO: 132918 NR Description: 50S RIBOSOMAL PROTEIN L35, CHLOROPLAST PRECURSOR
  misc_feature (1)..(120): Homolog of NCBI NO: 25295676 NR Description: probable chloroplast ribosomal protein L35
  misc_feature (6)..(145): Homolog of NCBI NO: 7572943 NR Description: ribosomal protein L35 [Arabidopsis thaliana]
  misc_feature (1)..(145): Homolog of NCBI NO: 30682291 NR Description: chloroplast ribosomal protein L35 -related
MASLSMASVNVSFCHPLRSSSPKVSLRSSVHFATSLSSSHSISGLRAVLPLKISTVASPNSQKLHSFTVFAHKGYKMKTHKASAKRFRVTGRGKIVRRRSGKQHLLAKKNNKRKLRLSKMTEVNRSDYDNVIGALPYLKVNRKAT

SEQ ID NO: 37997 - protein, 140 aa, Arabidopsis thaliana
  peptide (1)..(140): Ceres Seq. ID no. 12602586
  misc_feature (72)..(130): Pfam Name: Ribosomal protein L35 Pfam Description: Ribosomal protein L35
  misc_feature (71)..(133): Homolog of NCBI NO: 17230919 NR Description: 50S ribosomal protein L35 [Nostoc sp. PCC 7120]
  misc_feature (68)..(139): Homolog of NCBI NO: 28411204 NR Description: putative plastid ribosomal protein L35 [Zea mays]
  misc_feature (68)..(139): Homolog of NCBI NO: 28411209 NR Description: putative plastid ribosomal protein L35 [Zea mays]
  misc_feature (68)..(139): Homolog of NCBI NO: 28411206 NR Description: putative plastid ribosomal protein L35 [Zea mays]
  misc_feature (42)..(139): Homolog of NCBI NO: 28411216 NR Description: putative plastid ribosomal protein L35 [Zea mays]
  misc_feature (42)..(139): Homolog of NCBI NO: 28411202 NR Description: putative plastid ribosomal protein L35 [Zea mays]
  misc_feature (1)..(138): Homolog of NCBI NO: 132918 NR Description: 50S RIBOSOMAL PROTEIN L35, CHLOROPLAST PRECURSOR
  misc_feature (1)..(115): Homolog of NCBI NO: 25295676 NR Description: probable chloroplast ribosomal protein L35
  misc_feature (1)..(140): Homolog of NCBI NO: 7572943 NR Description: ribosomal protein L35 [Arabidopsis thaliana]
  misc_feature (1)..(140): Homolog of NCBI NO: 30682291 NR Description: chloroplast ribosomal protein L35 -related
MASVNVSFCHPLRSSSPKVSLRSSVHFATSLSSSHSISGLRAVLPLKISTVASPNSQKLHSFTVFAHKGYKMKTHKASAKRFRVTGRGKIVRRRSGKQHLLAKKNNKRKLRLSKMTEVNRSDYDNVIGALPYLKVNRKAT

SEQ ID NO: 37998 - DNA, 933 bp, Arabidopsis thaliana
  misc_feature (1)..(933): Ceres Seq. ID no. 12601209
  misc_feature: MA Experiment ID: 108435 Result: Down-regulated in Transcription
  misc_feature: MA Experiment 108435 PARAMETER Experiment Name: At_stm_Mutants_cDNA_P Parameter: Plant Line Value: wt Landsburg vs stm
  misc_feature: MA Experiment 108435 PARAMETER Experiment Name: At_stm_Mutants_cDNA_P Parameter: Tissue Value: Shoot Apical Meristem Region
  misc_feature: MA Experiment ID: 108461 Result: Up-regulated in Transcription
  misc_feature: MA Experiment 108461 PARAMETER Experiment Name: At_Germinating_Seeds_cDNA_P Parameter: Age (day) Value: 1 vs. 0
  misc_feature: MA Experiment 108461 PARAMETER Experiment Name: At_Germinating_Seeds_cDNA_P Parameter: Tissue Value: Germinating Seeds
  misc_feature: MA Experiment ID: 108462 Result: Up-regulated in Transcription
  misc_feature: MA Experiment 108462 PARAMETER Experiment Name: At_Germinating_Seeds_cDNA_P Parameter: Age (day) Value: 2 vs. 0
  misc_feature: MA Experiment 108462 PARAMETER Experiment Name: At_Germinating_Seeds_cDNA_P Parameter: Tissue Value: Germinating Seeds
  misc_feature: MA Experiment ID: 108463 Result: Up-regulated in Transcription
  misc_feature: MA Experiment 108463 PARAMETER Experiment Name: At_Germinating_Seeds_cDNA_P Parameter: Age (day) Value: 3 vs. 0
  misc_feature: MA Experiment 108463 PARAMETER Experiment Name: At_Germinating_Seeds_cDNA_P Parameter: Tissue Value: Germinating Seeds
  misc_feature: MA Experiment ID: 108464 Result: Up-regulated in Transcription
  misc_feature: MA Experiment 108464 PARAMETER Experiment Name: At_Germinating_Seeds_cDNA_P Parameter: Age (day) Value: 4 vs. 0
  misc_feature: MA Experiment 108464 PARAMETER Experiment Name: At_Germinating_Seeds_cDNA_P Parameter: Tissue Value: Germinating Seeds
  misc_feature: MA Experiment ID: 108488 Result: Up-regulated in Transcription
  misc_feature: MA Experiment ID: 108595 Result: Down-regulated in Transcription
  misc_feature: MA Experiment 108595 PARAMETER Experiment Name: At_Ler-pi_Ovule_cDNA_P Parameter: Plant Line Value: null
  misc_feature: MA Experiment ID: 20000071 Result: Down-regulated in Transcription
  misc_feature: MA Experiment 20000071 PARAMETER Experiment Name: At_100uM_ABA_Mutants_cDNA_P Parameter: Plant Line Value: CS8104
  misc_feature: MA Experiment 20000071 PARAMETER Experiment Name: At_100uM_ABA_Mutants_cDNA_P Parameter: Timepoint (hr) Value: 6
  misc_feature: MA Experiment 20000071 PARAMETER Experiment Name: At_100uM_ABA_Mutants_cDNA_P Parameter: Tissue Value: Aerial
  misc_feature: MA Experiment 20000071 PARAMETER Experiment Name: At_100uM_ABA_Mutants_cDNA_P Parameter: Treatment Value: 100uM ABA vs. No Treatment
  misc_feature: MA Experiment ID: 20000086 Result: Down-regulated in Transcription
  misc_feature: MA Experiment 20000086 PARAMETER Experiment Name: At_100uM_ABA_Mutants_cDNA_P Parameter: Plant Line Value: CS22
  misc_feature: MA Experiment 20000086 PARAMETER Experiment Name: At_100uM_ABA_Mutants_cDNA_P Parameter: Timepoint (hr) Value: 6
  misc_feature: MA Experiment 20000086 PARAMETER Experiment Name: At_100uM_ABA_Mutants_cDNA_P Parameter: Tissue Value: Aerial
  misc_feature: MA Experiment 20000086 PARAMETER Experiment Name: At_100uM_ABA_Mutants_cDNA_P Parameter: Treatment Value: 100uM ABA vs. No Treatment
  misc_feature: MA Experiment ID: 20000087 Result: Down-regulated in Transcription
  misc_feature: MA Experiment 20000087 PARAMETER Experiment Name: At_100uM_ABA_Mutants_cDNA_P Parameter: Plant Line Value: WS
  misc_feature: MA Experiment 20000087 PARAMETER Experiment Name: At_100uM_ABA_Mutants_cDNA_P Parameter: Timepoint (hr) Value: 6
  misc_feature: MA Experiment 20000087 PARAMETER Experiment Name: At_100uM_ABA_Mutants_cDNA_P Parameter: Tissue Value: Aerial
  misc_feature: MA Experiment 20000087 PARAMETER Experiment Name: At_100uM_ABA_Mutants_cDNA_P Parameter: Treatment Value: 100uM ABA vs. No Treatment
  misc_feature: MA Experiment ID: 20000088 Result: Down-regulated in Transcription
  misc_feature: MA Experiment 20000088 PARAMETER Experiment Name: At_100uM_ABA_Mutants_cDNA_P Parameter: Plant Line Value: Landsberg
  misc_feature: MA Experiment 20000088 PARAMETER Experiment Name: At_100uM_ABA_Mutants_cDNA_P Parameter: Timepoint (hr) Value: 6
  misc_feature: MA Experiment 20000088 PARAMETER Experiment Name: At_100uM_ABA_Mutants_cDNA_P Parameter: Tissue Value: Aerial
  misc_feature: MA Experiment 20000088 PARAMETER Experiment Name: At_100uM_ABA_Mutants_cDNA_P Parameter: Treatment Value: 100uM ABA vs. No Treatment
  misc_feature: MA Experiment ID: 20000117 Result: Down-regulated in Transcription
  misc_feature: MA Experiment 20000117 PARAMETER Experiment Name: At_100uM_ABA_Mutants_cDNA_P Parameter: Plant Line Value: Columbia
  misc_feature: MA Experiment 20000117 PARAMETER Experiment Name: At_100uM_ABA_Mutants_cDNA_P Parameter: Timepoint (hr) Value: 6
  misc_feature: MA Experiment 20000117 PARAMETER Experiment Name: At_100uM_ABA_Mutants_cDNA_P Parameter: Tissue Value: Aerial
  misc_feature: MA Experiment 20000117 PARAMETER Experiment Name: At_100uM_ABA_Mutants_cDNA_P Parameter: Treatment Value: 100uM ABA vs. No Treatment
  misc_feature: MA Experiment ID: 20000180 Result: Up-regulated in Transcription
  misc_feature: MA Experiment 20000180 PARAMETER Experiment Name: At_Germinating_Seeds_P Parameter: Age (hr) Value: 24 vs. 0
  misc_feature: MA Experiment 20000180 PARAMETER Experiment Name: At_Germinating_Seeds_P Parameter: Tissue Value: Germinating Seeds
  misc_feature: MA Experiment ID: 20000185 Result: Down-regulated in Transcription
  misc_feature: MA Experiment 20000185 PARAMETER Experiment Name: At_Roots__P Parameter: Age (day) Value: 7 vs. 21
  misc_feature: MA Experiment 20000185 PARAMETER Experiment Name: At_Roots__P Parameter: Organism Value: A. thaliana
  misc_feature: MA Experiment 20000185 PARAMETER Experiment Name: At_Roots__P Parameter: Tissue Value: Roots vs. Whole Plant
  misc_feature: MA Experiment ID: 20000438 Result: Up-regulated in Transcription
  misc_feature: MA Experiment 20000438 PARAMETER Experiment Name: At_Shoots__P Parameter: Age (day) Value: 14
  misc_feature: MA Experiment 20000438 PARAMETER Experiment Name: At_Shoots__P Parameter: Tissue Value: Shoots vs. Whole Plant
  misc_feature: MA Experiment ID: 20000439 Result: Down-regulated in Transcription
  misc_feature: MA Experiment 20000439 PARAMETER Experiment Name: At_Roots__P Parameter: Age (day) Value: 14 vs. 21
  misc_feature: MA Experiment 20000439 PARAMETER Experiment Name: At_Roots__P Parameter: Organism Value: A. thaliana
  misc_feature: MA Experiment 20000439 PARAMETER Experiment Name: At_Roots__P Parameter: Tissue Value: Roots vs. Whole Plant
  misc_feature: MA Experiment ID: 20000495 Result: Down-regulated in Transcription
  misc_feature: MA Experiment 20000495 PARAMETER Experiment Name: At_Guard_Cells_P Parameter: Harvest Date Value: 8/2/2002
  misc_feature: MA Experiment 20000495 PARAMETER Experiment Name: At_Guard_Cells_P Parameter: Organism Value: A. thaliana
  misc_feature: MA Experiment 20000495 PARAMETER Experiment Name: At_Guard_Cells_P Parameter: Tissue Value: Guard Cells vs. Leaves
  misc_feature: MA Experiment ID: 20000496 Result: Down-regulated in Transcription
  misc_feature: MA Experiment 20000496 PARAMETER Experiment Name: At_Guard_Cells_P Parameter: Harvest Date Value: 7/19/2002
  misc_feature: MA Experiment 20000496 PARAMETER Experiment Name: At_Guard_Cells_P Parameter: Organism Value: Canola
  misc_feature: MA Experiment 20000496 PARAMETER Experiment Name: At_Guard_Cells_P Parameter: Tissue Value: Guard Cells vs. Leaves
  misc_feature: MA Experiment ID: 20000794 Result: Down-regulated in Transcription
  misc_feature: MA Experiment 20000794 PARAMETER Experiment Name: At_Petals_P Parameter: Age (day) Value: 23-25 days
  misc_feature: MA Experiment 20000794 PARAMETER Experiment Name: At_Petals_P Parameter: Plant Line Value: WS
  misc_feature: MA Experiment 20000794 PARAMETER Experiment Name: At_Petals_P Parameter: Tissue Value: Petals vs. Whole plant
  misc_feature: MA Experiment ID: 20001451 Result: Down-regulated in Transcription
  misc_feature: MA Experiment 20001451 PARAMETER Experiment Name: At_Far-red-induction_P Parameter: Age (day) Value: 7
  misc_feature: MA Experiment 20001451 PARAMETER Experiment Name: At_Far-red-induction_P Parameter: Light Value: Far-red vs. White
  misc_feature: MA Experiment 20001451 PARAMETER Experiment Name: At_Far-red-induction_P Parameter: Organism Value: A. thaliana
  misc_feature: MA Experiment 20001451 PARAMETER Experiment Name: At_Far-red-induction_P Parameter: Plant Line Value: Columbia
  misc_feature: MA Experiment 20001451 PARAMETER Experiment Name: At_Far-red-induction_P Parameter: Timepoint (hr) Value: 24
  misc_feature: MA Experiment 20001451 PARAMETER Experiment Name: At_Far-red-induction_P Parameter: Tissue Value: Whole Plant
  misc_feature: MA Experiment ID: 20001557 Result: Down-regulated in Transcription
  misc_feature: MA Experiment 20001557 PARAMETER Experiment Name: At_Drought_Soil_Dry_P Parameter: Age (day) Value: 27
  misc_feature: MA Experiment 20001557 PARAMETER Experiment Name: At_Drought_Soil_Dry_P Parameter: Organism Value: A. thaliana
  misc_feature: MA Experiment 20001557 PARAMETER Experiment Name: At_Drought_Soil_Dry_P Parameter: Plant Line Value: WS
  misc_feature: MA Experiment 20001557 PARAMETER Experiment Name: At_Drought_Soil_Dry_P Parameter: Post Timepoint (hr) Value: 3
  misc_feature: MA Experiment 20001557 PARAMETER Experiment Name: At_Drought_Soil_Dry_P Parameter: Post-Treatment Value: Re-Water vs. No Drought
  misc_feature: MA Experiment 20001557 PARAMETER Experiment Name: At_Drought_Soil_Dry_P Parameter: Timepoint (day) Value: 13
  misc_feature: MA Experiment 20001557 PARAMETER Experiment Name: At_Drought_Soil_Dry_P Parameter: Treatment Value: Drought vs. No Drought
  misc_feature: MA Experiment ID: 20001757 Result: Up-regulated in Transcription
  misc_feature: MA Experiment 20001757 PARAMETER Experiment Name: At_50mM_NH4NO3_L-to-H_P Parameter: Timepoint (hr) Value: 6
  misc_feature: MA Experiment 20001757 PARAMETER Experiment Name: At_50mM_NH4NO3_L-to-H_P Parameter: Tissue Value: Leaf
  misc_feature: MA Experiment 20001757 PARAMETER Experiment Name: At_50mM_NH4NO3_L-to-H_P Parameter: Treatment Value: 50mM NH4NO3 vs 100mM Mannitol
  misc_feature: MA Experiment ID: 20001905 Result: Down-regulated in Transcription
  misc_feature: MA Experiment 20001905 PARAMETER Experiment Name: At_Drought_Reproduction_P Parameter: Age (day) Value: 40
  misc_feature: MA Experiment 20001905 PARAMETER Experiment Name: At_Drought_Reproduction_P Parameter: Organism Value: A. thaliana
  misc_feature: MA Experiment 20001905 PARAMETER Experiment Name: At_Drought_Reproduction_P Parameter: Plant Line Value: WS
  misc_feature: MA Experiment 20001905 PARAMETER Experiment Name: At_Drought_Reproduction_P Parameter: Timepoint (day) Value: 10
  misc_feature: MA Experiment 20001905 PARAMETER Experiment Name: At_Drought_Reproduction_P Parameter: Tissue Value: Rosettes
  misc_feature: MA Experiment 20001905 PARAMETER Experiment Name: At_Drought_Reproduction_P Parameter: Treatment Value: Drought vs. No Drought
aaatctctctgtgtgatcccacttgtcatcctcctccacaacataaagcttgagaccataaccctttagcgttttcggctaaagctttcgctgactactacaacaatggcgtcctcatccctttcccctgctactcagcttggttctagcagaagtgctttgatggcgatgtcaagtgggttgtttgtgaagccaacgaagatgaatcatcaaatggttagaaaagagaagattggattgagaatttcttgtcaagcgtcgagtattccagcagacagagttccagatatggaaaagaggaagactttgaatcttcttcttcttggggctctttctctacctactggctacatgcttgtcccttacgctaccttctttgttcctcctggaaccggaggtggaggtggtggtactccagccaaggatgcccttggaaacgatgtagttgcagcggaatggcttaagactcatggtcccggtgaccgaaccttgacccaaggattaaagggagatccgacttacctagttgtagagaacgacaagactctagcgacatacggtatcaacgcagtgtgcactcatcttggatgtgttgtgccatggaacaaagctgagaacaagtttctatgtccttgccatggatcccaatacaacgcccaaggaagagtcgttagaggtccagccccattgtcgctagcgttggctcacgcggatatagatgaagctgggaaggttctttttgttccatgggtggaaactgacttcaggactggtgatgctccatggtggtcttaagactcttcaacaagaaaaagagaaagatttggtctttttgtgtaagacttgtttgaatgttcttataatgtataagctacatttcatcgcaattactctgtgaattcttgcctcttatatgaaatattatgttcattc

SEQ ID NO: 37999 - protein, 229 aa, Arabidopsis thaliana
  peptide (1)..(229): Ceres Seq. ID no. 12601210
  misc_feature (113)..(205): Pfam Name: Rieske [2Fe-2S] domain Pfam Description: Rieske [2Fe-2S] domain
  misc_feature (113)..(205): Pfam Name: Rieske [2Fe-2S] domain Pfam Description: Rieske [2Fe-2S] domain
  misc_feature (113)..(205): Pfam Name: Rieske [2Fe-2S] domain Pfam Description: Rieske [2Fe-2S] domain
  misc_feature (1)..(229): Homolog of NCBI NO: 3885886 NR Description: Rieske Fe-S precursor protein [Oryza sativa]
  misc_feature (1)..(229): Homolog of NCBI NO: 2921504 NR Description: cytochrome B6-F complex iron-sulfur subunit
  misc_feature (1)..(229): Homolog of NCBI NO: 136707 NR Description: Cytochrome B6-F complex iron-sulfur subunit,
  misc_feature (1)..(229): Homolog of NCBI NO: 136712 NR Description: Cytochrome B6-F complex iron-sulfur subunit,
  misc_feature (1)..(229): Homolog of NCBI NO: 19999 NR Description: Rieske Fe/S protein of cytochrome b6/f complex
  misc_feature (1)..(229): Homolog of NCBI NO: 3885886 NR Description: Rieske Fe-S precursor protein [Oryza sativa]
  misc_feature (1)..(229): Homolog of NCBI NO: 136707 NR Description: Cytochrome B6-F complex iron-sulfur subunit,
  misc_feature (1)..(229): Homolog of NCBI NO: 19999 NR Description: Rieske Fe/S protein of cytochrome b6/f complex
  misc_feature (1)..(229): Homolog of NCBI NO: 136712 NR Description: Cytochrome B6-F complex iron-sulfur subunit,
  misc_feature (1)..(229): Homolog of NCBI NO: 136707 NR Description: Cytochrome B6-F complex iron-sulfur subunit,
  misc_feature (1)..(229): Homolog of NCBI NO: 2921504 NR Description: cytochrome B6-F complex iron-sulfur subunit
  misc_feature (1)..(229): Homolog of NCBI NO: 3885886 NR Description: Rieske Fe-S precursor protein [Oryza sativa]
  misc_feature (1)..(229): Homolog of NCBI NO: 15236275 NR Description: putative component of cytochrome B6-F complex
  misc_feature (1)..(229): Homolog of NCBI NO: 9843639 NR Description: Rieske FeS protein [Arabidopsis thaliana]
  misc_feature (20)..(229): Homolog of NCBI NO: 30679426 NR Description: Rieske FeS protein (component of cytochrome B6-F
  misc_feature (1)..(229): Homolog of NCBI NO: 401249 NR Description: Cytochrome B6-F complex iron-sulfur subunit 2,
  misc_feature (1)..(229): Homolog of NCBI NO: 401247 NR Description: Cytochrome B6-F complex iron-sulfur subunit 1,
  misc_feature (1)..(229): Homolog of NCBI NO: 15236275 NR Description: putative component of cytochrome B6-F complex
  misc_feature (1)..(229): Homolog of NCBI NO: 9843639 NR Description: Rieske FeS protein [Arabidopsis thaliana]
  misc_feature (20)..(229): Homolog of NCBI NO: 30679426 NR Description: Rieske FeS protein (component of cytochrome B6-F
  misc_feature (1)..(229): Homolog of NCBI NO: 401249 NR Description: Cytochrome B6-F complex iron-sulfur subunit 2,
  misc_feature (1)..(229): Homolog of NCBI NO: 401247 NR Description: Cytochrome B6-F complex iron-sulfur subunit 1,
  misc_feature (1)..(229): Homolog of NCBI NO: 19999 NR Description: Rieske Fe/S protein of cytochrome b6/f complex
  misc_feature (1)..(229): Homolog of NCBI NO: 136712 NR Description: Cytochrome B6-F complex iron-sulfur subunit,
  misc_feature (1)..(229): Homolog of NCBI NO: 2921504 NR Description: cytochrome B6-F complex iron-sulfur subunit
  misc_feature (1)..(229): Homolog of NCBI NO: 401247 NR Description: Cytochrome B6-F complex iron-sulfur subunit 1,
  misc_feature (1)..(229): Homolog of NCBI NO: 401249 NR Description: Cytochrome B6-F complex iron-sulfur subunit 2,
  misc_feature (20)..(229): Homolog of NCBI NO: 30679426 NR Description: Rieske FeS protein (component of cytochrome B6-F
  misc_feature (1)..(229): Homolog of NCBI NO: 9843639 NR Description: Rieske FeS protein [Arabidopsis thaliana]
  misc_feature (1)..(229): Homolog of NCBI NO: 15236275 NR Description: putative component of cytochrome B6-F complex
MASSSLSPATQLGSSRSALMAMSSGLFVKPTKMNHQMVRKEKIGLRISCQASSIPADRVPDMEKRKTLNLLLLGALSLPTGYMLVPYATFFVPPGTGGGGGGTPAKDALGNDVVAAEWLKTHGPGDRTLTQGLKGDPTYLVVENDKTLATYGINAVCTHLGCVVPWNKAENKFLCPCHGSQYNAQGRVVRGPAPLSLALAHADIDEAGKVLFVPWVETDFRTGDAPWWS

SEQ ID NO: 38000 - protein, 210 aa, Arabidopsis thaliana
  peptide (1)..(210): Ceres Seq. ID no. 12601211
  misc_feature (94)..(186): Pfam Name: Rieske [2Fe-2S] domain Pfam Description: Rieske [2Fe-2S] domain
  misc_feature (94)..(186): Pfam Name: Rieske [2Fe-2S] domain Pfam Description: Rieske [2Fe-2S] domain
  misc_feature (94)..(186): Pfam Name: Rieske [2Fe-2S] domain Pfam Description: Rieske [2Fe-2S] domain
  misc_feature (1)..(210): Homolog of NCBI NO: 3885886 NR Description: Rieske Fe-S precursor protein [Oryza sativa]
  misc_feature (1)..(210): Homolog of NCBI NO: 2921504 NR Description: cytochrome B6-F complex iron-sulfur subunit
  misc_feature (1)..(210): Homolog of NCBI NO: 136707 NR Description: Cytochrome B6-F complex iron-sulfur subunit,
  misc_feature (1)..(210): Homolog of NCBI NO: 136712 NR Description: Cytochrome B6-F complex iron-sulfur subunit,
  misc_feature (1)..(210): Homolog of NCBI NO: 19999 NR Description: Rieske Fe/S protein of cytochrome b6/f complex
  misc_feature (1)..(210): Homolog of NCBI NO: 3885886 NR Description: Rieske Fe-S precursor protein [Oryza sativa]
  misc_feature (1)..(210): Homolog of NCBI NO: 136707 NR Description: Cytochrome B6-F complex iron-sulfur subunit,
  misc_feature (1)..(210): Homolog of NCBI NO: 19999 NR Description: Rieske Fe/S protein of cytochrome b6/f complex
  misc_feature (1)..(210): Homolog of NCBI NO: 136712 NR Description: Cytochrome B6-F complex iron-sulfur subunit,
  misc_feature (1)..(210): Homolog of NCBI NO: 136707 NR Description: Cytochrome B6-F complex iron-sulfur subunit,
  misc_feature (1)..(210): Homolog of NCBI NO: 2921504 NR Description: cytochrome B6-F complex iron-sulfur subunit
  misc_feature (1)..(210): Homolog of NCBI NO: 3885886 NR Description: Rieske Fe-S precursor protein [Oryza sativa]
  misc_feature (1)..(210): Homolog of NCBI NO: 15236275 NR Description: putative component of cytochrome B6-F complex
  misc_feature (1)..(210): Homolog of NCBI NO: 9843639 NR Description: Rieske FeS protein [Arabidopsis thaliana]
  misc_feature (1)..(210): Homolog of NCBI NO: 30679426 NR Description: Rieske FeS protein (component of cytochrome B6-F
  misc_feature (1)..(210): Homolog of NCBI NO: 401249 NR Description: Cytochrome B6-F complex iron-sulfur subunit 2,
  misc_feature (1)..(210): Homolog of NCBI NO: 401247 NR Description: Cytochrome B6-F complex iron-sulfur subunit 1,
  misc_feature (1)..(210): Homolog of NCBI NO: 15236275 NR Description: putative component of cytochrome B6-F complex
  misc_feature (1)..(210): Homolog of NCBI NO: 9843639 NR Description: Rieske FeS protein [Arabidopsis thaliana]
  misc_feature (1)..(210): Homolog of NCBI NO: 30679426 NR Description: Rieske FeS protein (component of cytochrome B6-F
  misc_feature (1)..(210): Homolog of NCBI NO: 401249 NR Description: Cytochrome B6-F complex iron-sulfur subunit 2,
  misc_feature (1)..(210): Homolog of NCBI NO: 401247 NR Description: Cytochrome B6-F complex iron-sulfur subunit 1,
  misc_feature (1)..(210): Homolog of NCBI NO: 19999 NR Description: Rieske Fe/S protein of cytochrome b6/f complex
  misc_feature (1)..(210): Homolog of NCBI NO: 136712 NR Description: Cytochrome B6-F complex iron-sulfur subunit,
  misc_feature (1)..(210): Homolog of NCBI NO: 2921504 NR Description: cytochrome B6-F complex iron-sulfur subunit
  misc_feature (1)..(210): Homolog of NCBI NO: 401247 NR Description: Cytochrome B6-F complex iron-sulfur subunit 1,
  misc_feature (1)..(210): Homolog of NCBI NO: 401249 NR Description: Cytochrome B6-F complex iron-sulfur subunit 2,
  misc_feature (1)..(210): Homolog of NCBI NO: 30679426 NR Description: Rieske FeS protein (component of cytochrome B6-F
  misc_feature (1)..(210): Homolog of NCBI NO: 9843639 NR Description: Rieske FeS protein [Arabidopsis thaliana]
  misc_feature (1)..(210): Homolog of NCBI NO: 15236275 NR Description: putative component of cytochrome B6-F complex
MAMSSGLFVKPTKMNHQMVRKEKIGLRISCQASSIPADRVPDMEKRKTLNLLLLGALSLPTGYMLVPYATFFVPPGTGGGGGGTPAKDALGNDVVAAEWLKTHGPGDRTLTQGLKGDPTYLVVENDKTLATYGINAVCTHLGCVVPWNKAENKFLCPCHGSQYNAQGRVVRGPAPLSLALAHADIDEAGKVLFVPWVETDFRTGDAPWWS

SEQ ID NO: 38001 - protein, 208 aa, Arabidopsis thaliana
  peptide (1)..(208): Ceres Seq. ID no. 12601212
  misc_feature (92)..(184): Pfam Name: Rieske [2Fe-2S] domain Pfam Description: Rieske [2Fe-2S] domain
  misc_feature (92)..(184): Pfam Name: Rieske [2Fe-2S] domain Pfam Description: Rieske [2Fe-2S] domain
  misc_feature (92)..(184): Pfam Name: Rieske [2Fe-2S] domain Pfam Description: Rieske [2Fe-2S] domain
  misc_feature (1)..(208): Homolog of NCBI NO: 3885886 NR Description: Rieske Fe-S precursor protein [Oryza sativa]
  misc_feature (1)..(208): Homolog of NCBI NO: 2921504 NR Description: cytochrome B6-F complex iron-sulfur subunit
  misc_feature (1)..(208): Homolog of NCBI NO: 136707 NR Description: Cytochrome B6-F complex iron-sulfur subunit,
  misc_feature (1)..(208): Homolog of NCBI NO: 136712 NR Description: Cytochrome B6-F complex iron-sulfur subunit,
  misc_feature (1)..(208): Homolog of NCBI NO: 19999 NR Description: Rieske Fe/S protein of cytochrome b6/f complex
  misc_feature (1)..(208): Homolog of NCBI NO: 3885886 NR Description: Rieske Fe-S precursor protein [Oryza sativa]
  misc_feature (1)..(208): Homolog of NCBI NO: 136707 NR Description: Cytochrome B6-F complex iron-sulfur subunit,
  misc_feature (1)..(208): Homolog of NCBI NO: 19999 NR Description: Rieske Fe/S protein of cytochrome b6/f complex
  misc_feature (1)..(208): Homolog of NCBI NO: 136712 NR Description: Cytochrome B6-F complex iron-sulfur subunit,
  misc_feature (1)..(208): Homolog of NCBI NO: 136707 NR Description: Cytochrome B6-F complex iron-sulfur subunit,
  misc_feature (1)..(208): Homolog of NCBI NO: 2921504 NR Description: cytochrome B6-F complex iron-sulfur subunit
  misc_feature (1)..(208): Homolog of NCBI NO: 3885886 NR Description: Rieske Fe-S precursor protein [Oryza sativa]
  misc_feature (1)..(208): Homolog of NCBI NO: 15236275 NR Description: putative component of cytochrome B6-F complex
  misc_feature (1)..(208): Homolog of NCBI NO: 9843639 NR Description: Rieske FeS protein [Arabidopsis thaliana]
  misc_feature (1)..(208): Homolog of NCBI NO: 30679426 NR Description: Rieske FeS protein (component of cytochrome B6-F
  misc_feature (1)..(208): Homolog of NCBI NO: 401249 NR Description: Cytochrome B6-F complex iron-sulfur subunit 2,
  misc_feature (1)..(208): Homolog of NCBI NO: 401247 NR Description: Cytochrome B6-F complex iron-sulfur subunit 1,
  misc_feature (1)..(208): Homolog of NCBI NO: 15236275 NR Description: putative component of cytochrome B6-F complex
  misc_feature (1)..(208): Homolog of NCBI NO: 9843639 NR Description: Rieske FeS protein [Arabidopsis thaliana]
  misc_feature (1)..(208): Homolog of NCBI NO: 30679426 NR Description: Rieske FeS protein (component of cytochrome B6-F
  misc_feature (1)..(208): Homolog of NCBI NO: 401249 NR Description: Cytochrome B6-F complex iron-sulfur subunit 2,
  misc_feature (1)..(208): Homolog of NCBI NO: 401247 NR Description: Cytochrome B6-F complex iron-sulfur subunit 1,
  misc_feature (1)..(208): Homolog of NCBI NO: 19999 NR Description: Rieske Fe/S protein of cytochrome b6/f complex
  misc_feature (1)..(208): Homolog of NCBI NO: 136712 NR Description: Cytochrome B6-F complex iron-sulfur subunit,
  misc_feature (1)..(208): Homolog of NCBI NO: 2921504 NR Description: cytochrome B6-F complex iron-sulfur subunit
  misc_feature (1)..(208): Homolog of NCBI NO: 401247 NR Description: Cytochrome B6-F complex iron-sulfur subunit 1,
  misc_feature (1)..(208): Homolog of NCBI NO: 401249 NR Description: Cytochrome B6-F complex iron-sulfur subunit 2,
  misc_feature (1)..(208): Homolog of NCBI NO: 30679426 NR Description: Rieske FeS protein (component of cytochrome B6-F
  misc_feature (1)..(208): Homolog of NCBI NO: 9843639 NR Description: Rieske FeS protein [Arabidopsis thaliana]
  misc_feature (1)..(208): Homolog of NCBI NO: 15236275 NR Description: putative component of cytochrome B6-F complex
MSSGLFVKPTKMNHQMVRKEKIGLRISCQASSIPADRVPDMEKRKTLNLLLLGALSLPTGYMLVPYATFFVPPGTGGGGGGTPAKDALGNDVVAAEWLKTHGPGDRTLTQGLKGDPTYLVVENDKTLATYGINAVCTHLGCVVPWNKAENKFLCPCHGSQYNAQGRVVRGPAPLSLALAHADIDEAGKVLFVPWVETDFRTGDAPWWS

SEQ ID NO: 38002 - DNA, 2235 bp, Arabidopsis thaliana
  misc_feature (1)..(2235): Ceres Seq. ID no. 12466389
  misc_feature: MA Experiment ID: 108433 Result: Up-regulated in Transcription
  misc_feature: MA Experiment 108433 PARAMETER Experiment Name: At_rhl_Mutant2_cDNA_P Parameter: Age (day) Value: 7
  misc_feature: MA Experiment 108433 PARAMETER Experiment Name: At_rhl_Mutant2_cDNA_P Parameter: Organism Value: A. thaliana
  misc_feature: MA Experiment 108433 PARAMETER Experiment Name: At_rhl_Mutant2_cDNA_P Parameter: Plant Line Value: rhl Mutant vs. wt landsburg
  misc_feature: MA Experiment 108433 PARAMETER Experiment Name: At_rhl_Mutant2_cDNA_P Parameter: Tissue Value: Roots
  misc_feature: MA Experiment ID: 108434 Result: Up-regulated in Transcription
  misc_feature: MA Experiment 108434 PARAMETER Experiment Name: At_Root_Tips_cDNA_P Parameter: Tissue Value: Root Tips
  misc_feature: MA Experiment ID: 108462 Result: Up-regulated in Transcription
  misc_feature: MA Experiment 108462 PARAMETER Experiment Name: At_Germinating_Seeds_cDNA_P Parameter: Age (day) Value: 2 vs. 0
  misc_feature: MA Experiment 108462 PARAMETER Experiment Name: At_Germinating_Seeds_cDNA_P Parameter: Tissue Value: Germinating Seeds
  misc_feature: MA Experiment ID: 108463 Result: Up-regulated in Transcription
  misc_feature: MA Experiment 108463 PARAMETER Experiment Name: At_Germinating_Seeds_cDNA_P Parameter: Age (day) Value: 3 vs. 0
  misc_feature: MA Experiment 108463 PARAMETER Experiment Name: At_Germinating_Seeds_cDNA_P Parameter: Tissue Value: Germinating Seeds
  misc_feature: MA Experiment ID: 108464 Result: Up-regulated in Transcription
  misc_feature: MA Experiment 108464 PARAMETER Experiment Name: At_Germinating_Seeds_cDNA_P Parameter: Age (day) Value: 4 vs. 0
  misc_feature: MA Experiment 108464 PARAMETER Experiment Name: At_Germinating_Seeds_cDNA_P Parameter: Tissue Value: Germinating Seeds
  misc_feature: MA Experiment ID: 108561 Result: Down-regulated in Transcription
  misc_feature: MA Experiment 108561 PARAMETER Experiment Name: At_100uM_ABA_cDNA_P Parameter: Timepoint (hr) Value: 6
  misc_feature: MA Experiment 108561 PARAMETER Experiment Name: At_100uM_ABA_cDNA_P Parameter: Tissue Value: Aerial
  misc_feature: MA Experiment 108561 PARAMETER Experiment Name: At_100uM_ABA_cDNA_P Parameter: Treatment Value: 100uM ABA vs. No Treatment
  misc_feature: MA Experiment ID: 108573 Result: Down-regulated in Transcription
  misc_feature: MA Experiment 108573 PARAMETER Experiment Name: At_Drought_cDNA_P Parameter: Timepoint (hr) Value: 6
  misc_feature: MA Experiment 108573 PARAMETER Experiment Name: At_Drought_cDNA_P Parameter: Tissue Value: Aerial
  misc_feature: MA Experiment 108573 PARAMETER Experiment Name: At_Drought_cDNA_P Parameter: Treatment Value: Drought vs. No Drought
  misc_feature: MA Experiment ID: 20000069 Result: Down-regulated in Transcription
  misc_feature: MA Experiment 20000069 PARAMETER Experiment Name: At_100uM_ABA_Mutants_cDNA_P Parameter: Plant Line Value: CS23
  misc_feature: MA Experiment 20000069 PARAMETER Experiment Name: At_100uM_ABA_Mutants_cDNA_P Parameter: Timepoint (hr) Value: 6
  misc_feature: MA Experiment 20000069 PARAMETER Experiment Name: At_100uM_ABA_Mutants_cDNA_P Parameter: Tissue Value: Aerial
  misc_feature: MA Experiment 20000069 PARAMETER Experiment Name: At_100uM_ABA_Mutants_cDNA_P Parameter: Treatment Value: 100uM ABA vs. No Treatment
  misc_feature: MA Experiment ID: 20000070 Result: Down-regulated in Transcription
  misc_feature: MA Experiment 20000070 PARAMETER Experiment Name: At_100uM_ABA_Mutants_cDNA_P Parameter: Plant Line Value: CS24
  misc_feature: MA Experiment 20000070 PARAMETER Experiment Name: At_100uM_ABA_Mutants_cDNA_P Parameter: Timepoint (hr) Value: 6
  misc_feature: MA Experiment 20000070 PARAMETER Experiment Name: At_100uM_ABA_Mutants_cDNA_P Parameter: Tissue Value: Aerial
  misc_feature: MA Experiment 20000070 PARAMETER Experiment Name: At_100uM_ABA_Mutants_cDNA_P Parameter: Treatment Value: 100uM ABA vs. No Treatment
  misc_feature: MA Experiment ID: 20000071 Result: Down-regulated in Transcription
  misc_feature: MA Experiment 20000071 PARAMETER Experiment Name: At_100uM_ABA_Mutants_cDNA_P Parameter: Plant Line Value: CS8104
  misc_feature: MA Experiment 20000071 PARAMETER Experiment Name: At_100uM_ABA_Mutants_cDNA_P Parameter: Timepoint (hr) Value: 6
  misc_feature: MA Experiment 20000071 PARAMETER Experiment Name: At_100uM_ABA_Mutants_cDNA_P Parameter: Tissue Value: Aerial
  misc_feature: MA Experiment 20000071 PARAMETER Experiment Name: At_100uM_ABA_Mutants_cDNA_P Parameter: Treatment Value: 100uM ABA vs. No Treatment
  misc_feature: MA Experiment ID: 20000072 Result: Down-regulated in Transcription
  misc_feature: MA Experiment 20000072 PARAMETER Experiment Name: At_100uM_ABA_Mutants_cDNA_P Parameter: Plant Line Value: CS8105
  misc_feature: MA Experiment 20000072 PARAMETER Experiment Name: At_100uM_ABA_Mutants_cDNA_P Parameter: Timepoint (hr) Value: 6
  misc_feature: MA Experiment 20000072 PARAMETER Experiment Name: At_100uM_ABA_Mutants_cDNA_P Parameter: Tissue Value: Aerial
  misc_feature: MA Experiment 20000072 PARAMETER Experiment Name: At_100uM_ABA_Mutants_cDNA_P Parameter: Treatment Value: 100uM ABA vs. No Treatment
  misc_feature: MA Experiment ID: 20000117 Result: Down-regulated in Transcription
  misc_feature: MA Experiment 20000117 PARAMETER Experiment Name: At_100uM_ABA_Mutants_cDNA_P Parameter: Plant Line Value: Columbia
  misc_feature: MA Experiment 20000117 PARAMETER Experiment Name: At_100uM_ABA_Mutants_cDNA_P Parameter: Timepoint (hr) Value: 6
  misc_feature: MA Experiment 20000117 PARAMETER Experiment Name: At_100uM_ABA_Mutants_cDNA_P Parameter: Tissue Value: Aerial
  misc_feature: MA Experiment 20000117 PARAMETER Experiment Name: At_100uM_ABA_Mutants_cDNA_P Parameter: Treatment Value: 100uM ABA vs. No Treatment
  misc_feature: MA Experiment ID: 20000180 Result: Up-regulated in Transcription
  misc_feature: MA Experiment 20000180 PARAMETER Experiment Name: At_Germinating_Seeds_P Parameter: Age (hr) Value: 24 vs. 0
  misc_feature: MA Experiment 20000180 PARAMETER Experiment Name: At_Germinating_Seeds_P Parameter: Tissue Value: Germinating Seeds
  misc_feature: MA Experiment ID: 20000234 Result: Up-regulated in Transcription
  misc_feature: MA Experiment 20000234 PARAMETER Experiment Name: At_Siliques_P Parameter: Age (day) Value: 21
  misc_feature: MA Experiment 20000234 PARAMETER Experiment Name: At_Siliques_P Parameter: Organism Value: A. thaliana
  misc_feature: MA Experiment 20000234 PARAMETER Experiment Name: At_Siliques_P Parameter: Plant Line Value: WS
  misc_feature: MA Experiment 20000234 PARAMETER Experiment Name: At_Siliques_P Parameter: Tissue Value: Less Than 5mm Siliques vs. Whole Plant
  misc_feature: MA Experiment ID: 20000235 Result: Up-regulated in Transcription
  misc_feature: MA Experiment 20000235 PARAMETER Experiment Name: At_Siliques_P Parameter: Age (day) Value: 21
  misc_feature: MA Experiment 20000235 PARAMETER Experiment Name: At_Siliques_P Parameter: Organism Value: A. thaliana
  misc_feature: MA Experiment 20000235 PARAMETER Experiment Name: At_Siliques_P Parameter: Plant Line Value: WS
  misc_feature: MA Experiment 20000235 PARAMETER Experiment Name: At_Siliques_P Parameter: Tissue Value: 5-10mm Siliques vs. Whole Plant
  misc_feature: MA Experiment ID: 20000264 Result: Up-regulated in Transcription
  misc_feature: MA Experiment 20000264 PARAMETER Experiment Name: At_Open_Flower_P Parameter: Age (day) Value: 21
  misc_feature: MA Experiment 20000264 PARAMETER Experiment Name: At_Open_Flower_P Parameter: Plant Line Value: WS
  misc_feature: MA Experiment 20000264 PARAMETER Experiment Name: At_Open_Flower_P Parameter: Tissue Value: Open Flower vs. Whole Plant
  misc_feature: MA Experiment ID: 20000265 Result: Up-regulated in Transcription
  misc_feature: MA Experiment 20000265 PARAMETER Experiment Name: At_Open_Flower_P Parameter: Age (day) Value: 21
  misc_feature: MA Experiment 20000265 PARAMETER Experiment Name: At_Open_Flower_P Parameter: Plant Line Value: WS
  misc_feature: MA Experiment 20000265 PARAMETER Experiment Name: At_Open_Flower_P Parameter: Tissue Value: Closed Flower vs. Whole Plant
  misc_feature: MA Experiment ID: 20000286 Result: Up-regulated in Transcription
  misc_feature: MA Experiment 20000286 PARAMETER Experiment Name: At_Open_Flower_P Parameter: Age (day) Value: 21
  misc_feature: MA Experiment 20000286 PARAMETER Experiment Name: At_Open_Flower_P Parameter: Plant Line Value: WS
  misc_feature: MA Experiment 20000286 PARAMETER Experiment Name: At_Open_Flower_P Parameter: Tissue Value: Half Open vs. Whole Plant
  misc_feature: MA Experiment ID: 20000437 Result: Down-regulated in Transcription
  misc_feature: MA Experiment 20000437 PARAMETER Experiment Name: At_Drought_P Parameter: Age (day) Value: 8
  misc_feature: MA Experiment 20000437 PARAMETER Experiment Name: At_Drought_P Parameter: Organism Value: A. thaliana
  misc_feature: MA Experiment 20000437 PARAMETER Experiment Name: At_Drought_P Parameter: Plant Line Value: WS
  misc_feature: MA Experiment 20000437 PARAMETER Experiment Name: At_Drought_P Parameter: Timepoint (hr) Value: 24
  misc_feature: MA Experiment 20000437 PARAMETER Experiment Name: At_Drought_P Parameter: Tissue Value: Whole Plant
  misc_feature: MA Experiment 20000437 PARAMETER Experiment Name: At_Drought_P Parameter: Treatment Value: Drought vs. No Drought
  misc_feature: MA Experiment ID: 20000438 Result: Up-regulated in Transcription
  misc_feature: MA Experiment 20000438 PARAMETER Experiment Name: At_Shoots__P Parameter: Age (day) Value: 14
  misc_feature: MA Experiment 20000438 PARAMETER Experiment Name: At_Shoots__P Parameter: Tissue Value: Shoots vs. Whole Plant
  misc_feature: MA Experiment ID: 20000573 Result: Down-regulated in Transcription
  misc_feature: MA Experiment 20000573 PARAMETER Experiment Name: At_100uM_ABA_Mutants__P Parameter: Organism Value: A. thaliana
  misc_feature: MA Experiment 20000573 PARAMETER Experiment Name: At_100uM_ABA_Mutants__P Parameter: Plant Line Value: CS22 vs. Ler wt
  misc_feature: MA Experiment 20000573 PARAMETER Experiment Name: At_100uM_ABA_Mutants__P Parameter: Timepoint (hr) Value: N/A
  misc_feature: MA Experiment 20000573 PARAMETER Experiment Name: At_100uM_ABA_Mutants__P Parameter: Tissue Value: Whole Plant
  misc_feature: MA Experiment 20000573 PARAMETER Experiment Name: At_100uM_ABA_Mutants__P Parameter: Treatment Value: None
  misc_feature: MA Experiment ID: 20000574 Result: Down-regulated in Transcription
  misc_feature: MA Experiment 20000574 PARAMETER Experiment Name: At_100uM_ABA_Mutants__P Parameter: Organism Value: A. thaliana
  misc_feature: MA Experiment 20000574 PARAMETER Experiment Name: At_100uM_ABA_Mutants__P Parameter: Plant Line Value: CS23 vs. Ler wt
  misc_feature: MA Experiment 20000574 PARAMETER Experiment Name: At_100uM_ABA_Mutants__P Parameter: Timepoint (hr) Value: N/A
  misc_feature: MA Experiment 20000574 PARAMETER Experiment Name: At_100uM_ABA_Mutants__P Parameter: Tissue Value: Whole Plant
  misc_feature: MA Experiment 20000574 PARAMETER Experiment Name: At_100uM_ABA_Mutants__P Parameter: Treatment Value: None
  misc_feature: MA Experiment ID: 20001906 Result: Down-regulated in Transcription
  misc_feature: MA Experiment 20001906 PARAMETER Experiment Name: At_Drought_Reproduction_P Parameter: Age (day) Value: 35
  misc_feature: MA Experiment 20001906 PARAMETER Experiment Name: At_Drought_Reproduction_P Parameter: Organism Value: A. thaliana
  misc_feature: MA Experiment 20001906 PARAMETER Experiment Name: At_Drought_Reproduction_P Parameter: Plant Line Value: WS
  misc_feature: MA Experiment 20001906 PARAMETER Experiment Name: At_Drought_Reproduction_P Parameter: Timepoint (day) Value: 5
  misc_feature: MA Experiment 20001906 PARAMETER Experiment Name: At_Drought_Reproduction_P Parameter: Tissue Value: Siliques
  misc_feature: MA Experiment 20001906 PARAMETER Experiment Name: At_Drought_Reproduction_P Parameter: Treatment Value: Drought vs. No Drought
atggtggatccctttttctcgtgcttcgagctccaataaacttttcttacatttttaatccatttttacgttgatatttttttataaaatttccaccaccttacaaaagattttagctttttgtgttactaattaaaatcagaacaaaagttgcaagtctttcatctctatgcacaaatggcgaaagagaacagtagtcatagccttgcagaagcaaagagaaagagactcacttggattctttgtgtaagtggactttgcatattgtcttatgttcttggatcttggcaaaccaacactgtcccaacttcttcctctgaggcttactcaagaatgggatgtgatgaaacatcaacaaccactcgggctcagactactcagactcaaacaaatccttcttctgacgatacttcttcctctttgtcttcctcagaaccagttgagttagatttcgaaagccatcacaaactcgagctgaagattacgaatcaaaccgtaaagtactttgagccatgtgacatgtctttgagtgagtacactccatgtgaagatcgagagagaggaagaagatttgataggaacatgatgaagtacagagagagacattgtccttctaaagatgagcttctttattgtctgattcctcctccaccaaactacaagattccattcaagtggcctcaaagtagagattatgcttggtacgacaacattccacacaaggagcttagtattgagaaagctatccagaactggattcaagtagaaggggaaagattcaggttccctggtggtggcacaatgtttccacgtggagctgatgcttacattgatgatattgctagactcattcctcttactgatggagccattagaacagctattgatacaggatgtggtgtggcgagttttggtgcatacttgttgaagagggatattgtggctatgtcatttgctccaagggacactcatgaagctcaagttcaatttgcgttggaacgtggagttcctgcgattatcgggattatgggatcaagaaggcttccttatccagctagagcttttgatcttgctcactgttctcgttgtttgattccttggtttcaaaatgatggtttgtacttgaccgaagtggaccgggttttaagaccgggcggttattggatcctttcgggtccaccgatcaactggaagaaatactggaaaggctgggaaagatcacaagaggatttgaagcaagagcaagattctatagaagatgcagcaagaagtctttgttggaagaaagttacagaaaagggtgatttatcaatttggcaaaagcctatcaatcacgttgagtgtaacaaactcaaacgagttcacaaaactcctcctctatgcagtaaatcagatttacccgattttgcttggtacaaagatttggaatcttgtgtaacaccattaccagaagcaaacagttcagacgaattcgcaggcggtgcattggaggattggccaaaccgagcttttgcggtgccacctaggataatcgggggaaccattccggacattaatgctgagaaattcagagaagacaatgaagtgtggaaggagagaatatcatattacaaacagataatgccagagctttcaagaggaagatttaggaacataatggacatgaatgcatacttgggaggatttgctgcggcaatgatgaaatatccatcttgggttatgaatgtggttcctgtggatgctgagaagcaaacgttaggggttatctttgaacgaggatttatagggacttatcaagattggtgtgaaggattctctacgtatccgagaacttatgatttgattcatgctggtggattgttcagcatttatgagaacaggtgtgatgttacattaatactacttgagatggatagaattttgagaccagaaggaaccgtggtgtttagagacactgtggaaatgttgacgaagatacaaagcataaccaatggaatgaggtggaagagtcggattttggatcatgagagaggtccttttaatcctgagaagatccttctcgctgtaaaatcctattggaccggtccttcttcttagctagttctagctttcttggaactctctactctaatctttttcttatcttgtgtgtctcatctttgttttatttttaattgtttgttttaaaagatttctatgattatataagaaaatacagggaggatcaacatcttc

SEQ ID NO: 38003 - protein, 639 aa, Arabidopsis thaliana
  peptide (1)..(639): Ceres Seq. ID no. 12466390
  misc_feature (119)..(631): Pfam Name: Putative methyltransferase Pfam Description: Putative methyltransferase
  misc_feature (119)..(631): Pfam Name: Putative methyltransferase Pfam Description: Putative methyltransferase
  misc_feature (24)..(635): Homolog of NCBI NO: 34898042 NR Description: OSJNBa0038F22.19 [Oryza sativa (japonica
  misc_feature (90)..(639): Homolog of NCBI NO: 6752888 NR Description: unknown [Malus x domestica]
  misc_feature (90)..(634): Homolog of NCBI NO: 18071395 NR Description: hypothetical protein [Oryza sativa]
  misc_feature (78)..(639): Homolog of NCBI NO: 18396075 NR Description: expressed protein
  misc_feature (87)..(638): Homolog of NCBI NO: 15236921 NR Description: hypothetical protein; protein id: At4g00750.1
  misc_feature (24)..(635): Homolog of NCBI NO: 34898042 NR Description: OSJNBa0038F22.19 [Oryza sativa (japonica
  misc_feature (90)..(634): Homolog of NCBI NO: 18071395 NR Description: hypothetical protein [Oryza sativa]
  misc_feature (87)..(638): Homolog of NCBI NO: 15236921 NR Description: hypothetical protein; protein id: At4g00750.1
  misc_feature (68)..(638): Homolog of NCBI NO: 15235080 NR Description: putative protein; protein id: At4g10440.1
  misc_feature (1)..(99): Homolog of NCBI NO: 15235080 NR Description: putative protein; protein id: At4g10440.1
  misc_feature (1)..(639): Homolog of NCBI NO: 37535962 NR Description: unknown protein [Oryza sativa (japonica
  misc_feature (1)..(636): Homolog of NCBI NO: 24413975 NR Description: hypothetical protein~similar to Oryza sativa
  misc_feature (89)..(638): Homolog of NCBI NO: 15225560 NR Description: hypothetical protein; protein id: At2g45750.1
  misc_feature (78)..(639): Homolog of NCBI NO: 18396075 NR Description: expressed protein
  misc_feature (90)..(639): Homolog of NCBI NO: 6752888 NR Description: unknown [Malus x domestica]
  misc_feature (89)..(638): Homolog of NCBI NO: 15225560 NR Description: hypothetical protein; protein id: At2g45750.1
  misc_feature (1)..(636): Homolog of NCBI NO: 24413975 NR Description: hypothetical protein~similar to Oryza sativa
  misc_feature (1)..(639): Homolog of NCBI NO: 37535962 NR Description: unknown protein [Oryza sativa (japonica
  misc_feature (1)..(99): Homolog of NCBI NO: 15235080 NR Description: putative protein; protein id: At4g10440.1
  misc_feature (68)..(638): Homolog of NCBI NO: 15235080 NR Description: putative protein; protein id: At4g10440.1
MAKENSSHSLAEAKRKRLTWILCVSGLCILSYVLGSWQTNTVPTSSSEAYSRMGCDETSTTTRAQTTQTQTNPSSDDTSSSLSSSEPVELDFESHHKLELKITNQTVKYFEPCDMSLSEYTPCEDRERGRRFDRNMMKYRERHCPSKDELLYCLIPPPPNYKIPFKWPQSRDYAWYDNIPHKELSIEKAIQNWIQVEGERFRFPGGGTMFPRGADAYIDDIARLIPLTDGAIRTAIDTGCGVASFGAYLLKRDIVAMSFAPRDTHEAQVQFALERGVPAIIGIMGSRRLPYPARAFDLAHCSRCLIPWFQNDGLYLTEVDRVLRPGGYWILSGPPINWKKYWKGWERSQEDLKQEQDSIEDAARSLCWKKVTEKGDLSIWQKPINHVECNKLKRVHKTPPLCSKSDLPDFAWYKDLESCVTPLPEANSSDEFAGGALEDWPNRAFAVPPRIIGGTIPDINAEKFREDNEVWKERISYYKQIMPELSRGRFRNIMDMNAYLGGFAAAMMKYPSWVMNVVPVDAEKQTLGVIFERGFIGTYQDWCEGFSTYPRTYDLIHAGGLFSIYENRCDVTLILLEMDRILRPEGTVVFRDTVEMLTKIQSITNGMRWKSRILDHERGPFNPEKILLAVKSYWTGPSS

SEQ ID NO: 38004 - protein, 587 aa, Arabidopsis thaliana
  peptide (1)..(587): Ceres Seq. ID no. 12466391
  misc_feature (67)..(579): Pfam Name: Putative methyltransferase Pfam Description: Putative methyltransferase
  misc_feature (67)..(579): Pfam Name: Putative methyltransferase Pfam Description: Putative methyltransferase
  misc_feature (1)..(583): Homolog of NCBI NO: 34898042 NR Description: OSJNBa0038F22.19 [Oryza sativa (japonica
  misc_feature (38)..(587): Homolog of NCBI NO: 6752888 NR Description: unknown [Malus x domestica]
  misc_feature (38)..(582): Homolog of NCBI NO: 18071395 NR Description: hypothetical protein [Oryza sativa]
  misc_feature (26)..(587): Homolog of NCBI NO: 18396075 NR Description: expressed protein
  misc_feature (35)..(586): Homolog of NCBI NO: 15236921 NR Description: hypothetical protein; protein id: At4g00750.1
  misc_feature (1)..(583): Homolog of NCBI NO: 34898042 NR Description: OSJNBa0038F22.19 [Oryza sativa (japonica
  misc_feature (38)..(582): Homolog of NCBI NO: 18071395 NR Description: hypothetical protein [Oryza sativa]
  misc_feature (35)..(586): Homolog of NCBI NO: 15236921 NR Description: hypothetical protein; protein id: At4g00750.1
  misc_feature (16)..(586): Homolog of NCBI NO: 15235080 NR Description: putative protein; protein id: At4g10440.1
  misc_feature (1)..(47): Homolog of NCBI NO: 15235080 NR Description: putative protein; protein id: At4g10440.1
  misc_feature (1)..(587): Homolog of NCBI NO: 37535962 NR Description: unknown protein [Oryza sativa (japonica
  misc_feature (1)..(584): Homolog of NCBI NO: 24413975 NR Description: hypothetical protein~similar to Oryza sativa
  misc_feature (37)..(586): Homolog of NCBI NO: 15225560 NR Description: hypothetical protein; protein id: At2g45750.1
  misc_feature (26)..(587): Homolog of NCBI NO: 18396075 NR Description: expressed protein
  misc_feature (38)..(587): Homolog of NCBI NO: 6752888 NR Description: unknown [Malus x domestica]
  misc_feature (37)..(586): Homolog of NCBI NO: 15225560 NR Description: hypothetical protein; protein id: At2g45750.1
  misc_feature (1)..(584): Homolog of NCBI NO: 24413975 NR Description: hypothetical protein~similar to Oryza sativa
  misc_feature (1)..(587): Homolog of NCBI NO: 37535962 NR Description: unknown protein [Oryza sativa (japonica
  misc_feature (1)..(47): Homolog of NCBI NO: 15235080 NR Description: putative protein; protein id: At4g10440.1
  misc_feature (16)..(586): Homolog of NCBI NO: 15235080 NR Description: putative protein; protein id: At4g10440.1
MGCDETSTTTRAQTTQTQTNPSSDDTSSSLSSSEPVELDFESHHKLELKITNQTVKYFEPCDMSLSEYTPCEDRERGRRFDRNMMKYRERHCPSKDELLYCLIPPPPNYKIPFKWPQSRDYAWYDNIPHKELSIEKAIQNWIQVEGERFRFPGGGTMFPRGADAYIDDIARLIPLTDGAIRTAIDTGCGVASFGAYLLKRDIVAMSFAPRDTHEAQVQFALERGVPAIIGIMGSRRLPYPARAFDLAHCSRCLIPWFQNDGLYLTEVDRVLRPGGYWILSGPPINWKKYWKGWERSQEDLKQEQDSIEDAARSLCWKKVTEKGDLSIWQKPINHVECNKLKRVHKTPPLCSKSDLPDFAWYKDLESCVTPLPEANSSDEFAGGALEDWPNRAFAVPPRIIGGTIPDINAEKFREDNEVWKERISYYKQIMPELSRGRFRNIMDMNAYLGGFAAAMMKYPSWVMNVVPVDAEKQTLGVIFERGFIGTYQDWCEGFSTYPRTYDLIHAGGLFSIYENRCDVTLILLEMDRILRPEGTVVFRDTVEMLTKIQSITNGMRWKSRILDHERGPFNPEKILLAVKSYWTGPSS

SEQ ID NO: 38005 - protein, 525 aa, Arabidopsis thaliana
  peptide (1)..(525): Ceres Seq. ID no. 12466392
  misc_feature (5)..(517): Pfam Name: Putative methyltransferase Pfam Description: Putative methyltransferase
  misc_feature (5)..(517): Pfam Name: Putative methyltransferase Pfam Description: Putative methyltransferase
  misc_feature (1)..(520): Homolog of NCBI NO: 22328758 NR Description: putative protein
  misc_feature (1)..(521): Homolog of NCBI NO: 34898042 NR Description: OSJNBa0038F22.19 [Oryza sativa (japonica
  misc_feature (1)..(525): Homolog of NCBI NO: 6752888 NR Description: unknown [Malus x domestica]
  misc_feature (1)..(520): Homolog of NCBI NO: 18071395 NR Description: hypothetical protein [Oryza sativa]
  misc_feature (1)..(525): Homolog of NCBI NO: 18396075 NR Description: expressed protein
  misc_feature (1)..(520): Homolog of NCBI NO: 22328758 NR Description: putative protein
  misc_feature (1)..(525): Homolog of NCBI NO: 6752888 NR Description: unknown [Malus x domestica]
  misc_feature (1)..(525): Homolog of NCBI NO: 18396075 NR Description: expressed protein
  misc_feature (1)..(524): Homolog of NCBI NO: 15235080 NR Description: putative protein; protein id: At4g10440.1
  misc_feature (1)..(525): Homolog of NCBI NO: 37535962 NR Description: unknown protein [Oryza sativa (japonica
  misc_feature (1)..(522): Homolog of NCBI NO: 24413975 NR Description: hypothetical protein~similar to Oryza sativa
  misc_feature (1)..(524): Homolog of NCBI NO: 15225560 NR Description: hypothetical protein; protein id: At2g45750.1
  misc_feature (1)..(524): Homolog of NCBI NO: 15236921 NR Description: hypothetical protein; protein id: At4g00750.1
  misc_feature (1)..(520): Homolog of NCBI NO: 18071395 NR Description: hypothetical protein [Oryza sativa]
  misc_feature (1)..(521): Homolog of NCBI NO: 34898042 NR Description: OSJNBa0038F22.19 [Oryza sativa (japonica
  misc_feature (1)..(524): Homolog of NCBI NO: 15236921 NR Description: hypothetical protein; protein id: At4g00750.1
  misc_feature (1)..(524): Homolog of NCBI NO: 15225560 NR Description: hypothetical protein; protein id: At2g45750.1
  misc_feature (1)..(522): Homolog of NCBI NO: 24413975 NR Description: hypothetical protein~similar to Oryza sativa
  misc_feature (1)..(525): Homolog of NCBI NO: 37535962 NR Description: unknown protein [Oryza sativa (japonica
  misc_feature (1)..(524): Homolog of NCBI NO: 15235080 NR Description: putative protein; protein id: At4g10440.1
MSLSEYTPCEDRERGRRFDRNMMKYRERHCPSKDELLYCLIPPPPNYKIPFKWPQSRDYAWYDNIPHKELSIEKAIQNWIQVEGERFRFPGGGTMFPRGADAYIDDIARLIPLTDGAIRTAIDTGCGVASFGAYLLKRDIVAMSFAPRDTHEAQVQFALERGVPAIIGIMGSRRLPYPARAFDLAHCSRCLIPWFQNDGLYLTEVDRVLRPGGYWILSGPPINWKKYWKGWERSQEDLKQEQDSIEDAARSLCWKKVTEKGDLSIWQKPINHVECNKLKRVHKTPPLCSKSDLPDFAWYKDLESCVTPLPEANSSDEFAGGALEDWPNRAFAVPPRIIGGTIPDINAEKFREDNEVWKERISYYKQIMPELSRGRFRNIMDMNAYLGGFAAAMMKYPSWVMNVVPVDAEKQTLGVIFERGFIGTYQDWCEGFSTYPRTYDLIHAGGLFSIYENRCDVTLILLEMDRILRPEGTVVFRDTVEMLTKIQSITNGMRWKSRILDHERGPFNPEKILLAVKSYWTGPSS

SEQ ID NO: 38006 - DNA, 940 bp, Arabidopsis thaliana
  misc_feature (1)..(940): Ceres Seq. ID no. 12327548
  misc_feature: MA Experiment ID: 108434 Result: Down-regulated in Transcription
  misc_feature: MA Experiment 108434 PARAMETER Experiment Name: At_Root_Tips_cDNA_P Parameter: Tissue Value: Root Tips
  misc_feature: MA Experiment ID: 108435 Result: Up-regulated in Transcription
  misc_feature: MA Experiment 108435 PARAMETER Experiment Name: At_stm_Mutants_cDNA_P Parameter: Plant Line Value: wt Landsburg vs stm
  misc_feature: MA Experiment 108435 PARAMETER Experiment Name: At_stm_Mutants_cDNA_P Parameter: Tissue Value: Shoot Apical Meristem Region
  misc_feature: MA Experiment ID: 20000184 Result: Down-regulated in Transcription
  misc_feature: MA Experiment 20000184 PARAMETER Experiment Name: At_Shoots__P Parameter: Age (day) Value: 7
  misc_feature: MA Experiment 20000184 PARAMETER Experiment Name: At_Shoots__P Parameter: Tissue Value: Shoots vs. Whole Plant
  misc_feature: MA Experiment ID: 20000185 Result: Down-regulated in Transcription
  misc_feature: MA Experiment 20000185 PARAMETER Experiment Name: At_Roots__P Parameter: Age (day) Value: 7 vs. 21
  misc_feature: MA Experiment 20000185 PARAMETER Experiment Name: At_Roots__P Parameter: Organism Value: A. thaliana
  misc_feature: MA Experiment 20000185 PARAMETER Experiment Name: At_Roots__P Parameter: Tissue Value: Roots vs. Whole Plant
  misc_feature: MA Experiment ID: 20000234 Result: Up-regulated in Transcription
  misc_feature: MA Experiment 20000234 PARAMETER Experiment Name: At_Siliques_P Parameter: Age (day) Value: 21
  misc_feature: MA Experiment 20000234 PARAMETER Experiment Name: At_Siliques_P Parameter: Organism Value: A. thaliana
  misc_feature: MA Experiment 20000234 PARAMETER Experiment Name: At_Siliques_P Parameter: Plant Line Value: WS
  misc_feature: MA Experiment 20000234 PARAMETER Experiment Name: At_Siliques_P Parameter: Tissue Value: Less Than 5mm Siliques vs. Whole Plant
  misc_feature: MA Experiment ID: 20000264 Result: Up-regulated in Transcription
  misc_feature: MA Experiment 20000264 PARAMETER Experiment Name: At_Open_Flower_P Parameter: Age (day) Value: 21
  misc_feature: MA Experiment 20000264 PARAMETER Experiment Name: At_Open_Flower_P Parameter: Plant Line Value: WS
  misc_feature: MA Experiment 20000264 PARAMETER Experiment Name: At_Open_Flower_P Parameter: Tissue Value: Open Flower vs. Whole Plant
  misc_feature: MA Experiment ID: 20000439 Result: Down-regulated in Transcription
  misc_feature: MA Experiment 20000439 PARAMETER Experiment Name: At_Roots__P Parameter: Age (day) Value: 14 vs. 21
  misc_feature: MA Experiment 20000439 PARAMETER Experiment Name: At_Roots__P Parameter: Organism Value: A. thaliana
  misc_feature: MA Experiment 20000439 PARAMETER Experiment Name: At_Roots__P Parameter: Tissue Value: Roots vs. Whole Plant
  misc_feature: MA Experiment ID: 20000794 Result: Down-regulated in Transcription
  misc_feature: MA Experiment 20000794 PARAMETER Experiment Name: At_Petals_P Parameter: Age (day) Value: 23-25 days
  misc_feature: MA Experiment 20000794 PARAMETER Experiment Name: At_Petals_P Parameter: Plant Line Value: WS
  misc_feature: MA Experiment 20000794 PARAMETER Experiment Name: At_Petals_P Parameter: Tissue Value: Petals vs. Whole plant
  misc_feature: MA Experiment ID: 20001906 Result: Down-regulated in Transcription
  misc_feature: MA Experiment 20001906 PARAMETER Experiment Name: At_Drought_Reproduction_P Parameter: Age (day) Value: 35
  misc_feature: MA Experiment 20001906 PARAMETER Experiment Name: At_Drought_Reproduction_P Parameter: Organism Value: A. thaliana
  misc_feature: MA Experiment 20001906 PARAMETER Experiment Name: At_Drought_Reproduction_P Parameter: Plant Line Value: WS
  misc_feature: MA Experiment 20001906 PARAMETER Experiment Name: At_Drought_Reproduction_P Parameter: Timepoint (day) Value: 5
  misc_feature: MA Experiment 20001906 PARAMETER Experiment Name: At_Drought_Reproduction_P Parameter: Tissue Value: Siliques
  misc_feature: MA Experiment 20001906 PARAMETER Experiment Name: At_Drought_Reproduction_P Parameter: Treatment Value: Drought vs. No Drought
  misc_feature: MA Experiment ID: 20001908 Result: Down-regulated in Transcription
  misc_feature: MA Experiment 20001908 PARAMETER Experiment Name: At_Drought_Reproduction_P Parameter: Age (day) Value: 40
  misc_feature: MA Experiment 20001908 PARAMETER Experiment Name: At_Drought_Reproduction_P Parameter: Organism Value: A. thaliana
  misc_feature: MA Experiment 20001908 PARAMETER Experiment Name: At_Drought_Reproduction_P Parameter: Plant Line Value: WS
  misc_feature: MA Experiment 20001908 PARAMETER Experiment Name: At_Drought_Reproduction_P Parameter: Timepoint (day) Value: 10
  misc_feature: MA Experiment 20001908 PARAMETER Experiment Name: At_Drought_Reproduction_P Parameter: Tissue Value: Siliques
  misc_feature: MA Experiment 20001908 PARAMETER Experiment Name: At_Drought_Reproduction_P Parameter: Treatment Value: Drought vs. No Drought
gttgtattcagtcacgtgaagaagctatccaggtgatgaaagacgttctcatgatgagaaaagagacgcgagagaagcaagaagacttccttaacacgcttctagaagaactggagaaagacggtagctttttcgaccaaggatcggctataaatctcatcttccttctggcgtttgccttgagagaaggtacctctagttgtactgctttggccgtgaagttcatatccaaagacccgaaagtgcttgcagagctcaagcgtgagcataaggcaattgtagacaacagaaaagataaggaagctggagttagctgggaagaatatagacacaacatgactttcaccaacatggttagcaatgaggtgcttcgcctagcaaacacgacccctttgttgtttcgaaaggcggtgcaagatgttgagatcaaaggatatacaattccggctggttggattgtggcggttgcaccttcagcggttcattttgatcctgcaatctatgagaacccatttgagtttaatccatggagatgggaggggaaagaaatgatttggggatctaaaacgttcatggcgtttggatatggagttagactttgtgtaggtgcagagttttcgcggcttcaaatggcaatcttcctccatcatcttgtggcatattacgatttctcaatggtccaagactccgagatcattcgttcaccattccatcaatacaccaaggatctgcttataaacatctctcagtctcctaccaagtgaaccatgcatgcagtttccaaatcttaataatcagatcattatatgcaataatctcatttcctgcttccgcaaaatctctggagtctttttatatgtaatatgcgatctctataatttttaaaaagtatctatcttgtcaaatgagttaaactttgtttatatatgtcttgaatctg

SEQ ID NO: 38007 - protein, 253 aa, Arabidopsis thaliana
  peptide (1)..(253): Ceres Seq. ID no. 12327549
  misc_feature (7)..(119): Homolog of NCBI NO: 15230572 NR Description: cytochrome P450 - like protein; protein id:
  misc_feature (128)..(251): Homolog of NCBI NO: 8778326 NR Description: F14J16.21 [Arabidopsis thaliana]
  misc_feature (2)..(144): Homolog of NCBI NO: 8778326 NR Description: F14J16.21 [Arabidopsis thaliana]
  misc_feature (2)..(251): Homolog of NCBI NO: 15222806 NR Description: cytochrome P450, putative; protein id:
  misc_feature (4)..(250): Homolog of NCBI NO: 30695352 NR Description: cytochrome p450 family [Arabidopsis thaliana]
  misc_feature (4)..(250): Homolog of NCBI NO: 30695347 NR Description: cytochrome p450 family [Arabidopsis thaliana]
  misc_feature (4)..(250): Homolog of NCBI NO: 22530982 NR Description: cytochrome P450-like protein [Arabidopsis
  misc_feature (176)..(253): Homolog of NCBI NO: 25282639 NR Description: hypothetical protein T30F21.17 [imported] -
  misc_feature (2)..(144): Homolog of NCBI NO: 25282639 NR Description: hypothetical protein T30F21.17 [imported] -
  misc_feature (2)..(253): Homolog of NCBI NO: 15218388 NR Description: cytochrome P450, putative
CIQSREEAIQVMKDVLMMRKETREKQEDFLNTLLEELEKDGSFFDQGSAINLIFLLAFALREGTSSCTALAVKFISKDPKVLAELKREHKAIVDNRKDKEAGVSWEEYRHNMTFTNMVSNEVLRLANTTPLLFRKAVQDVEIKGYTIPAGWIVAVAPSAVHFDPAIYENPFEFNPWRWEGKEMIWGSKTFMAFGYGVRLCVGAEFSRLQMAIFLHHLVAYYDFSMVQDSEIIRSPFHQYTKDLLINISQSPTK

SEQ ID NO: 38008 - protein, 242 aa, Arabidopsis thaliana
  peptide (1)..(242): Ceres Seq. ID no. 12327550
  misc_feature (1)..(108): Homolog of NCBI NO: 15230572 NR Description: cytochrome P450 - like protein; protein id:
  misc_feature (117)..(240): Homolog of NCBI NO: 8778326 NR Description: F14J16.21 [Arabidopsis thaliana]
  misc_feature (1)..(133): Homolog of NCBI NO: 8778326 NR Description: F14J16.21 [Arabidopsis thaliana]
  misc_feature (1)..(240): Homolog of NCBI NO: 15222806 NR Description: cytochrome P450, putative; protein id:
  misc_feature (1)..(239): Homolog of NCBI NO: 30695352 NR Description: cytochrome p450 family [Arabidopsis thaliana]
  misc_feature (1)..(239): Homolog of NCBI NO: 30695347 NR Description: cytochrome p450 family [Arabidopsis thaliana]
  misc_feature (1)..(239): Homolog of NCBI NO: 22530982 NR Description: cytochrome P450-like protein [Arabidopsis
  misc_feature (165)..(242): Homolog of NCBI NO: 25282639 NR Description: hypothetical protein T30F21.17 [imported] -
  misc_feature (1)..(133): Homolog of NCBI NO: 25282639 NR Description: hypothetical protein T30F21.17 [imported] -
  misc_feature (1)..(242): Homolog of NCBI NO: 15218388 NR Description: cytochrome P450, putative
MKDVLMMRKETREKQEDFLNTLLEELEKDGSFFDQGSAINLIFLLAFALREGTSSCTALAVKFISKDPKVLAELKREHKAIVDNRKDKEAGVSWEEYRHNMTFTNMVSNEVLRLANTTPLLFRKAVQDVEIKGYTIPAGWIVAVAPSAVHFDPAIYENPFEFNPWRWEGKEMIWGSKTFMAFGYGVRLCVGAEFSRLQMAIFLHHLVAYYDFSMVQDSEIIRSPFHQYTKDLLINISQSPTK

SEQ ID NO: 38009 - protein, 237 aa, Arabidopsis thaliana
  peptide (1)..(237): Ceres Seq. ID no. 12327551
  misc_feature (1)..(103): Homolog of NCBI NO: 15230572 NR Description: cytochrome P450 - like protein; protein id:
  misc_feature (112)..(235): Homolog of NCBI NO: 8778326 NR Description: F14J16.21 [Arabidopsis thaliana]
  misc_feature (1)..(128): Homolog of NCBI NO: 8778326 NR Description: F14J16.21 [Arabidopsis thaliana]
  misc_feature (1)..(235): Homolog of NCBI NO: 15222806 NR Description: cytochrome P450, putative; protein id:
  misc_feature (1)..(234): Homolog of NCBI NO: 30695352 NR Description: cytochrome p450 family [Arabidopsis thaliana]
  misc_feature (1)..(234): Homolog of NCBI NO: 30695347 NR Description: cytochrome p450 family [Arabidopsis thaliana]
  misc_feature (1)..(234): Homolog of NCBI NO: 22530982 NR Description: cytochrome P450-like protein [Arabidopsis
  misc_feature (160)..(237): Homolog of NCBI NO: 25282639 NR Description: hypothetical protein T30F21.17 [imported] -
  misc_feature (1)..(128): Homolog of NCBI NO: 25282639 NR Description: hypothetical protein T30F21.17 [imported] -
  misc_feature (1)..(237): Homolog of NCBI NO: 15218388 NR Description: cytochrome P450, putative
MMRKETREKQEDFLNTLLEELEKDGSFFDQGSAINLIFLLAFALREGTSSCTALAVKFISKDPKVLAELKREHKAIVDNRKDKEAGVSWEEYRHNMTFTNMVSNEVLRLANTTPLLFRKAVQDVEIKGYTIPAGWIVAVAPSAVHFDPAIYENPFEFNPWRWEGKEMIWGSKTFMAFGYGVRLCVGAEFSRLQMAIFLHHLVAYYDFSMVQDSEIIRSPFHQYTKDLLINISQSPTK

SEQ ID NO: 38010 - DNA, 973 bp, Arabidopsis thaliana
  misc_feature (1)..(973): Ceres Seq. ID no. 13592713
  misc_feature: MA Experiment ID: 20000227 Result: Up-regulated in Transcription
  misc_feature: MA Experiment 20000227 PARAMETER Experiment Name: At_Root-Tips-vs-Tops_P Parameter: Tissue Value: Root Tips vs. Root Tops
  misc_feature: MA Experiment ID: 20001451 Result: Down-regulated in Transcription
  misc_feature: MA Experiment 20001451 PARAMETER Experiment Name: At_Far-red-induction_P Parameter: Age (day) Value: 7
  misc_feature: MA Experiment 20001451 PARAMETER Experiment Name: At_Far-red-induction_P Parameter: Light Value: Far-red vs. White
  misc_feature: MA Experiment 20001451 PARAMETER Experiment Name: At_Far-red-induction_P Parameter: Organism Value: A. thaliana
  misc_feature: MA Experiment 20001451 PARAMETER Experiment Name: At_Far-red-induction_P Parameter: Plant Line Value: Columbia
  misc_feature: MA Experiment 20001451 PARAMETER Experiment Name: At_Far-red-induction_P Parameter: Timepoint (hr) Value: 24
  misc_feature: MA Experiment 20001451 PARAMETER Experiment Name: At_Far-red-induction_P Parameter: Tissue Value: Whole Plant
atcgaaaaataattctccgtcgagatcgcttctctccccgttgccgtccgtccccaccgctgagtgatagatcgaaacagagaaacacacacggcgaagaagatttcaccatattttgtctaagtggattctgttgagagagagagatggctatgtctcaggtggtgaacacgtacccgctttcgaactacagcttcggaactaaggaacccaagctggaaaaggacacctccgtcgccgaccggctcgctcgtatgaaaatcaactatatgaaagagggcatgaggactagcgttgaagggattctactggtgcaagaacacaaccatcctcatatacttctgctacaaattggtaacacattctgcaaacttccaggtggacgcctgaagcctggtgaaaatgaagctgatggtctgaaaagaaagctgaccagtaaacttggaggcaattcggctgctcttgtacctgactggacggtaggagaatgtgttgcgacatggtggcgtccaaactttgaaaccatgatgtacccgtattgccctcctcacatcacgaaaccaaaggaatgcaagagactctacattgttcacttgtctgagaaagagtactttgctgtgcccaaaaatttgaagctcttggccgtccctttgttcgaactctatgacaatgttcagagatatggaccggttatatcaaccattccgcagcagctatccagattccatttcaacatgattagttcgtgatttcgactcggtgtgttcaagaacaaggaacctatcagatgggtaagttacttaggtacggtagagagctgtagctaccggattagagatggggttttccaatgatgcgagttgggttttttgcattatagacttgttggcttttatgtagaaccggttcaaagtgtcagcacaaaaaacaaagattattgtatctcatttttaaaagcatttgtcattgtttg

SEQ ID NO: 38011 - protein, 200 aa, Arabidopsis thaliana
  peptide (1)..(200): Ceres Seq. ID no. 13592714
  misc_feature (47)..(173): Pfam Name: NUDIX domain Pfam Description: NUDIX domain
  misc_feature (87)..(177): Homolog of NCBI NO: 7486820 NR Description: hypothetical protein M7J2.80 - Arabidopsis
  misc_feature (4)..(195): Homolog of NCBI NO: 39595588 NR Description: Hypothetical protein CBG12500 [Caenorhabditis
  misc_feature (4)..(195): Homolog of NCBI NO: 17507315 NR Description: Cleavage polyadenylation specific factor 5
  misc_feature (6)..(198): Homolog of NCBI NO: 18417474 NR Description: mRNA cleavage factor subunit - like protein
  misc_feature (2)..(195): Homolog of NCBI NO: 24370468 NR Description: putative pre-mrna cleavage factor [Brugia malayi]
  misc_feature (1)..(195): Homolog of NCBI NO: 13386106 NR Description: cleavage and polyadenylation specific factor 5
  misc_feature (1)..(195): Homolog of NCBI NO: 5901926 NR Description: cleavage and polyadenylation specific factor 5,
  misc_feature (2)..(144): Homolog of NCBI NO: 25354611 NR Description: hypothetical protein AT4g25550 [imported] -
  misc_feature (1)..(144): Homolog of NCBI NO: 7486820 NR Description: hypothetical protein M7J2.80 - Arabidopsis
  misc_feature (1)..(200): Homolog of NCBI NO: 30686923 NR Description: expressed protein [Arabidopsis thaliana]
MAMSQVVNTYPLSNYSFGTKEPKLEKDTSVADRLARMKINYMKEGMRTSVEGILLVQEHNHPHILLLQIGNTFCKLPGGRLKPGENEADGLKRKLTSKLGGNSAALVPDWTVGECVATWWRPNFETMMYPYCPPHITKPKECKRLYIVHLSEKEYFAVPKNLKLLAVPLFELYDNVQRYGPVISTIPQQLSRFHFNMISS

SEQ ID NO: 38012 - protein, 198 aa, Arabidopsis thaliana
  peptide (1)..(198): Ceres Seq. ID no. 13592715
  misc_feature (45)..(171): Pfam Name: NUDIX domain Pfam Description: NUDIX domain
  misc_feature (85)..(175): Homolog of NCBI NO: 7486820 NR Description: hypothetical protein M7J2.80 - Arabidopsis
  misc_feature (2)..(193): Homolog of NCBI NO: 39595588 NR Description: Hypothetical protein CBG12500 [Caenorhabditis
  misc_feature (2)..(193): Homolog of NCBI NO: 17507315 NR Description: Cleavage polyadenylation specific factor 5
  misc_feature (4)..(196): Homolog of NCBI NO: 18417474 NR Description: mRNA cleavage factor subunit - like protein
  misc_feature (1)..(193): Homolog of NCBI NO: 24370468 NR Description: putative pre-mrna cleavage factor [Brugia malayi]
  misc_feature (1)..(193): Homolog of NCBI NO: 13386106 NR Description: cleavage and polyadenylation specific factor 5
  misc_feature (1)..(193): Homolog of NCBI NO: 5901926 NR Description: cleavage and polyadenylation specific factor 5,
  misc_feature (1)..(142): Homolog of NCBI NO: 25354611 NR Description: hypothetical protein AT4g25550 [imported] -
  misc_feature (1)..(142): Homolog of NCBI NO: 7486820 NR Description: hypothetical protein M7J2.80 - Arabidopsis
  misc_feature (1)..(198): Homolog of NCBI NO: 30686923 NR Description: expressed protein [Arabidopsis thaliana]
MSQVVNTYPLSNYSFGTKEPKLEKDTSVADRLARMKINYMKEGMRTSVEGILLVQEHNHPHILLLQIGNTFCKLPGGRLKPGENEADGLKRKLTSKLGGNSAALVPDWTVGECVATWWRPNFETMMYPYCPPHITKPKECKRLYIVHLSEKEYFAVPKNLKLLAVPLFELYDNVQRYGPVISTIPQQLSRFHFNMISS

SEQ ID NO: 38013 - protein, 164 aa, Arabidopsis thaliana
  peptide (1)..(164): Ceres Seq. ID no. 13592716
  misc_feature (11)..(137): Pfam Name: NUDIX domain Pfam Description: NUDIX domain
  misc_feature (51)..(141): Homolog of NCBI NO: 7486820 NR Description: hypothetical protein M7J2.80 - Arabidopsis
  misc_feature (1)..(159): Homolog of NCBI NO: 39595588 NR Description: Hypothetical protein CBG12500 [Caenorhabditis
  misc_feature (1)..(159): Homolog of NCBI NO: 17507315 NR Description: Cleavage polyadenylation specific factor 5
  misc_feature (1)..(162): Homolog of NCBI NO: 18417474 NR Description: mRNA cleavage factor subunit - like protein
  misc_feature (1)..(159): Homolog of NCBI NO: 24370468 NR Description: putative pre-mrna cleavage factor [Brugia malayi]
  misc_feature (1)..(159): Homolog of NCBI NO: 13386106 NR Description: cleavage and polyadenylation specific factor 5
  misc_feature (1)..(159): Homolog of NCBI NO: 5901926 NR Description: cleavage and polyadenylation specific factor 5,
  misc_feature (1)..(108): Homolog of NCBI NO: 25354611 NR Description: hypothetical protein AT4g25550 [imported] -
  misc_feature (1)..(108): Homolog of NCBI NO: 7486820 NR Description: hypothetical protein M7J2.80 - Arabidopsis
  misc_feature (1)..(164): Homolog of NCBI NO: 30686923 NR Description: expressed protein [Arabidopsis thaliana]
MKINYMKEGMRTSVEGILLVQEHNHPHILLLQIGNTFCKLPGGRLKPGENEADGLKRKLTSKLGGNSAALVPDWTVGECVATWWRPNFETMMYPYCPPHITKPKECKRLYIVHLSEKEYFAVPKNLKLLAVPLFELYDNVQRYGPVISTIPQQLSRFHFNMISS

SEQ ID NO: 38014 - DNA, 1065 bp, Arabidopsis thaliana
  misc_feature (1)..(1065): Ceres Seq. ID no. 13487967
  misc_feature: MA Experiment ID: 108463 Result: Down-regulated in Transcription
  misc_feature: MA Experiment 108463 PARAMETER Experiment Name: At_Germinating_Seeds_cDNA_P Parameter: Age (day) Value: 3 vs. 0
  misc_feature: MA Experiment 108463 PARAMETER Experiment Name: At_Germinating_Seeds_cDNA_P Parameter: Tissue Value: Germinating Seeds
  misc_feature: MA Experiment ID: 108488 Result: Down-regulated in Transcription
  misc_feature: MA Experiment ID: 108576 Result: Up-regulated in Transcription
  misc_feature: MA Experiment 108576 PARAMETER Experiment Name: At_42deg_Heat_cDNA_P Parameter: Temperature (deg C) Value: 42 vs. 22
  misc_feature: MA Experiment 108576 PARAMETER Experiment Name: At_42deg_Heat_cDNA_P Parameter: Timepoint (hr) Value: 1
  misc_feature: MA Experiment 108576 PARAMETER Experiment Name: At_42deg_Heat_cDNA_P Parameter: Tissue Value: Aerial
  misc_feature: MA Experiment ID: 20000093 Result: Up-regulated in Transcription
  misc_feature: MA Experiment 20000093 PARAMETER Experiment Name: At_42deg_Heat_cDNA_P Parameter: Temperature (deg C) Value: 42 vs. 22
  misc_feature: MA Experiment 20000093 PARAMETER Experiment Name: At_42deg_Heat_cDNA_P Parameter: Timepoint (hr) Value: 0.5
  misc_feature: MA Experiment 20000093 PARAMETER Experiment Name: At_42deg_Heat_cDNA_P Parameter: Tissue Value: Aerial
  misc_feature: MA Experiment ID: 20000113 Result: Up-regulated in Transcription
  misc_feature: MA Experiment 20000113 PARAMETER Experiment Name: At_42deg_Heat_cDNA_P Parameter: Temperature (deg C) Value: 42 vs. 22
  misc_feature: MA Experiment 20000113 PARAMETER Experiment Name: At_42deg_Heat_cDNA_P Parameter: Timepoint (hr) Value: 8
  misc_feature: MA Experiment 20000113 PARAMETER Experiment Name: At_42deg_Heat_cDNA_P Parameter: Tissue Value: Aerial
  misc_feature: MA Experiment ID: 20000144 Result: Up-regulated in Transcription
  misc_feature: MA Experiment 20000144 PARAMETER Experiment Name: At_42deg_Heat_cDNA_P Parameter: Temperature (deg C) Value: 42 vs. 22
  misc_feature: MA Experiment 20000144 PARAMETER Experiment Name: At_42deg_Heat_cDNA_P Parameter: Timepoint (hr) Value: 1
  misc_feature: MA Experiment 20000144 PARAMETER Experiment Name: At_42deg_Heat_cDNA_P Parameter: Tissue Value: Aerial
  misc_feature: MA Experiment ID: 20000171 Result: Up-regulated in Transcription
  misc_feature: MA Experiment 20000171 PARAMETER Experiment Name: At_42deg_Heat_P Parameter: Age (day) Value: 14
  misc_feature: MA Experiment 20000171 PARAMETER Experiment Name: At_42deg_Heat_P Parameter: Organism Value: A. thaliana
  misc_feature: MA Experiment 20000171 PARAMETER Experiment Name: At_42deg_Heat_P Parameter: Plant Line Value: WS
  misc_feature: MA Experiment 20000171 PARAMETER Experiment Name: At_42deg_Heat_P Parameter: Temperature (deg C) Value: 42 vs. 22
  misc_feature: MA Experiment 20000171 PARAMETER Experiment Name: At_42deg_Heat_P Parameter: Timepoint (hr) Value: 1
  misc_feature: MA Experiment 20000171 PARAMETER Experiment Name: At_42deg_Heat_P Parameter: Tissue Value: Aerial
  misc_feature: MA Experiment ID: 20000173 Result: Up-regulated in Transcription
  misc_feature: MA Experiment 20000173 PARAMETER Experiment Name: At_42deg_Heat_P Parameter: Age (day) Value: 14
  misc_feature: MA Experiment 20000173 PARAMETER Experiment Name: At_42deg_Heat_P Parameter: Organism Value: A. thaliana
  misc_feature: MA Experiment 20000173 PARAMETER Experiment Name: At_42deg_Heat_P Parameter: Plant Line Value: WS
  misc_feature: MA Experiment 20000173 PARAMETER Experiment Name: At_42deg_Heat_P Parameter: Temperature (deg C) Value: 42 vs. 22
  misc_feature: MA Experiment 20000173 PARAMETER Experiment Name: At_42deg_Heat_P Parameter: Timepoint (hr) Value: 6
  misc_feature: MA Experiment 20000173 PARAMETER Experiment Name: At_42deg_Heat_P Parameter: Tissue Value: Aerial
  misc_feature: MA Experiment ID: 20000180 Result: Down-regulated in Transcription
  misc_feature: MA Experiment 20000180 PARAMETER Experiment Name: At_Germinating_Seeds_P Parameter: Age (hr) Value: 24 vs. 0
  misc_feature: MA Experiment 20000180 PARAMETER Experiment Name: At_Germinating_Seeds_P Parameter: Tissue Value: Germinating Seeds
  misc_feature: MA Experiment ID: 20000182 Result: Up-regulated in Transcription
  misc_feature: MA Experiment 20000182 PARAMETER Experiment Name: At_2mM_SA_P Parameter: Age (day) Value: 14
  misc_feature: MA Experiment 20000182 PARAMETER Experiment Name: At_2mM_SA_P Parameter: Organism Value: A. thaliana
  misc_feature: MA Experiment 20000182 PARAMETER Experiment Name: At_2mM_SA_P Parameter: Plant Line Value: WS
  misc_feature: MA Experiment 20000182 PARAMETER Experiment Name: At_2mM_SA_P Parameter: Timepoint (hr) Value: 6
  misc_feature: MA Experiment 20000182 PARAMETER Experiment Name: At_2mM_SA_P Parameter: Tissue Value: Aerial
  misc_feature: MA Experiment 20000182 PARAMETER Experiment Name: At_2mM_SA_P Parameter: Treatment Value: 2mM SA vs. No Treatment
  misc_feature: MA Experiment ID: 20000185 Result: Up-regulated in Transcription
  misc_feature: MA Experiment 20000185 PARAMETER Experiment Name: At_Roots__P Parameter: Age (day) Value: 7 vs. 21
  misc_feature: MA Experiment 20000185 PARAMETER Experiment Name: At_Roots__P Parameter: Organism Value: A. thaliana
  misc_feature: MA Experiment 20000185 PARAMETER Experiment Name: At_Roots__P Parameter: Tissue Value: Roots vs. Whole Plant
  misc_feature: MA Experiment ID: 20000437 Result: Up-regulated in Transcription
  misc_feature: MA Experiment 20000437 PARAMETER Experiment Name: At_Drought_P Parameter: Age (day) Value: 8
  misc_feature: MA Experiment 20000437 PARAMETER Experiment Name: At_Drought_P Parameter: Organism Value: A. thaliana
  misc_feature: MA Experiment 20000437 PARAMETER Experiment Name: At_Drought_P Parameter: Plant Line Value: WS
  misc_feature: MA Experiment 20000437 PARAMETER Experiment Name: At_Drought_P Parameter: Timepoint (hr) Value: 24
  misc_feature: MA Experiment 20000437 PARAMETER Experiment Name: At_Drought_P Parameter: Tissue Value: Whole Plant
  misc_feature: MA Experiment 20000437 PARAMETER Experiment Name: At_Drought_P Parameter: Treatment Value: Drought vs. No Drought
  misc_feature: MA Experiment ID: 20000495 Result: Down-regulated in Transcription
  misc_feature: MA Experiment 20000495 PARAMETER Experiment Name: At_Guard_Cells_P Parameter: Harvest Date Value: 8/2/2002
  misc_feature: MA Experiment 20000495 PARAMETER Experiment Name: At_Guard_Cells_P Parameter: Organism Value: A. thaliana
  misc_feature: MA Experiment 20000495 PARAMETER Experiment Name: At_Guard_Cells_P Parameter: Tissue Value: Guard Cells vs. Leaves
  misc_feature: MA Experiment ID: 20000794 Result: Up-regulated in Transcription
  misc_feature: MA Experiment 20000794 PARAMETER Experiment Name: At_Petals_P Parameter: Age (day) Value: 23-25 days
  misc_feature: MA Experiment 20000794 PARAMETER Experiment Name: At_Petals_P Parameter: Plant Line Value: WS
  misc_feature: MA Experiment 20000794 PARAMETER Experiment Name: At_Petals_P Parameter: Tissue Value: Petals vs. Whole plant
  misc_feature: MA Experiment ID: 20001247 Result: Down-regulated in Transcription
  misc_feature: MA Experiment 20001247 PARAMETER Experiment Name: At_Far-red-induction_P Parameter: Age (day) Value: 7
  misc_feature: MA Experiment 20001247 PARAMETER Experiment Name: At_Far-red-induction_P Parameter: Light Value: Far-red vs. White
  misc_feature: MA Experiment 20001247 PARAMETER Experiment Name: At_Far-red-induction_P Parameter: Organism Value: A. thaliana
  misc_feature: MA Experiment 20001247 PARAMETER Experiment Name: At_Far-red-induction_P Parameter: Plant Line Value: Columbia
  misc_feature: MA Experiment 20001247 PARAMETER Experiment Name: At_Far-red-induction_P Parameter: Timepoint (hr) Value: 1
  misc_feature: MA Experiment 20001247 PARAMETER Experiment Name: At_Far-red-induction_P Parameter: Tissue Value: Whole Plant
  misc_feature: MA Experiment ID: 20001248 Result: Down-regulated in Transcription
  misc_feature: MA Experiment 20001248 PARAMETER Experiment Name: At_Far-red-induction_P Parameter: Age (day) Value: 7
  misc_feature: MA Experiment 20001248 PARAMETER Experiment Name: At_Far-red-induction_P Parameter: Light Value: Far-red vs. White
  misc_feature: MA Experiment 20001248 PARAMETER Experiment Name: At_Far-red-induction_P Parameter: Organism Value: A. thaliana
  misc_feature: MA Experiment 20001248 PARAMETER Experiment Name: At_Far-red-induction_P Parameter: Plant Line Value: Columbia
  misc_feature: MA Experiment 20001248 PARAMETER Experiment Name: At_Far-red-induction_P Parameter: Timepoint (hr) Value: 4
  misc_feature: MA Experiment 20001248 PARAMETER Experiment Name: At_Far-red-induction_P Parameter: Tissue Value: Whole Plant
  misc_feature: MA Experiment ID: 20001450 Result: Down-regulated in Transcription
  misc_feature: MA Experiment 20001450 PARAMETER Experiment Name: At_Far-red-induction_P Parameter: Age (day) Value: 7
  misc_feature: MA Experiment 20001450 PARAMETER Experiment Name: At_Far-red-induction_P Parameter: Light Value: Far-red vs. White
  misc_feature: MA Experiment 20001450 PARAMETER Experiment Name: At_Far-red-induction_P Parameter: Organism Value: A. thaliana
  misc_feature: MA Experiment 20001450 PARAMETER Experiment Name: At_Far-red-induction_P Parameter: Plant Line Value: Columbia
  misc_feature: MA Experiment 20001450 PARAMETER Experiment Name: At_Far-red-induction_P Parameter: Timepoint (hr) Value: 8
  misc_feature: MA Experiment 20001450 PARAMETER Experiment Name: At_Far-red-induction_P Parameter: Tissue Value: Whole Plant
  misc_feature: MA Experiment ID: 20001451 Result: Down-regulated in Transcription
  misc_feature: MA Experiment 20001451 PARAMETER Experiment Name: At_Far-red-induction_P Parameter: Age (day) Value: 7
  misc_feature: MA Experiment 20001451 PARAMETER Experiment Name: At_Far-red-induction_P Parameter: Light Value: Far-red vs. White
  misc_feature: MA Experiment 20001451 PARAMETER Experiment Name: At_Far-red-induction_P Parameter: Organism Value: A. thaliana
  misc_feature: MA Experiment 20001451 PARAMETER Experiment Name: At_Far-red-induction_P Parameter: Plant Line Value: Columbia
  misc_feature: MA Experiment 20001451 PARAMETER Experiment Name: At_Far-red-induction_P Parameter: Timepoint (hr) Value: 24
  misc_feature: MA Experiment 20001451 PARAMETER Experiment Name: At_Far-red-induction_P Parameter: Tissue Value: Whole Plant
  misc_feature: MA Experiment ID: 20001904 Result: Up-regulated in Transcription
  misc_feature: MA Experiment 20001904 PARAMETER Experiment Name: At_Drought_Reproduction_P Parameter: Age (day) Value: 37
  misc_feature: MA Experiment 20001904 PARAMETER Experiment Name: At_Drought_Reproduction_P Parameter: Organism Value: A. thaliana
  misc_feature: MA Experiment 20001904 PARAMETER Experiment Name: At_Drought_Reproduction_P Parameter: Plant Line Value: WS
  misc_feature: MA Experiment 20001904 PARAMETER Experiment Name: At_Drought_Reproduction_P Parameter: Timepoint (day) Value: 7
  misc_feature: MA Experiment 20001904 PARAMETER Experiment Name: At_Drought_Reproduction_P Parameter: Tissue Value: Rosettes
  misc_feature: MA Experiment 20001904 PARAMETER Experiment Name: At_Drought_Reproduction_P Parameter: Treatment Value: Drought vs. No Drought
  misc_feature: MA Experiment ID: 20001905 Result: Up-regulated in Transcription
  misc_feature: MA Experiment 20001905 PARAMETER Experiment Name: At_Drought_Reproduction_P Parameter: Age (day) Value: 40
  misc_feature: MA Experiment 20001905 PARAMETER Experiment Name: At_Drought_Reproduction_P Parameter: Organism Value: A. thaliana
  misc_feature: MA Experiment 20001905 PARAMETER Experiment Name: At_Drought_Reproduction_P Parameter: Plant Line Value: WS
  misc_feature: MA Experiment 20001905 PARAMETER Experiment Name: At_Drought_Reproduction_P Parameter: Timepoint (day) Value: 10
  misc_feature: MA Experiment 20001905 PARAMETER Experiment Name: At_Drought_Reproduction_P Parameter: Tissue Value: Rosettes
  misc_feature: MA Experiment 20001905 PARAMETER Experiment Name: At_Drought_Reproduction_P Parameter: Treatment Value: Drought vs. No Drought
agaagaaatctttcagatttgcgcatatcgacaattttccgagcggccagtttacgtattttgtttgtagttaacgtgtttcaaggactttgacaatggctgaggaagcgcataaggtaacattgaatgtctatgatttaagccaaggcttggcacgccagctctcacaatcactcctgggaaaggttattgaaggtgtatggcatacaggaatagttgtctatgggaatgagtacttttttggaggagggatacaacatttaccagttggaagaactccatatggaacaccaattcgaacgatagagttgggtctatcacatgtgcctaaagatgtattcgagatgtacttggaagaaatcagtcctcgttacactgctgaatcctacaatttacttactcacaactgcaacaacttcagcaacgaggtcgctcagtttttggtgggtaaagggattcctgactacattctccagcttcctaatgatgttctaaacagtcccatgggtggtcttataatgcctatgttgcaaggcctcgaaacaactctaaaggctggtgctgttcctcaagttccacagtttaggccacagccacaaccttttggagcttttagtaaagatgatggcccacaaattgtgatagctcctaagctcgaggcagcagaaacctcaactgcaactgagaaagtgccacctgttattcaaccatcagctagtaaagagaaggtcaaggacgacccgttgggtgatgctagggccaagattcaggaagagattacaagcgaatttgcagctctaatggcacaaggcacattacgagcaagtgaagcagctgctatggcgacaaaaagagtcatgcaaaagtacggacatctcaatgtaaacgcttagtgcaataacagagagatgaaacattttatttttactgtcttgaaactaagtccagaatcttgaacgatttcattacactattgccttcagctgtattatgttcaacgatctacaaattaattatcataaaagaggaaaagagcagtaaacaagagaaaaaaaaaaagatttt

SEQ ID NO: 38015 - protein, 265 aa, Arabidopsis thaliana
  peptide (1)..(265): Ceres Seq. ID no. 13487968
  misc_feature (6)..(129): Pfam Name: Eukaryotic protein of unknown function (DUF862) Pfam Description: Eukaryotic protein of unknown function (DUF862)
  misc_feature (8)..(155): Homolog of NCBI NO: 23508869 NR Description: hypothetical protein [Plasmodium falciparum 3D7]
  misc_feature (8)..(175): Homolog of NCBI NO: 40738408 NR Description: hypothetical protein AN6915.2 [Aspergillus
  misc_feature (6)..(149): Homolog of NCBI NO: 20162548 NR Description: D15Wsu75e protein [Mus musculus]
  misc_feature (1)..(149): Homolog of NCBI NO: 34867307 NR Description: similar to D15Wsu75e protein [Rattus norvegicus]
  misc_feature (6)..(156): Homolog of NCBI NO: 14779199 NR Description: similar to DNA segment, Chr 15, Wayne State
  misc_feature (8)..(157): Homolog of NCBI NO: 37589651 NR Description: Unknown (protein for MGC:73066) [Danio rerio]
  misc_feature (7)..(169): Homolog of NCBI NO: 29246854 NR Description: GLP_191_9337_10773 [Giardia lamblia ATCC 50803]
  misc_feature (5)..(151): Homolog of NCBI NO: 28277916 NR Description: Similar to DNA segment, Chr 15, Wayne State
  misc_feature (1)..(254): Homolog of NCBI NO: 37535296 NR Description: unknown protein [Oryza sativa (japonica
  misc_feature (1)..(265): Homolog of NCBI NO: 15231383 NR Description: expressed protein [Arabidopsis thaliana]
MAEEAHKVTLNVYDLSQGLARQLSQSLLGKVIEGVWHTGIVVYGNEYFFGGGIQHLPVGRTPYGTPIRTIELGLSHVPKDVFEMYLEEISPRYTAESYNLLTHNCNNFSNEVAQFLVGKGIPDYILQLPNDVLNSPMGGLIMPMLQGLETTLKAGAVPQVPQFRPQPQPFGAFSKDDGPQIVIAPKLEAAETSTATEKVPPVIQPSASKEKVKDDPLGDARAKIQEEITSEFAALMAQGTLRASEAAAMATKRVMQKYGHLNVNA

SEQ ID NO: 38016 - protein, 182 aa, Arabidopsis thaliana
  peptide (1)..(182): Ceres Seq. ID no. 13487969
  misc_feature (1)..(72): Homolog of NCBI NO: 23508869 NR Description: hypothetical protein [Plasmodium falciparum 3D7]
  misc_feature (1)..(92): Homolog of NCBI NO: 40738408 NR Description: hypothetical protein AN6915.2 [Aspergillus
  misc_feature (1)..(66): Homolog of NCBI NO: 20162548 NR Description: D15Wsu75e protein [Mus musculus]
  misc_feature (1)..(66): Homolog of NCBI NO: 34867307 NR Description: similar to D15Wsu75e protein [Rattus norvegicus]
  misc_feature (1)..(73): Homolog of NCBI NO: 14779199 NR Description: similar to DNA segment, Chr 15, Wayne State
  misc_feature (1)..(74): Homolog of NCBI NO: 37589651 NR Description: Unknown (protein for MGC:73066) [Danio rerio]
  misc_feature (1)..(86): Homolog of NCBI NO: 29246854 NR Description: GLP_191_9337_10773 [Giardia lamblia ATCC 50803]
  misc_feature (1)..(68): Homolog of NCBI NO: 28277916 NR Description: Similar to DNA segment, Chr 15, Wayne State
  misc_feature (1)..(171): Homolog of NCBI NO: 37535296 NR Description: unknown protein [Oryza sativa (japonica
  misc_feature (1)..(182): Homolog of NCBI NO: 15231383 NR Description: expressed protein [Arabidopsis thaliana]
MYLEEISPRYTAESYNLLTHNCNNFSNEVAQFLVGKGIPDYILQLPNDVLNSPMGGLIMPMLQGLETTLKAGAVPQVPQFRPQPQPFGAFSKDDGPQIVIAPKLEAAETSTATEKVPPVIQPSASKEKVKDDPLGDARAKIQEEITSEFAALMAQGTLRASEAAAMATKRVMQKYGHLNVNA

SEQ ID NO: 38017 - DNA, 1632 bp, Arabidopsis thaliana
  misc_feature (1)..(1632): Ceres Seq. ID no. 12385819
  misc_feature: MA Experiment ID: 20000112 Result: Up-regulated in Transcription
  misc_feature: MA Experiment 20000112 PARAMETER Experiment Name: At_42deg_Heat_cDNA_P Parameter: Temperature (deg C) Value: 42 vs. 22
  misc_feature: MA Experiment 20000112 PARAMETER Experiment Name: At_42deg_Heat_cDNA_P Parameter: Timepoint (hr) Value: 2
  misc_feature: MA Experiment 20000112 PARAMETER Experiment Name: At_42deg_Heat_cDNA_P Parameter: Tissue Value: Aerial
  misc_feature: MA Experiment ID: 20000180 Result: Up-regulated in Transcription
  misc_feature: MA Experiment 20000180 PARAMETER Experiment Name: At_Germinating_Seeds_P Parameter: Age (hr) Value: 24 vs. 0
  misc_feature: MA Experiment 20000180 PARAMETER Experiment Name: At_Germinating_Seeds_P Parameter: Tissue Value: Germinating Seeds
  misc_feature: MA Experiment ID: 20000182 Result: Down-regulated in Transcription
  misc_feature: MA Experiment 20000182 PARAMETER Experiment Name: At_2mM_SA_P Parameter: Age (day) Value: 14
  misc_feature: MA Experiment 20000182 PARAMETER Experiment Name: At_2mM_SA_P Parameter: Organism Value: A. thaliana
  misc_feature: MA Experiment 20000182 PARAMETER Experiment Name: At_2mM_SA_P Parameter: Plant Line Value: WS
  misc_feature: MA Experiment 20000182 PARAMETER Experiment Name: At_2mM_SA_P Parameter: Timepoint (hr) Value: 6
  misc_feature: MA Experiment 20000182 PARAMETER Experiment Name: At_2mM_SA_P Parameter: Tissue Value: Aerial
  misc_feature: MA Experiment 20000182 PARAMETER Experiment Name: At_2mM_SA_P Parameter: Treatment Value: 2mM SA vs. No Treatment
  misc_feature: MA Experiment ID: 20000184 Result: Up-regulated in Transcription
  misc_feature: MA Experiment 20000184 PARAMETER Experiment Name: At_Shoots__P Parameter: Age (day) Value: 7
  misc_feature: MA Experiment 20000184 PARAMETER Experiment Name: At_Shoots__P Parameter: Tissue Value: Shoots vs. Whole Plant
  misc_feature: MA Experiment ID: 20000185 Result: Down-regulated in Transcription
  misc_feature: MA Experiment 20000185 PARAMETER Experiment Name: At_Roots__P Parameter: Age (day) Value: 7 vs. 21
  misc_feature: MA Experiment 20000185 PARAMETER Experiment Name: At_Roots__P Parameter: Organism Value: A. thaliana
  misc_feature: MA Experiment 20000185 PARAMETER Experiment Name: At_Roots__P Parameter: Tissue Value: Roots vs. Whole Plant
  misc_feature: MA Experiment ID: 20000234 Result: Up-regulated in Transcription
  misc_feature: MA Experiment 20000234 PARAMETER Experiment Name: At_Siliques_P Parameter: Age (day) Value: 21
  misc_feature: MA Experiment 20000234 PARAMETER Experiment Name: At_Siliques_P Parameter: Organism Value: A. thaliana
  misc_feature: MA Experiment 20000234 PARAMETER Experiment Name: At_Siliques_P Parameter: Plant Line Value: WS
  misc_feature: MA Experiment 20000234 PARAMETER Experiment Name: At_Siliques_P Parameter: Tissue Value: Less Than 5mm Siliques vs. Whole Plant
  misc_feature: MA Experiment ID: 20000437 Result: Down-regulated in Transcription
  misc_feature: MA Experiment 20000437 PARAMETER Experiment Name: At_Drought_P Parameter: Age (day) Value: 8
  misc_feature: MA Experiment 20000437 PARAMETER Experiment Name: At_Drought_P Parameter: Organism Value: A. thaliana
  misc_feature: MA Experiment 20000437 PARAMETER Experiment Name: At_Drought_P Parameter: Plant Line Value: WS
  misc_feature: MA Experiment 20000437 PARAMETER Experiment Name: At_Drought_P Parameter: Timepoint (hr) Value: 24
  misc_feature: MA Experiment 20000437 PARAMETER Experiment Name: At_Drought_P Parameter: Tissue Value: Whole Plant
  misc_feature: MA Experiment 20000437 PARAMETER Experiment Name: At_Drought_P Parameter: Treatment Value: Drought vs. No Drought
  misc_feature: MA Experiment ID: 20000438 Result: Up-regulated in Transcription
  misc_feature: MA Experiment 20000438 PARAMETER Experiment Name: At_Shoots__P Parameter: Age (day) Value: 14
  misc_feature: MA Experiment 20000438 PARAMETER Experiment Name: At_Shoots__P Parameter: Tissue Value: Shoots vs. Whole Plant
  misc_feature: MA Experiment ID: 20000439 Result: Down-regulated in Transcription
  misc_feature: MA Experiment 20000439 PARAMETER Experiment Name: At_Roots__P Parameter: Age (day) Value: 14 vs. 21
  misc_feature: MA Experiment 20000439 PARAMETER Experiment Name: At_Roots__P Parameter: Organism Value: A. thaliana
  misc_feature: MA Experiment 20000439 PARAMETER Experiment Name: At_Roots__P Parameter: Tissue Value: Roots vs. Whole Plant
  misc_feature: MA Experiment ID: 20000495 Result: Down-regulated in Transcription
  misc_feature: MA Experiment 20000495 PARAMETER Experiment Name: At_Guard_Cells_P Parameter: Harvest Date Value: 8/2/2002
  misc_feature: MA Experiment 20000495 PARAMETER Experiment Name: At_Guard_Cells_P Parameter: Organism Value: A. thaliana
  misc_feature: MA Experiment 20000495 PARAMETER Experiment Name: At_Guard_Cells_P Parameter: Tissue Value: Guard Cells vs. Leaves
  misc_feature: MA Experiment ID: 20001248 Result: Down-regulated in Transcription
  misc_feature: MA Experiment 20001248 PARAMETER Experiment Name: At_Far-red-induction_P Parameter: Age (day) Value: 7
  misc_feature: MA Experiment 20001248 PARAMETER Experiment Name: At_Far-red-induction_P Parameter: Light Value: Far-red vs. White
  misc_feature: MA Experiment 20001248 PARAMETER Experiment Name: At_Far-red-induction_P Parameter: Organism Value: A. thaliana
  misc_feature: MA Experiment 20001248 PARAMETER Experiment Name: At_Far-red-induction_P Parameter: Plant Line Value: Columbia
  misc_feature: MA Experiment 20001248 PARAMETER Experiment Name: At_Far-red-induction_P Parameter: Timepoint (hr) Value: 4
  misc_feature: MA Experiment 20001248 PARAMETER Experiment Name: At_Far-red-induction_P Parameter: Tissue Value: Whole Plant
  misc_feature: MA Experiment ID: 20001450 Result: Down-regulated in Transcription
  misc_feature: MA Experiment 20001450 PARAMETER Experiment Name: At_Far-red-induction_P Parameter: Age (day) Value: 7
  misc_feature: MA Experiment 20001450 PARAMETER Experiment Name: At_Far-red-induction_P Parameter: Light Value: Far-red vs. White
  misc_feature: MA Experiment 20001450 PARAMETER Experiment Name: At_Far-red-induction_P Parameter: Organism Value: A. thaliana
  misc_feature: MA Experiment 20001450 PARAMETER Experiment Name: At_Far-red-induction_P Parameter: Plant Line Value: Columbia
  misc_feature: MA Experiment 20001450 PARAMETER Experiment Name: At_Far-red-induction_P Parameter: Timepoint (hr) Value: 8
  misc_feature: MA Experiment 20001450 PARAMETER Experiment Name: At_Far-red-induction_P Parameter: Tissue Value: Whole Plant
  misc_feature: MA Experiment ID: 20001451 Result: Down-regulated in Transcription
  misc_feature: MA Experiment 20001451 PARAMETER Experiment Name: At_Far-red-induction_P Parameter: Age (day) Value: 7
  misc_feature: MA Experiment 20001451 PARAMETER Experiment Name: At_Far-red-induction_P Parameter: Light Value: Far-red vs. White
  misc_feature: MA Experiment 20001451 PARAMETER Experiment Name: At_Far-red-induction_P Parameter: Organism Value: A. thaliana
  misc_feature: MA Experiment 20001451 PARAMETER Experiment Name: At_Far-red-induction_P Parameter: Plant Line Value: Columbia
  misc_feature: MA Experiment 20001451 PARAMETER Experiment Name: At_Far-red-induction_P Parameter: Timepoint (hr) Value: 24
  misc_feature: MA Experiment 20001451 PARAMETER Experiment Name: At_Far-red-induction_P Parameter: Tissue Value: Whole Plant
  misc_feature: MA Experiment ID: 20001911 Result: Down-regulated in Transcription
  misc_feature: MA Experiment 20001911 PARAMETER Experiment Name: At_Drought_Reproduction_P Parameter: Age (day) Value: 40
  misc_feature: MA Experiment 20001911 PARAMETER Experiment Name: At_Drought_Reproduction_P Parameter: Organism Value: A. thaliana
  misc_feature: MA Experiment 20001911 PARAMETER Experiment Name: At_Drought_Reproduction_P Parameter: Plant Line Value: WS
  misc_feature: MA Experiment 20001911 PARAMETER Experiment Name: At_Drought_Reproduction_P Parameter: Timepoint (day) Value: 10
  misc_feature: MA Experiment 20001911 PARAMETER Experiment Name: At_Drought_Reproduction_P Parameter: Tissue Value: Flowers
  misc_feature: MA Experiment 20001911 PARAMETER Experiment Name: At_Drought_Reproduction_P Parameter: Treatment Value: Drought vs. No Drought
tcttctctctacacacacacacacacacacacacacaaaatggattcttcgaatgttgaagaaaacctaaacccagaaacaaaatccgcagaagaacaaaacccacttgccattttccattcttctctaccaatcgcatctctttctctgaccttgttcccatcctcgactcaatttctcaaattgtttgctcatcatccaaacaaggttaagatccctacgcaggcttcttctctcactcatctctctctttcttctgtctctccttttccttcttccagaatctctttcaaatccaccatcgctgctaaccctcttcaatcccctctctccatcgtccctcgtcgtcccgttgatccttcctccgccgccgctctccgccgtgctgctgtcgtctggttccgcaatgacctccgtgtccacgacaacgagtgtctcaactccgccaacgacgagtgcgtctccgttttgcccgtttactgcttcgaccctagagattacggcaagtcctcttccggcttcgacaaaacggggccttttcgtgcccagtttctgattgagtccgtttcggagctccggaagaatctccaagccagagggtcgaatctagttgtccgtgtcgggaaacctgaagctgttttggtggaattggctaaggagattggagctgacgcggtttatgctcacagagaagtgtctcacgacgaggttaaagcggaagggaagatagagaccgcgatgaaggaggaaggcgttgaagtcaagtatttctggggaagcactctctatcatttggatgatttgcccttcaaaattgaagacttgccgtcaaattacggagctttcaaggataaagtccagaaattggagattaggaagactatcgcagcgcttgatcaattgaaaagcttgccctctcgaggagacgttgagcttggcgatattccttctctcctggatcttggcattagccccactcctaggactagccaggaggggaaaccgacaatggttggaggagagacagaggcgttgactagactaaagagctttgccgcggattgtcaggctcggttgagcaagggaaaccagaaaggaggcaacaacagtgtctttggtgcaaacttctcttgcaagatatcaccttggttagccatgggaagcatctctcctcgttccatgttcgatgagctgaagaaaacaatctccgcatcaaccacctccacaactccaaggaacggaccgggagatacaggactcaactggttaatgtatgagttgctatggagggatttcttcaggtttataaccaagaaatacagctcagcgaagacgcaggtcgaggctggtccggctacagcctgtaccggtgcctttgcttaaacatttgaaaactttcaggtgaccggaaaagttagaagcgacctgtttctttgccctactctggtgtatggtgattaatttgctatccggacaggactttactgctctcttttgaaacttgagtgtcaggagaataaaatctaagcttctttttttggctcaatcaagttgtccgttccctgttctaaacatttcggatactcattccataaaaagtctctacaatttgagacgctctcctttgtggtc

SEQ ID NO: 38018 - protein, 460 aa, Arabidopsis thaliana
  peptide (1)..(460): Ceres Seq. ID no. 12385820
  misc_feature (128)..(305): Pfam Name: DNA photolyase Pfam Description: DNA photolyase
  misc_feature (118)..(433): Homolog of NCBI NO: 18400841 NR Description: 6-4 photolyase (UVR3)
  misc_feature (159)..(442): Homolog of NCBI NO: 16330358 NR Description: DNA photolyase [Synechocystis sp. PCC 6803]
  misc_feature (128)..(440): Homolog of NCBI NO: 23135973 NR Description: hypothetical protein [Cytophaga hutchinsonii]
  misc_feature (131)..(442): Homolog of NCBI NO: 28374085 NR Description: Chain A, Crystal Structure Analysis Of
  misc_feature (120)..(451): Homolog of NCBI NO: 28971609 NR Description: cryptochrome dash [Arabidopsis thaliana]
  misc_feature (120)..(451): Homolog of NCBI NO: 22327046 NR Description: DNA photolyase - like protein
  misc_feature (128)..(440): Homolog of NCBI NO: 37520404 NR Description: probable bacterial cryptochrome [Gloeobacter
  misc_feature (131)..(442): Homolog of NCBI NO: 23040111 NR Description: hypothetical protein [Trichodesmium erythraeum
  misc_feature (14)..(460): Homolog of NCBI NO: 21592984 NR Description: photolyase/blue-light receptor PHR2 [Arabidopsis
  misc_feature (14)..(460): Homolog of NCBI NO: 15226633 NR Description: photolyase/blue-light receptor (PHR2)
SSLYTHTHTHTHKMDSSNVEENLNPETKSAEEQNPLAIFHSSLPIASLSLTLFPSSTQFLKLFAHHPNKVKIPTQASSLTHLSLSSVSPFPSSRISFKSTIAANPLQSPLSIVPRRPVDPSSAAALRRAAVVWFRNDLRVHDNECLNSANDECVSVLPVYCFDPRDYGKSSSGFDKTGPFRAQFLIESVSELRKNLQARGSNLVVRVGKPEAVLVELAKEIGADAVYAHREVSHDEVKAEGKIETAMKEEGVEVKYFWGSTLYHLDDLPFKIEDLPSNYGAFKDKVQKLEIRKTIAALDQLKSLPSRGDVELGDIPSLLDLGISPTPRTSQEGKPTMVGGETEALTRLKSFAADCQARLSKGNQKGGNNSVFGANFSCKISPWLAMGSISPRSMFDELKKTISASTTSTTPRNGPGDTGLNWLMYELLWRDFFRFITKKYSSAKTQVEAGPATACTGAFA

SEQ ID NO: 38019 - protein, 447 aa, Arabidopsis thaliana; identical to SEQ ID NO: 22874
  peptide (1)..(447): Ceres Seq. ID no. 12385821
  misc_feature (115)..(292): Pfam Name: DNA photolyase Pfam Description: DNA photolyase
  misc_feature (105)..(420): Homolog of NCBI NO: 18400841 NR Description: 6-4 photolyase (UVR3)
  misc_feature (146)..(429): Homolog of NCBI NO: 16330358 NR Description: DNA photolyase [Synechocystis sp. PCC 6803]
  misc_feature (115)..(427): Homolog of NCBI NO: 23135973 NR Description: hypothetical protein [Cytophaga hutchinsonii]
  misc_feature (118)..(429): Homolog of NCBI NO: 28374085 NR Description: Chain A, Crystal Structure Analysis Of
  misc_feature (107)..(438): Homolog of NCBI NO: 28971609 NR Description: cryptochrome dash [Arabidopsis thaliana]
  misc_feature (107)..(438): Homolog of NCBI NO: 22327046 NR Description: DNA photolyase - like protein
  misc_feature (115)..(427): Homolog of NCBI NO: 37520404 NR Description: probable bacterial cryptochrome [Gloeobacter
  misc_feature (118)..(429): Homolog of NCBI NO: 23040111 NR Description: hypothetical protein [Trichodesmium erythraeum
  misc_feature (1)..(447): Homolog of NCBI NO: 21592984 NR Description: photolyase/blue-light receptor PHR2 [Arabidopsis
  misc_feature (1)..(447): Homolog of NCBI NO: 15226633 NR Description: photolyase/blue-light receptor (PHR2)

SEQ ID NO: 38020 - DNA, 1439 bp, Arabidopsis thaliana
  misc_feature (1)..(1439): Ceres Seq. ID no. 13621928
  misc_feature: MA Experiment ID: 108434 Result: Up-regulated in Transcription
  misc_feature: MA Experiment 108434 PARAMETER Experiment Name: At_Root_Tips_cDNA_P Parameter: Tissue Value: Root Tips
  misc_feature: MA Experiment ID: 108462 Result: Down-regulated in Transcription
  misc_feature: MA Experiment 108462 PARAMETER Experiment Name: At_Germinating_Seeds_cDNA_P Parameter: Age (day) Value: 2 vs. 0
  misc_feature: MA Experiment 108462 PARAMETER Experiment Name: At_Germinating_Seeds_cDNA_P Parameter: Tissue Value: Germinating Seeds
  misc_feature: MA Experiment ID: 108463 Result: Down-regulated in Transcription
  misc_feature: MA Experiment 108463 PARAMETER Experiment Name: At_Germinating_Seeds_cDNA_P Parameter: Age (day) Value: 3 vs. 0
  misc_feature: MA Experiment 108463 PARAMETER Experiment Name: At_Germinating_Seeds_cDNA_P Parameter: Tissue Value: Germinating Seeds
  misc_feature: MA Experiment ID: 108464 Result: Down-regulated in Transcription
  misc_feature: MA Experiment 108464 PARAMETER Experiment Name: At_Germinating_Seeds_cDNA_P Parameter: Age (day) Value: 4 vs. 0
  misc_feature: MA Experiment 108464 PARAMETER Experiment Name: At_Germinating_Seeds_cDNA_P Parameter: Tissue Value: Germinating Seeds
  misc_feature: MA Experiment ID: 108576 Result: Up-regulated in Transcription
  misc_feature: MA Experiment 108576 PARAMETER Experiment Name: At_42deg_Heat_cDNA_P Parameter: Temperature (deg C) Value: 42 vs. 22
  misc_feature: MA Experiment 108576 PARAMETER Experiment Name: At_42deg_Heat_cDNA_P Parameter: Timepoint (hr) Value: 1
  misc_feature: MA Experiment 108576 PARAMETER Experiment Name: At_42deg_Heat_cDNA_P Parameter: Tissue Value: Aerial
  misc_feature: MA Experiment ID: 20000171 Result: Down-regulated in Transcription
  misc_feature: MA Experiment 20000171 PARAMETER Experiment Name: At_42deg_Heat_P Parameter: Age (day) Value: 14
  misc_feature: MA Experiment 20000171 PARAMETER Experiment Name: At_42deg_Heat_P Parameter: Organism Value: A. thaliana
  misc_feature: MA Experiment 20000171 PARAMETER Experiment Name: At_42deg_Heat_P Parameter: Plant Line Value: WS
  misc_feature: MA Experiment 20000171 PARAMETER Experiment Name: At_42deg_Heat_P Parameter: Temperature (deg C) Value: 42 vs. 22
  misc_feature: MA Experiment 20000171 PARAMETER Experiment Name: At_42deg_Heat_P Parameter: Timepoint (hr) Value: 1
  misc_feature: MA Experiment 20000171 PARAMETER Experiment Name: At_42deg_Heat_P Parameter: Tissue Value: Aerial
  misc_feature: MA Experiment ID: 20000173 Result: Down-regulated in Transcription
  misc_feature: MA Experiment 20000173 PARAMETER Experiment Name: At_42deg_Heat_P Parameter: Age (day) Value: 14
  misc_feature: MA Experiment 20000173 PARAMETER Experiment Name: At_42deg_Heat_P Parameter: Organism Value: A. thaliana
  misc_feature: MA Experiment 20000173 PARAMETER Experiment Name: At_42deg_Heat_P Parameter: Plant Line Value: WS
  misc_feature: MA Experiment 20000173 PARAMETER Experiment Name: At_42deg_Heat_P Parameter: Temperature (deg C) Value: 42 vs. 22
  misc_feature: MA Experiment 20000173 PARAMETER Experiment Name: At_42deg_Heat_P Parameter: Timepoint (hr) Value: 6
  misc_feature: MA Experiment 20000173 PARAMETER Experiment Name: At_42deg_Heat_P Parameter: Tissue Value: Aerial
  misc_feature: MA Experiment ID: 20000180 Result: Down-regulated in Transcription
  misc_feature: MA Experiment 20000180 PARAMETER Experiment Name: At_Germinating_Seeds_P Parameter: Age (hr) Value: 24 vs. 0
  misc_feature: MA Experiment 20000180 PARAMETER Experiment Name: At_Germinating_Seeds_P Parameter: Tissue Value: Germinating Seeds
  misc_feature: MA Experiment ID: 20000227 Result: Up-regulated in Transcription
  misc_feature: MA Experiment 20000227 PARAMETER Experiment Name: At_Root-Tips-vs-Tops_P Parameter: Tissue Value: Root Tips vs. Root Tops
  misc_feature: MA Experiment ID: 20000286 Result: Up-regulated in Transcription
  misc_feature: MA Experiment 20000286 PARAMETER Experiment Name: At_Open_Flower_P Parameter: Age (day) Value: 21
  misc_feature: MA Experiment 20000286 PARAMETER Experiment Name: At_Open_Flower_P Parameter: Plant Line Value: WS
  misc_feature: MA Experiment 20000286 PARAMETER Experiment Name: At_Open_Flower_P Parameter: Tissue Value: Half Open vs. Whole Plant
  misc_feature: MA Experiment ID: 20001247 Result: Down-regulated in Transcription
  misc_feature: MA Experiment 20001247 PARAMETER Experiment Name: At_Far-red-induction_P Parameter: Age (day) Value: 7
  misc_feature: MA Experiment 20001247 PARAMETER Experiment Name: At_Far-red-induction_P Parameter: Light Value: Far-red vs. White
  misc_feature: MA Experiment 20001247 PARAMETER Experiment Name: At_Far-red-induction_P Parameter: Organism Value: A. thaliana
  misc_feature: MA Experiment 20001247 PARAMETER Experiment Name: At_Far-red-induction_P Parameter: Plant Line Value: Columbia
  misc_feature: MA Experiment 20001247 PARAMETER Experiment Name: At_Far-red-induction_P Parameter: Timepoint (hr) Value: 1
  misc_feature: MA Experiment 20001247 PARAMETER Experiment Name: At_Far-red-induction_P Parameter: Tissue Value: Whole Plant
  misc_feature: MA Experiment ID: 20001451 Result: Down-regulated in Transcription
  misc_feature: MA Experiment 20001451 PARAMETER Experiment Name: At_Far-red-induction_P Parameter: Age (day) Value: 7
  misc_feature: MA Experiment 20001451 PARAMETER Experiment Name: At_Far-red-induction_P Parameter: Light Value: Far-red vs. White
  misc_feature: MA Experiment 20001451 PARAMETER Experiment Name: At_Far-red-induction_P Parameter: Organism Value: A. thaliana
  misc_feature: MA Experiment 20001451 PARAMETER Experiment Name: At_Far-red-induction_P Parameter: Plant Line Value: Columbia
  misc_feature: MA Experiment 20001451 PARAMETER Experiment Name: At_Far-red-induction_P Parameter: Timepoint (hr) Value: 24
  misc_feature: MA Experiment 20001451 PARAMETER Experiment Name: At_Far-red-induction_P Parameter: Tissue Value: Whole Plant
  misc_feature: MA Experiment ID: 20001557 Result: Up-regulated in Transcription
  misc_feature: MA Experiment 20001557 PARAMETER Experiment Name: At_Drought_Soil_Dry_P Parameter: Age (day) Value: 27
  misc_feature: MA Experiment 20001557 PARAMETER Experiment Name: At_Drought_Soil_Dry_P Parameter: Organism Value: A. thaliana
  misc_feature: MA Experiment 20001557 PARAMETER Experiment Name: At_Drought_Soil_Dry_P Parameter: Plant Line Value: WS
  misc_feature: MA Experiment 20001557 PARAMETER Experiment Name: At_Drought_Soil_Dry_P Parameter: Post Timepoint (hr) Value: 3
  misc_feature: MA Experiment 20001557 PARAMETER Experiment Name: At_Drought_Soil_Dry_P Parameter: Post-Treatment Value: Re-Water vs. No Drought
  misc_feature: MA Experiment 20001557 PARAMETER Experiment Name: At_Drought_Soil_Dry_P Parameter: Timepoint (day) Value: 13
  misc_feature: MA Experiment 20001557 PARAMETER Experiment Name: At_Drought_Soil_Dry_P Parameter: Treatment Value: Drought vs. No Drought
  misc_feature: MA Experiment ID: 20001558 Result: Up-regulated in Transcription
  misc_feature: MA Experiment 20001558 PARAMETER Experiment Name: At_Drought_Soil_Dry_P Parameter: Age (day) Value: 27
  misc_feature: MA Experiment 20001558 PARAMETER Experiment Name: At_Drought_Soil_Dry_P Parameter: Organism Value: A. thaliana
  misc_feature: MA Experiment 20001558 PARAMETER Experiment Name: At_Drought_Soil_Dry_P Parameter: Plant Line Value: WS
  misc_feature: MA Experiment 20001558 PARAMETER Experiment Name: At_Drought_Soil_Dry_P Parameter: Post Timepoint (hr) Value: 6
  misc_feature: MA Experiment 20001558 PARAMETER Experiment Name: At_Drought_Soil_Dry_P Parameter: Post-Treatment Value: Re-Water vs. No Drought
  misc_feature: MA Experiment 20001558 PARAMETER Experiment Name: At_Drought_Soil_Dry_P Parameter: Timepoint (day) Value: 13
  misc_feature: MA Experiment 20001558 PARAMETER Experiment Name: At_Drought_Soil_Dry_P Parameter: Treatment Value: Drought vs. No Drought
gttaccaaacctaatttgaagtattaaagccgttcccctgactaaaaacctttgaacactccgatccaaaaaaaagaagagaaaaacctttgcatacagctaaaaacgatgtcgtctctctctcgctttctccttcgtggcaacttcagcttcagcacccacacgaatcgccgcttcttctccgccgttaccgctgctgcagccacaccctcgccacccaaaccgtccctcatcaccctcgtaaatgacgaacgcgaccccaaattcatcacggagaagttcaagaaagcctgccaagcagagtggttccggaagaatatagctgtctatgagagaaccgttcgccgtctcgccgcagccaagaagtttgagtgggtcgaggagatcctggaggagcagaacaagtatccaaacatgtcaaaggaaggattcgtggcgaggattatcaatctctatggacgagtcggtatgtttgagaatgcacagaaagtgttcgacgaaatgcctgagagaaactgcaagagaacagcgttgtctttcaacgcattactgaatgcctgtgtgaactccaagaagtttgatttggttgaaggtatcttcaaggagttgccaggtaagctctcgattgaaccagatgttgcatcttacaatactttgatcaagggattgtgtggaaagggttccttcactgaagctgttgcgttgattgatgagattgagaacaagggtttgaaacctgatcatatcaccttcaatatacttttacatgagtcgtatacaaaagggaagtttgaggaaggagaacagatatgggctagaatggtagagaagaatgttaagcgagacatccgtagttacaatgctcggttgttaggactagccatggagaataaatcagaagagatggttagtctctttgacaaacttaagggtaatgagctcaaacctgatgttttcacattcactgccatgattaaaggatttgtcagtgaaggaaaattagatgaagccataacgtggtacaaggaaatcgagaagaatggttgtcgcccgttgaaatttgtctttaactcattgcttcctgcaatatgtaaggcgggcgatttagagtctgcttatgagctctgcaaggaaatatttgctaagcgtctgctagtcgatgaggctgtcctgcaggaggtagttgatgcattggtgaaagggtccaagcaagacgaagctgaagagattgtcgagctagcaaagacgaatgactatttgcagtgcaagcttcgtctctttcccaaagagtagttaattggcaaggcttattgactagtttttaatttagtctgtgtttccctctttttaatgtcttgttgcaaactgcgagtgcggtgatttaataattgaactatctctatctgtagtgtgtttgtgttgctttcaattctcaaagt

SEQ ID NO: 38021 - protein, 394 aa, Arabidopsis thaliana
  peptide (1)..(394): Ceres Seq. ID no. 13621929
  misc_feature (283)..(317): Pfam Name: PPR repeat Pfam Description: PPR repeat
  misc_feature (5)..(379): Homolog of NCBI NO: 15221069 NR Description: pentatricopeptide (PPR) repeat-containing protein
  misc_feature (1)..(379): Homolog of NCBI NO: 21553755 NR Description: putative membrane-associated salt-inducible
  misc_feature (1)..(379): Homolog of NCBI NO: 18407365 NR Description: pentatricopeptide (PPR) repeat-containing protein
  misc_feature (21)..(379): Homolog of NCBI NO: 15234493 NR Description: pentatricopeptide (PPR) repeat-containing protein
  misc_feature (1)..(379): Homolog of NCBI NO: 25455786 NR Description: membrane-associated salt-inducible protein like
  misc_feature (48)..(383): Homolog of NCBI NO: 34910148 NR Description: B1070A12.17 [Oryza sativa (japonica
  misc_feature (46)..(385): Homolog of NCBI NO: 15231160 NR Description: pentatricopeptide (PPR) repeat-containing protein
  misc_feature (1)..(394): Homolog of NCBI NO: 15222796 NR Description: pentatricopeptide (PPR) repeat-containing protein
  misc_feature (1)..(394): Homolog of NCBI NO: 21617993 NR Description: unknown [Arabidopsis thaliana]
  misc_feature (1)..(394): Homolog of NCBI NO: 18399887 NR Description: pentatricopeptide (PPR) repeat-containing protein
MSSLSRFLLRGNFSFSTHTNRRFFSAVTAAAATPSPPKPSLITLVNDERDPKFITEKFKKACQAEWFRKNIAVYERTVRRLAAAKKFEWVEEILEEQNKYPNMSKEGFVARIINLYGRVGMFENAQKVFDEMPERNCKRTALSFNALLNACVNSKKFDLVEGIFKELPGKLSIEPDVASYNTLIKGLCGKGSFTEAVALIDEIENKGLKPDHITFNILLHESYTKGKFEEGEQIWARMVEKNVKRDIRSYNARLLGLAMENKSEEMVSLFDKLKGNELKPDVFTFTAMIKGFVSEGKLDEAITWYKEIEKNGCRPLKFVFNSLLPAICKAGDLESAYELCKEIFAKRLLVDEAVLQEVVDALVKGSKQDEAEEIVELAKTNDYLQCKLRLFPKE

SEQ ID NO: 38022 - protein, 292 aa, Arabidopsis thaliana
  peptide (1)..(292): Ceres Seq. ID no. 13621930
  misc_feature (181)..(215): Pfam Name: PPR repeat Pfam Description: PPR repeat
  misc_feature (1)..(277): Homolog of NCBI NO: 15221069 NR Description: pentatricopeptide (PPR) repeat-containing protein
  misc_feature (1)..(277): Homolog of NCBI NO: 21553755 NR Description: putative membrane-associated salt-inducible
  misc_feature (1)..(277): Homolog of NCBI NO: 18407365 NR Description: pentatricopeptide (PPR) repeat-containing protein
  misc_feature (1)..(277): Homolog of NCBI NO: 15234493 NR Description: pentatricopeptide (PPR) repeat-containing protein
  misc_feature (1)..(277): Homolog of NCBI NO: 25455786 NR Description: membrane-associated salt-inducible protein like
  misc_feature (1)..(281): Homolog of NCBI NO: 34910148 NR Description: B1070A12.17 [Oryza sativa (japonica
  misc_feature (1)..(283): Homolog of NCBI NO: 15231160 NR Description: pentatricopeptide (PPR) repeat-containing protein
  misc_feature (1)..(292): Homolog of NCBI NO: 15222796 NR Description: pentatricopeptide (PPR) repeat-containing protein
  misc_feature (1)..(292): Homolog of NCBI NO: 21617993 NR Description: unknown [Arabidopsis thaliana]
  misc_feature (1)..(292): Homolog of NCBI NO: 18399887 NR Description: pentatricopeptide (PPR) repeat-containing protein
MSKEGFVARIINLYGRVGMFENAQKVFDEMPERNCKRTALSFNALLNACVNSKKFDLVEGIFKELPGKLSIEPDVASYNTLIKGLCGKGSFTEAVALIDEIENKGLKPDHITFNILLHESYTKGKFEEGEQIWARMVEKNVKRDIRSYNARLLGLAMENKSEEMVSLFDKLKGNELKPDVFTFTAMIKGFVSEGKLDEAITWYKEIEKNGCRPLKFVFNSLLPAICKAGDLESAYELCKEIFAKRLLVDEAVLQEVVDALVKGSKQDEAEEIVELAKTNDYLQCKLRLFPKE

SEQ ID NO: 38023 - protein, 274 aa, Arabidopsis thaliana
  peptide (1)..(274): Ceres Seq. ID no. 13621931
  misc_feature (163)..(197): Pfam Name: PPR repeat Pfam Description: PPR repeat
  misc_feature (1)..(259): Homolog of NCBI NO: 15221069 NR Description: pentatricopeptide (PPR) repeat-containing protein
  misc_feature (1)..(259): Homolog of NCBI NO: 21553755 NR Description: putative membrane-associated salt-inducible
  misc_feature (1)..(259): Homolog of NCBI NO: 18407365 NR Description: pentatricopeptide (PPR) repeat-containing protein
  misc_feature (1)..(259): Homolog of NCBI NO: 15234493 NR Description: pentatricopeptide (PPR) repeat-containing protein
  misc_feature (1)..(259): Homolog of NCBI NO: 25455786 NR Description: membrane-associated salt-inducible protein like
  misc_feature (1)..(263): Homolog of NCBI NO: 34910148 NR Description: B1070A12.17 [Oryza sativa (japonica
  misc_feature (1)..(265): Homolog of NCBI NO: 15231160 NR Description: pentatricopeptide (PPR) repeat-containing protein
  misc_feature (1)..(274): Homolog of NCBI NO: 15222796 NR Description: pentatricopeptide (PPR) repeat-containing protein
  misc_feature (1)..(274): Homolog of NCBI NO: 21617993 NR Description: unknown [Arabidopsis thaliana]
  misc_feature (1)..(274): Homolog of NCBI NO: 18399887 NR Description: pentatricopeptide (PPR) repeat-containing protein
MFENAQKVFDEMPERNCKRTALSFNALLNACVNSKKFDLVEGIFKELPGKLSIEPDVASYNTLIKGLCGKGSFTEAVALIDEIENKGLKPDHITFNILLHESYTKGKFEEGEQIWARMVEKNVKRDIRSYNARLLGLAMENKSEEMVSLFDKLKGNELKPDVFTFTAMIKGFVSEGKLDEAITWYKEIEKNGCRPLKFVFNSLLPAICKAGDLESAYELCKEIFAKRLLVDEAVLQEVVDALVKGSKQDEAEEIVELAKTNDYLQCKLRLFPKE

SEQ ID NO: 38024 - DNA, 940 bp, Arabidopsis thaliana; identical to SEQ ID NO: 28735
  misc_feature (1)..(940): Ceres Seq. ID no. 12327087
  misc_feature: MA Experiment ID: 108577 Result: Up-regulated in Transcription
  misc_feature: MA Experiment 108577 PARAMETER Experiment Name: At_42deg_Heat_cDNA_P Parameter: Temperature (deg C) Value: 42 vs. 22
  misc_feature: MA Experiment 108577 PARAMETER Experiment Name: At_42deg_Heat_cDNA_P Parameter: Timepoint (hr) Value: 6
  misc_feature: MA Experiment 108577 PARAMETER Experiment Name: At_42deg_Heat_cDNA_P Parameter: Tissue Value: Aerial
  misc_feature: MA Experiment ID: 108595 Result: Down-regulated in Transcription
  misc_feature: MA Experiment 108595 PARAMETER Experiment Name: At_Ler-pi_Ovule_cDNA_P Parameter: Plant Line Value: null
  misc_feature: MA Experiment ID: 20000185 Result: Down-regulated in Transcription
  misc_feature: MA Experiment 20000185 PARAMETER Experiment Name: At_Roots__P Parameter: Age (day) Value: 7 vs. 21
  misc_feature: MA Experiment 20000185 PARAMETER Experiment Name: At_Roots__P Parameter: Organism Value: A. thaliana
  misc_feature: MA Experiment 20000185 PARAMETER Experiment Name: At_Roots__P Parameter: Tissue Value: Roots vs. Whole Plant
  misc_feature: MA Experiment ID: 20000438 Result: Up-regulated in Transcription
  misc_feature: MA Experiment 20000438 PARAMETER Experiment Name: At_Shoots__P Parameter: Age (day) Value: 14
  misc_feature: MA Experiment 20000438 PARAMETER Experiment Name: At_Shoots__P Parameter: Tissue Value: Shoots vs. Whole Plant
  misc_feature: MA Experiment ID: 20001247 Result: Up-regulated in Transcription
  misc_feature: MA Experiment 20001247 PARAMETER Experiment Name: At_Far-red-induction_P Parameter: Age (day) Value: 7
  misc_feature: MA Experiment 20001247 PARAMETER Experiment Name: At_Far-red-induction_P Parameter: Light Value: Far-red vs. White
  misc_feature: MA Experiment 20001247 PARAMETER Experiment Name: At_Far-red-induction_P Parameter: Organism Value: A. thaliana
  misc_feature: MA Experiment 20001247 PARAMETER Experiment Name: At_Far-red-induction_P Parameter: Plant Line Value: Columbia
  misc_feature: MA Experiment 20001247 PARAMETER Experiment Name: At_Far-red-induction_P Parameter: Timepoint (hr) Value: 1
  misc_feature: MA Experiment 20001247 PARAMETER Experiment Name: At_Far-red-induction_P Parameter: Tissue Value: Whole Plant
  misc_feature: MA Experiment ID: 20001248 Result: Down-regulated in Transcription
  misc_feature: MA Experiment 20001248 PARAMETER Experiment Name: At_Far-red-induction_P Parameter: Age (day) Value: 7
  misc_feature: MA Experiment 20001248 PARAMETER Experiment Name: At_Far-red-induction_P Parameter: Light Value: Far-red vs. White
  misc_feature: MA Experiment 20001248 PARAMETER Experiment Name: At_Far-red-induction_P Parameter: Organism Value: A. thaliana
  misc_feature: MA Experiment 20001248 PARAMETER Experiment Name: At_Far-red-induction_P Parameter: Plant Line Value: Columbia
  misc_feature: MA Experiment 20001248 PARAMETER Experiment Name: At_Far-red-induction_P Parameter: Timepoint (hr) Value: 4
  misc_feature: MA Experiment 20001248 PARAMETER Experiment Name: At_Far-red-induction_P Parameter: Tissue Value: Whole Plant
  misc_feature: MA Experiment ID: 20001557 Result: Down-regulated in Transcription
  misc_feature: MA Experiment 20001557 PARAMETER Experiment Name: At_Drought_Soil_Dry_P Parameter: Age (day) Value: 27
  misc_feature: MA Experiment 20001557 PARAMETER Experiment Name: At_Drought_Soil_Dry_P Parameter: Organism Value: A. thaliana
  misc_feature: MA Experiment 20001557 PARAMETER Experiment Name: At_Drought_Soil_Dry_P Parameter: Plant Line Value: WS
  misc_feature: MA Experiment 20001557 PARAMETER Experiment Name: At_Drought_Soil_Dry_P Parameter: Post Timepoint (hr) Value: 3
  misc_feature: MA Experiment 20001557 PARAMETER Experiment Name: At_Drought_Soil_Dry_P Parameter: Post-Treatment Value: Re-Water vs. No Drought
  misc_feature: MA Experiment 20001557 PARAMETER Experiment Name: At_Drought_Soil_Dry_P Parameter: Timepoint (day) Value: 13
  misc_feature: MA Experiment 20001557 PARAMETER Experiment Name: At_Drought_Soil_Dry_P Parameter: Treatment Value: Drought vs. No Drought
  misc_feature: MA Experiment ID: 20001560 Result: Down-regulated in Transcription
  misc_feature: MA Experiment 20001560 PARAMETER Experiment Name: At_Drought_Soil_Dry_P Parameter: Age (day) Value: 28
  misc_feature: MA Experiment 20001560 PARAMETER Experiment Name: At_Drought_Soil_Dry_P Parameter: Organism Value: A. thaliana
  misc_feature: MA Experiment 20001560 PARAMETER Experiment Name: At_Drought_Soil_Dry_P Parameter: Plant Line Value: WS
  misc_feature: MA Experiment 20001560 PARAMETER Experiment Name: At_Drought_Soil_Dry_P Parameter: Post Timepoint (hr) Value: None
  misc_feature: MA Experiment 20001560 PARAMETER Experiment Name: At_Drought_Soil_Dry_P Parameter: Post-Treatment Value: None
  misc_feature: MA Experiment 20001560 PARAMETER Experiment Name: At_Drought_Soil_Dry_P Parameter: Timepoint (day) Value: 14
  misc_feature: MA Experiment 20001560 PARAMETER Experiment Name: At_Drought_Soil_Dry_P Parameter: Treatment Value: Drought vs. No Drought
  misc_feature: MA Experiment ID: 20001905 Result: Down-regulated in Transcription
  misc_feature: MA Experiment 20001905 PARAMETER Experiment Name: At_Drought_Reproduction_P Parameter: Age (day) Value: 40
  misc_feature: MA Experiment 20001905 PARAMETER Experiment Name: At_Drought_Reproduction_P Parameter: Organism Value: A. thaliana
  misc_feature: MA Experiment 20001905 PARAMETER Experiment Name: At_Drought_Reproduction_P Parameter: Plant Line Value: WS
  misc_feature: MA Experiment 20001905 PARAMETER Experiment Name: At_Drought_Reproduction_P Parameter: Timepoint (day) Value: 10
  misc_feature: MA Experiment 20001905 PARAMETER Experiment Name: At_Drought_Reproduction_P Parameter: Tissue Value: Rosettes
  misc_feature: MA Experiment 20001905 PARAMETER Experiment Name: At_Drought_Reproduction_P Parameter: Treatment Value: Drought vs. No Drought
  misc_feature: MA Experiment ID: 20001911 Result: Up-regulated in Transcription
  misc_feature: MA Experiment 20001911 PARAMETER Experiment Name: At_Drought_Reproduction_P Parameter: Age (day) Value: 40
  misc_feature: MA Experiment 20001911 PARAMETER Experiment Name: At_Drought_Reproduction_P Parameter: Organism Value: A. thaliana
  misc_feature: MA Experiment 20001911 PARAMETER Experiment Name: At_Drought_Reproduction_P Parameter: Plant Line Value: WS
  misc_feature: MA Experiment 20001911 PARAMETER Experiment Name: At_Drought_Reproduction_P Parameter: Timepoint (day) Value: 10
  misc_feature: MA Experiment 20001911 PARAMETER Experiment Name: At_Drought_Reproduction_P Parameter: Tissue Value: Flowers
  misc_feature: MA Experiment 20001911 PARAMETER Experiment Name: At_Drought_Reproduction_P Parameter: Treatment Value: Drought vs. No Drought

SEQ ID NO: 38025 - protein, 244 aa, Arabidopsis thaliana; identical to SEQ ID NO: 28736
  peptide (1)..(244): Ceres Seq. ID no. 12327088
  misc_feature (9)..(239): Pfam Name: Alanine racemase, N-terminal domain Pfam Description: Alanine racemase, N-terminal domain
  misc_feature (9)..(239): Pfam Name: Alanine racemase, N-terminal domain Pfam Description: Alanine racemase, N-terminal domain
  misc_feature (96)..(220): Homolog of NCBI NO: 19386824 NR Description: B1147A04.19 [Oryza sativa (japonica
  misc_feature (7)..(242): Homolog of NCBI NO: 16930823 NR Description: proline synthetase co-transcribed [Mus musculus]
  misc_feature (1)..(244): Homolog of NCBI NO: 6005842 NR Description: proline synthetase co-transcribed homolog
  misc_feature (25)..(242): Homolog of NCBI NO: 11359716 NR Description: conserved hypothetical protein [imported] -
  misc_feature (1)..(242): Homolog of NCBI NO: 18391333 NR Description: putative Proline synthetase associated protein
  misc_feature (96)..(220): Homolog of NCBI NO: 19386824 NR Description: B1147A04.19 [Oryza sativa (japonica
  misc_feature (1)..(244): Homolog of NCBI NO: 6005842 NR Description: proline synthetase co-transcribed homolog
  misc_feature (1)..(242): Homolog of NCBI NO: 18391333 NR Description: putative Proline synthetase associated protein
  misc_feature (1)..(244): Homolog of NCBI NO: 14030629 NR Description: AT4g26860/F10M23_200 [Arabidopsis thaliana]
  misc_feature (1)..(244): Homolog of NCBI NO: 18416879 NR Description: putative Proline synthetase associated protein
  misc_feature (1)..(186): Homolog of NCBI NO: 7445224 NR Description: hypothetical protein F10M23.200 - Arabidopsis
  misc_feature (192)..(244): Homolog of NCBI NO: 7445224 NR Description: hypothetical protein F10M23.200 - Arabidopsis
  misc_feature (1)..(242): Homolog of NCBI NO: 30682530 NR Description: Proline synthetase associated protein -related
  misc_feature (25)..(242): Homolog of NCBI NO: 11359716 NR Description: conserved hypothetical protein [imported] -
  misc_feature (7)..(242): Homolog of NCBI NO: 16930823 NR Description: proline synthetase co-transcribed [Mus musculus]
  misc_feature (1)..(242): Homolog of NCBI NO: 30682530 NR Description: Proline synthetase associated protein -related
  misc_feature (192)..(244): Homolog of NCBI NO: 7445224 NR Description: hypothetical protein F10M23.200 - Arabidopsis
  misc_feature (1)..(186): Homolog of NCBI NO: 7445224 NR Description: hypothetical protein F10M23.200 - Arabidopsis
  misc_feature (1)..(244): Homolog of NCBI NO: 18416879 NR Description: putative Proline synthetase associated protein
  misc_feature (1)..(244): Homolog of NCBI NO: 14030629 NR Description: AT4g26860/F10M23_200 [Arabidopsis thaliana]

SEQ ID NO: 38026 - protein, 141 aa, Arabidopsis thaliana; identical to SEQ ID NO: 28737
  peptide (1)..(141): Ceres Seq. ID no. 12327089
  misc_feature (1)..(136): Pfam Name: Alanine racemase, N-terminal domain Pfam Description: Alanine racemase, N-terminal domain
  misc_feature (1)..(136): Pfam Name: Alanine racemase, N-terminal domain Pfam Description: Alanine racemase, N-terminal domain
  misc_feature (1)..(117): Homolog of NCBI NO: 19386824 NR Description: B1147A04.19 [Oryza sativa (japonica
  misc_feature (1)..(139): Homolog of NCBI NO: 16930823 NR Description: proline synthetase co-transcribed [Mus musculus]
  misc_feature (1)..(141): Homolog of NCBI NO: 6005842 NR Description: proline synthetase co-transcribed homolog
  misc_feature (1)..(139): Homolog of NCBI NO: 11359716 NR Description: conserved hypothetical protein [imported] -
  misc_feature (1)..(139): Homolog of NCBI NO: 18391333 NR Description: putative Proline synthetase associated protein
  misc_feature (1)..(117): Homolog of NCBI NO: 19386824 NR Description: B1147A04.19 [Oryza sativa (japonica
  misc_feature (1)..(141): Homolog of NCBI NO: 6005842 NR Description: proline synthetase co-transcribed homolog
  misc_feature (1)..(139): Homolog of NCBI NO: 18391333 NR Description: putative Proline synthetase associated protein
  misc_feature (1)..(141): Homolog of NCBI NO: 14030629 NR Description: AT4g26860/F10M23_200 [Arabidopsis thaliana]
  misc_feature (1)..(141): Homolog of NCBI NO: 18416879 NR Description: putative Proline synthetase associated protein
  misc_feature (1)..(83): Homolog of NCBI NO: 7445224 NR Description: hypothetical protein F10M23.200 - Arabidopsis
  misc_feature (89)..(141): Homolog of NCBI NO: 7445224 NR Description: hypothetical protein F10M23.200 - Arabidopsis
  misc_feature (1)..(139): Homolog of NCBI NO: 30682530 NR Description: Proline synthetase associated protein -related
  misc_feature (1)..(139): Homolog of NCBI NO: 11359716 NR Description: conserved hypothetical protein [imported] -
  misc_feature (1)..(139): Homolog of NCBI NO: 16930823 NR Description: proline synthetase co-transcribed [Mus musculus]
  misc_feature (1)..(139): Homolog of NCBI NO: 30682530 NR Description: Proline synthetase associated protein -related
  misc_feature (89)..(141): Homolog of NCBI NO: 7445224 NR Description: hypothetical protein F10M23.200 - Arabidopsis
  misc_feature (1)..(83): Homolog of NCBI NO: 7445224 NR Description: hypothetical protein F10M23.200 - Arabidopsis
  misc_feature (1)..(141): Homolog of NCBI NO: 18416879 NR Description: putative Proline synthetase associated protein
  misc_feature (1)..(141): Homolog of NCBI NO: 14030629 NR Description: AT4g26860/F10M23_200 [Arabidopsis thaliana]

SEQ ID NO: 38027 - DNA, 987 bp, Arabidopsis thaliana
  misc_feature (1)..(987): Ceres Seq. ID no. 12326871
  misc_feature: MA Experiment ID: 108434 Result: Down-regulated in Transcription
  misc_feature: MA Experiment 108434 PARAMETER Experiment Name: At_Root_Tips_cDNA_P Parameter: Tissue Value: Root Tips
  misc_feature: MA Experiment ID: 108488 Result: Down-regulated in Transcription
  misc_feature: MA Experiment ID: 108585 Result: Up-regulated in Transcription
  misc_feature: MA Experiment 108585 PARAMETER Experiment Name: At_5mM_NaNP_cDNA_P Parameter: Timepoint (hr) Value: 6
  misc_feature: MA Experiment 108585 PARAMETER Experiment Name: At_5mM_NaNP_cDNA_P Parameter: Tissue Value: Aerial
  misc_feature: MA Experiment 108585 PARAMETER Experiment Name: At_5mM_NaNP_cDNA_P Parameter: Treatment Value: null
  misc_feature: MA Experiment ID: 108607 Result: Up-regulated in Transcription
  misc_feature: MA Experiment 108607 PARAMETER Experiment Name: At_100uM_ABA_cDNA_P Parameter: Timepoint (hr) Value: 4
  misc_feature: MA Experiment 108607 PARAMETER Experiment Name: At_100uM_ABA_cDNA_P Parameter: Tissue Value: Aerial
  misc_feature: MA Experiment 108607 PARAMETER Experiment Name: At_100uM_ABA_cDNA_P Parameter: Treatment Value: 100uM ABA vs. No Treatment
  misc_feature: MA Experiment ID: 108668 Result: Up-regulated in Transcription
  misc_feature: MA Experiment 108668 PARAMETER Experiment Name: At_2mM_SA_cDNA_P Parameter: Plant Line Value: WS
  misc_feature: MA Experiment 108668 PARAMETER Experiment Name: At_2mM_SA_cDNA_P Parameter: Timepoint (hr) Value: 6
  misc_feature: MA Experiment 108668 PARAMETER Experiment Name: At_2mM_SA_cDNA_P Parameter: Treatment Value: 2mM SA vs. No Treatment
  misc_feature: MA Experiment ID: 20000069 Result: Up-regulated in Transcription
  misc_feature: MA Experiment 20000069 PARAMETER Experiment Name: At_100uM_ABA_Mutants_cDNA_P Parameter: Plant Line Value: CS23
  misc_feature: MA Experiment 20000069 PARAMETER Experiment Name: At_100uM_ABA_Mutants_cDNA_P Parameter: Timepoint (hr) Value: 6
  misc_feature: MA Experiment 20000069 PARAMETER Experiment Name: At_100uM_ABA_Mutants_cDNA_P Parameter: Tissue Value: Aerial
  misc_feature: MA Experiment 20000069 PARAMETER Experiment Name: At_100uM_ABA_Mutants_cDNA_P Parameter: Treatment Value: 100uM ABA vs. No Treatment
  misc_feature: MA Experiment ID: 20000070 Result: Up-regulated in Transcription
  misc_feature: MA Experiment 20000070 PARAMETER Experiment Name: At_100uM_ABA_Mutants_cDNA_P Parameter: Plant Line Value: CS24
  misc_feature: MA Experiment 20000070 PARAMETER Experiment Name: At_100uM_ABA_Mutants_cDNA_P Parameter: Timepoint (hr) Value: 6
  misc_feature: MA Experiment 20000070 PARAMETER Experiment Name: At_100uM_ABA_Mutants_cDNA_P Parameter: Tissue Value: Aerial
  misc_feature: MA Experiment 20000070 PARAMETER Experiment Name: At_100uM_ABA_Mutants_cDNA_P Parameter: Treatment Value: 100uM ABA vs. No Treatment
  misc_feature: MA Experiment ID: 20000090 Result: Up-regulated in Transcription
  misc_feature: MA Experiment ID: 20000113 Result: Down-regulated in Transcription
  misc_feature: MA Experiment 20000113 PARAMETER Experiment Name: At_42deg_Heat_cDNA_P Parameter: Temperature (deg C) Value: 42 vs. 22
  misc_feature: MA Experiment 20000113 PARAMETER Experiment Name: At_42deg_Heat_cDNA_P Parameter: Timepoint (hr) Value: 8
  misc_feature: MA Experiment 20000113 PARAMETER Experiment Name: At_42deg_Heat_cDNA_P Parameter: Tissue Value: Aerial
  misc_feature: MA Experiment ID: 20000117 Result: Up-regulated in Transcription
  misc_feature: MA Experiment 20000117 PARAMETER Experiment Name: At_100uM_ABA_Mutants_cDNA_P Parameter: Plant Line Value: Columbia
  misc_feature: MA Experiment 20000117 PARAMETER Experiment Name: At_100uM_ABA_Mutants_cDNA_P Parameter: Timepoint (hr) Value: 6
  misc_feature: MA Experiment 20000117 PARAMETER Experiment Name: At_100uM_ABA_Mutants_cDNA_P Parameter: Tissue Value: Aerial
  misc_feature: MA Experiment 20000117 PARAMETER Experiment Name: At_100uM_ABA_Mutants_cDNA_P Parameter: Treatment Value: 100uM ABA vs. No Treatment
  misc_feature: MA Experiment ID: 20000180 Result: Down-regulated in Transcription
  misc_feature: MA Experiment 20000180 PARAMETER Experiment Name: At_Germinating_Seeds_P Parameter: Age (hr) Value: 24 vs. 0
  misc_feature: MA Experiment 20000180 PARAMETER Experiment Name: At_Germinating_Seeds_P Parameter: Tissue Value: Germinating Seeds
  misc_feature: MA Experiment ID: 20000182 Result: Up-regulated in Transcription
  misc_feature: MA Experiment 20000182 PARAMETER Experiment Name: At_2mM_SA_P Parameter: Age (day) Value: 14
  misc_feature: MA Experiment 20000182 PARAMETER Experiment Name: At_2mM_SA_P Parameter: Organism Value: A. thaliana
  misc_feature: MA Experiment 20000182 PARAMETER Experiment Name: At_2mM_SA_P Parameter: Plant Line Value: WS
  misc_feature: MA Experiment 20000182 PARAMETER Experiment Name: At_2mM_SA_P Parameter: Timepoint (hr) Value: 6
  misc_feature: MA Experiment 20000182 PARAMETER Experiment Name: At_2mM_SA_P Parameter: Tissue Value: Aerial
  misc_feature: MA Experiment 20000182 PARAMETER Experiment Name: At_2mM_SA_P Parameter: Treatment Value: 2mM SA vs. No Treatment
  misc_feature: MA Experiment ID: 20000184 Result: Down-regulated in Transcription
  misc_feature: MA Experiment 20000184 PARAMETER Experiment Name: At_Shoots__P Parameter: Age (day) Value: 7
  misc_feature: MA Experiment 20000184 PARAMETER Experiment Name: At_Shoots__P Parameter: Tissue Value: Shoots vs. Whole Plant
  misc_feature: MA Experiment ID: 20000227 Result: Down-regulated in Transcription
  misc_feature: MA Experiment 20000227 PARAMETER Experiment Name: At_Root-Tips-vs-Tops_P Parameter: Tissue Value: Root Tips vs. Root Tops
  misc_feature: MA Experiment ID: 20000234 Result: Down-regulated in Transcription
  misc_feature: MA Experiment 20000234 PARAMETER Experiment Name: At_Siliques_P Parameter: Age (day) Value: 21
  misc_feature: MA Experiment 20000234 PARAMETER Experiment Name: At_Siliques_P Parameter: Organism Value: A. thaliana
  misc_feature: MA Experiment 20000234 PARAMETER Experiment Name: At_Siliques_P Parameter: Plant Line Value: WS
  misc_feature: MA Experiment 20000234 PARAMETER Experiment Name: At_Siliques_P Parameter: Tissue Value: Less Than 5mm Siliques vs. Whole Plant
  misc_feature: MA Experiment ID: 20000265 Result: Down-regulated in Transcription
  misc_feature: MA Experiment 20000265 PARAMETER Experiment Name: At_Open_Flower_P Parameter: Age (day) Value: 21
  misc_feature: MA Experiment 20000265 PARAMETER Experiment Name: At_Open_Flower_P Parameter: Plant Line Value: WS
  misc_feature: MA Experiment 20000265 PARAMETER Experiment Name: At_Open_Flower_P Parameter: Tissue Value: Closed Flower vs. Whole Plant
  misc_feature: MA Experiment ID: 20000286 Result: Down-regulated in Transcription
  misc_feature: MA Experiment 20000286 PARAMETER Experiment Name: At_Open_Flower_P Parameter: Age (day) Value: 21
  misc_feature: MA Experiment 20000286 PARAMETER Experiment Name: At_Open_Flower_P Parameter: Plant Line Value: WS
  misc_feature: MA Experiment 20000286 PARAMETER Experiment Name: At_Open_Flower_P Parameter: Tissue Value: Half Open vs. Whole Plant
  misc_feature: MA Experiment ID: 20000438 Result: Down-regulated in Transcription
  misc_feature: MA Experiment 20000438 PARAMETER Experiment Name: At_Shoots__P Parameter: Age (day) Value: 14
  misc_feature: MA Experiment 20000438 PARAMETER Experiment Name: At_Shoots__P Parameter: Tissue Value: Shoots vs. Whole Plant
  misc_feature: MA Experiment ID: 20001911 Result: Up-regulated in Transcription
  misc_feature: MA Experiment 20001911 PARAMETER Experiment Name: At_Drought_Reproduction_P Parameter: Age (day) Value: 40
  misc_feature: MA Experiment 20001911 PARAMETER Experiment Name: At_Drought_Reproduction_P Parameter: Organism Value: A. thaliana
  misc_feature: MA Experiment 20001911 PARAMETER Experiment Name: At_Drought_Reproduction_P Parameter: Plant Line Value: WS
  misc_feature: MA Experiment 20001911 PARAMETER Experiment Name: At_Drought_Reproduction_P Parameter: Timepoint (day) Value: 10
  misc_feature: MA Experiment 20001911 PARAMETER Experiment Name: At_Drought_Reproduction_P Parameter: Tissue Value: Flowers
  misc_feature: MA Experiment 20001911 PARAMETER Experiment Name: At_Drought_Reproduction_P Parameter: Treatment Value: Drought vs. No Drought
aaaagaagacttttgtaaggaaataaacacacaactaaagagatgtcgtcaaccttgagcaacgaagagtcaggactcggtgattcaaatcgttcgacggaagtagatagcggcgacggaggaaacttcacggcttacgagtctcgattccagtcgcagcggtttgactcttccttctctaattttgactcccaaccggagaaagagtcagacttaccaggcggcgattcatctcctcgacccgaaactcaatctccgccgtcgataaatagtttcgatgatacaaacggttcgatcttgccgccaccatcggccatggagaaagaggaaggtttcgctcttagagagtggcgaaggctaaatgctctgagattggaagagaaagaaaaggaagagaaagaaatggttcaacaaattctagaagcagcagagcaatataaggctgagttctatagcaagcgtaacgttactattgaaaacaacaagaaactaaaccgcgagaaagagaagttttttttggagaatcaagaaaagttttacgctgaagctgacaaaaacaattggaaggcgattgcagaactcattcctcgtgaagtgccagttatagagaatagagggaacaagaagaaaacagcaaccataactgtaatccagggaccaaagccagggaagcccactgatctgtctcgtatgcgtcaagtgctcacgaaactcaagcacaatccgccaactcatatgaagccaaaactgccctcaccatctggagctgacccgaatgtgagtgtgagtgaacaggtcacagttacagagaagttgtagttgtgtatgtgacaagttaacttcttcttgattgatgttaaaccgtctttactttgttagcttccctcatgttcagtctcgactattgtttgttttgatttcgtctttggtcttaccattgttggtttcccacacagttttctactttgatgtatatataatatattc

SEQ ID NO: 38028 - protein, 258 aa, Arabidopsis thaliana
  peptide (1)..(258): Ceres Seq. ID no. 12326872
  misc_feature (95)..(228): Pfam Name: Clathrin light chain Pfam Description: Clathrin light chain
  misc_feature (22)..(243): Homolog of NCBI NO: 32487391 NR Description: OSJNBb0017I01.5 [Oryza sativa (japonica
  misc_feature (18)..(243): Homolog of NCBI NO: 21536711 NR Description: unknown [Arabidopsis thaliana]
  misc_feature (18)..(243): Homolog of NCBI NO: 18399468 NR Description: expressed protein
  misc_feature (28)..(250): Homolog of NCBI NO: 21593842 NR Description: unknown [Arabidopsis thaliana]
  misc_feature (28)..(250): Homolog of NCBI NO: 18405251 NR Description: expressed protein
  misc_feature (92)..(258): Homolog of NCBI NO: 21617999 NR Description: unknown [Arabidopsis thaliana]
  misc_feature (36)..(258): Homolog of NCBI NO: 11291712 NR Description: hypothetical protein [imported] - Arabidopsis
  misc_feature (36)..(258): Homolog of NCBI NO: 18409442 NR Description: putative protein
MSSTLSNEESGLGDSNRSTEVDSGDGGNFTAYESRFQSQRFDSSFSNFDSQPEKESDLPGGDSSPRPETQSPPSINSFDDTNGSILPPPSAMEKEEGFALREWRRLNALRLEEKEKEEKEMVQQILEAAEQYKAEFYSKRNVTIENNKKLNREKEKFFLENQEKFYAEADKNNWKAIAELIPREVPVIENRGNKKKTATITVIQGPKPGKPTDLSRMRQVLTKLKHNPPTHMKPKLPSPSGADPNVSVSEQVTVTEKL

SEQ ID NO: 38029 - protein, 167 aa, Arabidopsis thaliana
  peptide (1)..(167): Ceres Seq. ID no. 12326873
  misc_feature (4)..(137): Pfam Name: Clathrin light chain Pfam Description: Clathrin light chain
  misc_feature (1)..(152): Homolog of NCBI NO: 32487391 NR Description: OSJNBb0017I01.5 [Oryza sativa (japonica
  misc_feature (1)..(152): Homolog of NCBI NO: 21536711 NR Description: unknown [Arabidopsis thaliana]
  misc_feature (1)..(152): Homolog of NCBI NO: 18399468 NR Description: expressed protein
  misc_feature (1)..(159): Homolog of NCBI NO: 21593842 NR Description: unknown [Arabidopsis thaliana]
  misc_feature (1)..(159): Homolog of NCBI NO: 18405251 NR Description: expressed protein
  misc_feature (1)..(167): Homolog of NCBI NO: 21617999 NR Description: unknown [Arabidopsis thaliana]
  misc_feature (1)..(167): Homolog of NCBI NO: 11291712 NR Description: hypothetical protein [imported] - Arabidopsis
  misc_feature (1)..(167): Homolog of NCBI NO: 18409442 NR Description: putative protein
MEKEEGFALREWRRLNALRLEEKEKEEKEMVQQILEAAEQYKAEFYSKRNVTIENNKKLNREKEKFFLENQEKFYAEADKNNWKAIAELIPREVPVIENRGNKKKTATITVIQGPKPGKPTDLSRMRQVLTKLKHNPPTHMKPKLPSPSGADPNVSVSEQVTVTEKL

SEQ ID NO: 38030 - protein, 138 aa, Arabidopsis thaliana
  peptide (1)..(138): Ceres Seq. ID no. 12326874
  misc_feature (1)..(108): Pfam Name: Clathrin light chain Pfam Description: Clathrin light chain
  misc_feature (1)..(123): Homolog of NCBI NO: 32487391 NR Description: OSJNBb0017I01.5 [Oryza sativa (japonica
  misc_feature (1)..(123): Homolog of NCBI NO: 21536711 NR Description: unknown [Arabidopsis thaliana]
  misc_feature (1)..(123): Homolog of NCBI NO: 18399468 NR Description: expressed protein
  misc_feature (1)..(130): Homolog of NCBI NO: 21593842 NR Description: unknown [Arabidopsis thaliana]
  misc_feature (1)..(130): Homolog of NCBI NO: 18405251 NR Description: expressed protein
  misc_feature (1)..(138): Homolog of NCBI NO: 21617999 NR Description: unknown [Arabidopsis thaliana]
  misc_feature (1)..(138): Homolog of NCBI NO: 11291712 NR Description: hypothetical protein [imported] - Arabidopsis
  misc_feature (1)..(138): Homolog of NCBI NO: 18409442 NR Description: putative protein
MVQQILEAAEQYKAEFYSKRNVTIENNKKLNREKEKFFLENQEKFYAEADKNNWKAIAELIPREVPVIENRGNKKKTATITVIQGPKPGKPTDLSRMRQVLTKLKHNPPTHMKPKLPSPSGADPNVSVSEQVTVTEKL

SEQ ID NO: 38031 - DNA, 1356 bp, Arabidopsis thaliana; identical to SEQ ID NO: 30117
  misc_feature (1)..(1356): Ceres Seq. ID no. 13504985
  misc_feature: MA Experiment ID: 108461 Result: Up-regulated in Transcription
  misc_feature: MA Experiment 108461 PARAMETER Experiment Name: At_Germinating_Seeds_cDNA_P Parameter: Age (day) Value: 1 vs. 0
  misc_feature: MA Experiment 108461 PARAMETER Experiment Name: At_Germinating_Seeds_cDNA_P Parameter: Tissue Value: Germinating Seeds
  misc_feature: MA Experiment ID: 108462 Result: Up-regulated in Transcription
  misc_feature: MA Experiment 108462 PARAMETER Experiment Name: At_Germinating_Seeds_cDNA_P Parameter: Age (day) Value: 2 vs. 0
  misc_feature: MA Experiment 108462 PARAMETER Experiment Name: At_Germinating_Seeds_cDNA_P Parameter: Tissue Value: Germinating Seeds
  misc_feature: MA Experiment ID: 108463 Result: Up-regulated in Transcription
  misc_feature: MA Experiment 108463 PARAMETER Experiment Name: At_Germinating_Seeds_cDNA_P Parameter: Age (day) Value: 3 vs. 0
  misc_feature: MA Experiment 108463 PARAMETER Experiment Name: At_Germinating_Seeds_cDNA_P Parameter: Tissue Value: Germinating Seeds
  misc_feature: MA Experiment ID: 108464 Result: Up-regulated in Transcription
  misc_feature: MA Experiment 108464 PARAMETER Experiment Name: At_Germinating_Seeds_cDNA_P Parameter: Age (day) Value: 4 vs. 0
  misc_feature: MA Experiment 108464 PARAMETER Experiment Name: At_Germinating_Seeds_cDNA_P Parameter: Tissue Value: Germinating Seeds
  misc_feature: MA Experiment ID: 108501 Result: Down-regulated in Transcription
  misc_feature: MA Experiment 108501 PARAMETER Experiment Name: At_ap2_floral_buds_cDNA_P Parameter: Plant Line Value: ap2 (Ler.)
  misc_feature: MA Experiment 108501 PARAMETER Experiment Name: At_ap2_floral_buds_cDNA_P Parameter: Tissue Value: Closed Flower
  misc_feature: MA Experiment ID: 20000113 Result: Up-regulated in Transcription
  misc_feature: MA Experiment 20000113 PARAMETER Experiment Name: At_42deg_Heat_cDNA_P Parameter: Temperature (deg C) Value: 42 vs. 22
  misc_feature: MA Experiment 20000113 PARAMETER Experiment Name: At_42deg_Heat_cDNA_P Parameter: Timepoint (hr) Value: 8
  misc_feature: MA Experiment 20000113 PARAMETER Experiment Name: At_42deg_Heat_cDNA_P Parameter: Tissue Value: Aerial
  misc_feature: MA Experiment ID: 20000180 Result: Up-regulated in Transcription
  misc_feature: MA Experiment 20000180 PARAMETER Experiment Name: At_Germinating_Seeds_P Parameter: Age (hr) Value: 24 vs. 0
  misc_feature: MA Experiment 20000180 PARAMETER Experiment Name: At_Germinating_Seeds_P Parameter: Tissue Value: Germinating Seeds
  misc_feature: MA Experiment ID: 20000184 Result: Up-regulated in Transcription
  misc_feature: MA Experiment 20000184 PARAMETER Experiment Name: At_Shoots__P Parameter: Age (day) Value: 7
  misc_feature: MA Experiment 20000184 PARAMETER Experiment Name: At_Shoots__P Parameter: Tissue Value: Shoots vs. Whole Plant
  misc_feature: MA Experiment ID: 20000185 Result: Down-regulated in Transcription
  misc_feature: MA Experiment 20000185 PARAMETER Experiment Name: At_Roots__P Parameter: Age (day) Value: 7 vs. 21
  misc_feature: MA Experiment 20000185 PARAMETER Experiment Name: At_Roots__P Parameter: Organism Value: A. thaliana
  misc_feature: MA Experiment 20000185 PARAMETER Experiment Name: At_Roots__P Parameter: Tissue Value: Roots vs. Whole Plant
  misc_feature: MA Experiment ID: 20000234 Result: Up-regulated in Transcription
  misc_feature: MA Experiment 20000234 PARAMETER Experiment Name: At_Siliques_P Parameter: Age (day) Value: 21
  misc_feature: MA Experiment 20000234 PARAMETER Experiment Name: At_Siliques_P Parameter: Organism Value: A. thaliana
  misc_feature: MA Experiment 20000234 PARAMETER Experiment Name: At_Siliques_P Parameter: Plant Line Value: WS
  misc_feature: MA Experiment 20000234 PARAMETER Experiment Name: At_Siliques_P Parameter: Tissue Value: Less Than 5mm Siliques vs. Whole Plant
  misc_feature: MA Experiment ID: 20000235 Result: Up-regulated in Transcription
  misc_feature: MA Experiment 20000235 PARAMETER Experiment Name: At_Siliques_P Parameter: Age (day) Value: 21
  misc_feature: MA Experiment 20000235 PARAMETER Experiment Name: At_Siliques_P Parameter: Organism Value: A. thaliana
  misc_feature: MA Experiment 20000235 PARAMETER Experiment Name: At_Siliques_P Parameter: Plant Line Value: WS
  misc_feature: MA Experiment 20000235 PARAMETER Experiment Name: At_Siliques_P Parameter: Tissue Value: 5-10mm Siliques vs. Whole Plant
  misc_feature: MA Experiment ID: 20000264 Result: Up-regulated in Transcription
  misc_feature: MA Experiment 20000264 PARAMETER Experiment Name: At_Open_Flower_P Parameter: Age (day) Value: 21
  misc_feature: MA Experiment 20000264 PARAMETER Experiment Name: At_Open_Flower_P Parameter: Plant Line Value: WS
  misc_feature: MA Experiment 20000264 PARAMETER Experiment Name: At_Open_Flower_P Parameter: Tissue Value: Open Flower vs. Whole Plant
  misc_feature: MA Experiment ID: 20000265 Result: Up-regulated in Transcription
  misc_feature: MA Experiment 20000265 PARAMETER Experiment Name: At_Open_Flower_P Parameter: Age (day) Value: 21
  misc_feature: MA Experiment 20000265 PARAMETER Experiment Name: At_Open_Flower_P Parameter: Plant Line Value: WS
  misc_feature: MA Experiment 20000265 PARAMETER Experiment Name: At_Open_Flower_P Parameter: Tissue Value: Closed Flower vs. Whole Plant
  misc_feature: MA Experiment ID: 20000286 Result: Up-regulated in Transcription
  misc_feature: MA Experiment 20000286 PARAMETER Experiment Name: At_Open_Flower_P Parameter: Age (day) Value: 21
  misc_feature: MA Experiment 20000286 PARAMETER Experiment Name: At_Open_Flower_P Parameter: Plant Line Value: WS
  misc_feature: MA Experiment 20000286 PARAMETER Experiment Name: At_Open_Flower_P Parameter: Tissue Value: Half Open vs. Whole Plant
  misc_feature: MA Experiment ID: 20000438 Result: Up-regulated in Transcription
  misc_feature: MA Experiment 20000438 PARAMETER Experiment Name: At_Shoots__P Parameter: Age (day) Value: 14
  misc_feature: MA Experiment 20000438 PARAMETER Experiment Name: At_Shoots__P Parameter: Tissue Value: Shoots vs. Whole Plant
  misc_feature: MA Experiment ID: 20000439 Result: Down-regulated in Transcription
  misc_feature: MA Experiment 20000439 PARAMETER Experiment Name: At_Roots__P Parameter: Age (day) Value: 14 vs. 21
  misc_feature: MA Experiment 20000439 PARAMETER Experiment Name: At_Roots__P Parameter: Organism Value: A. thaliana
  misc_feature: MA Experiment 20000439 PARAMETER Experiment Name: At_Roots__P Parameter: Tissue Value: Roots vs. Whole Plant
  misc_feature: MA Experiment ID: 20000496 Result: Up-regulated in Transcription
  misc_feature: MA Experiment 20000496 PARAMETER Experiment Name: At_Guard_Cells_P Parameter: Harvest Date Value: 7/19/2002
  misc_feature: MA Experiment 20000496 PARAMETER Experiment Name: At_Guard_Cells_P Parameter: Organism Value: Canola
  misc_feature: MA Experiment 20000496 PARAMETER Experiment Name: At_Guard_Cells_P Parameter: Tissue Value: Guard Cells vs. Leaves
  misc_feature: MA Experiment ID: 20001247 Result: Down-regulated in Transcription
  misc_feature: MA Experiment 20001247 PARAMETER Experiment Name: At_Far-red-induction_P Parameter: Age (day) Value: 7
  misc_feature: MA Experiment 20001247 PARAMETER Experiment Name: At_Far-red-induction_P Parameter: Light Value: Far-red vs. White
  misc_feature: MA Experiment 20001247 PARAMETER Experiment Name: At_Far-red-induction_P Parameter: Organism Value: A. thaliana
  misc_feature: MA Experiment 20001247 PARAMETER Experiment Name: At_Far-red-induction_P Parameter: Plant Line Value: Columbia
  misc_feature: MA Experiment 20001247 PARAMETER Experiment Name: At_Far-red-induction_P Parameter: Timepoint (hr) Value: 1
  misc_feature: MA Experiment 20001247 PARAMETER Experiment Name: At_Far-red-induction_P Parameter: Tissue Value: Whole Plant
  misc_feature: MA Experiment ID: 20001248 Result: Down-regulated in Transcription
  misc_feature: MA Experiment 20001248 PARAMETER Experiment Name: At_Far-red-induction_P Parameter: Age (day) Value: 7
  misc_feature: MA Experiment 20001248 PARAMETER Experiment Name: At_Far-red-induction_P Parameter: Light Value: Far-red vs. White
  misc_feature: MA Experiment 20001248 PARAMETER Experiment Name: At_Far-red-induction_P Parameter: Organism Value: A. thaliana
  misc_feature: MA Experiment 20001248 PARAMETER Experiment Name: At_Far-red-induction_P Parameter: Plant Line Value: Columbia
  misc_feature: MA Experiment 20001248 PARAMETER Experiment Name: At_Far-red-induction_P Parameter: Timepoint (hr) Value: 4
  misc_feature: MA Experiment 20001248 PARAMETER Experiment Name: At_Far-red-induction_P Parameter: Tissue Value: Whole Plant
  misc_feature: MA Experiment ID: 20001450 Result: Down-regulated in Transcription
  misc_feature: MA Experiment 20001450 PARAMETER Experiment Name: At_Far-red-induction_P Parameter: Age (day) Value: 7
  misc_feature: MA Experiment 20001450 PARAMETER Experiment Name: At_Far-red-induction_P Parameter: Light Value: Far-red vs. White
  misc_feature: MA Experiment 20001450 PARAMETER Experiment Name: At_Far-red-induction_P Parameter: Organism Value: A. thaliana
  misc_feature: MA Experiment 20001450 PARAMETER Experiment Name: At_Far-red-induction_P Parameter: Plant Line Value: Columbia
  misc_feature: MA Experiment 20001450 PARAMETER Experiment Name: At_Far-red-induction_P Parameter: Timepoint (hr) Value: 8
  misc_feature: MA Experiment 20001450 PARAMETER Experiment Name: At_Far-red-induction_P Parameter: Tissue Value: Whole Plant
  misc_feature: MA Experiment ID: 20001911 Result: Down-regulated in Transcription
  misc_feature: MA Experiment 20001911 PARAMETER Experiment Name: At_Drought_Reproduction_P Parameter: Age (day) Value: 40
  misc_feature: MA Experiment 20001911 PARAMETER Experiment Name: At_Drought_Reproduction_P Parameter: Organism Value: A. thaliana
  misc_feature: MA Experiment 20001911 PARAMETER Experiment Name: At_Drought_Reproduction_P Parameter: Plant Line Value: WS
  misc_feature: MA Experiment 20001911 PARAMETER Experiment Name: At_Drought_Reproduction_P Parameter: Timepoint (day) Value: 10
  misc_feature: MA Experiment 20001911 PARAMETER Experiment Name: At_Drought_Reproduction_P Parameter: Tissue Value: Flowers
  misc_feature: MA Experiment 20001911 PARAMETER Experiment Name: At_Drought_Reproduction_P Parameter: Treatment Value: Drought vs. No Drought

SEQ ID NO: 38032 - protein, 379 aa, Arabidopsis thaliana; identical to SEQ ID NO: 30118
  peptide (1)..(379): Ceres Seq. ID no. 13504986
  misc_feature (37)..(365): Pfam Name: GDSL-like Lipase/Acylhydrolase Pfam Description: GDSL-like Lipase/Acylhydrolase
  misc_feature (37)..(365): Pfam Name: GDSL-like Lipase/Acylhydrolase Pfam Description: GDSL-like Lipase/Acylhydrolase
  misc_feature (34)..(372): Homolog of NCBI NO: 33147016 NR Description: putative early nodulin 8 precursor
  misc_feature (8)..(368): Homolog of NCBI NO: 15220550 NR Description: GDSL-motif lipase/hydrolase protein [Arabidopsis
  misc_feature (35)..(372): Homolog of NCBI NO: 15223585 NR Description: GDSL-motif lipase/hydrolase protein [Arabidopsis
  misc_feature (6)..(371): Homolog of NCBI NO: 15217506 NR Description: GDSL-motif lipase/hydrolase protein [Arabidopsis
  misc_feature (13)..(372): Homolog of NCBI NO: 21537184 NR Description: early nodule-specific protein, putative
  misc_feature (34)..(372): Homolog of NCBI NO: 33147016 NR Description: putative early nodulin 8 precursor
  misc_feature (35)..(372): Homolog of NCBI NO: 15223585 NR Description: GDSL-motif lipase/hydrolase protein [Arabidopsis
  misc_feature (13)..(372): Homolog of NCBI NO: 21537184 NR Description: early nodule-specific protein, putative
  misc_feature (1)..(379): Homolog of NCBI NO: 15229919 NR Description: GDSL-motif lipase/hydrolase protein [Arabidopsis
  misc_feature (1)..(379): Homolog of NCBI NO: 21553789 NR Description: putative nodulin [Arabidopsis thaliana]
  misc_feature (25)..(379): Homolog of NCBI NO: 23397291 NR Description: putative nodulin [Arabidopsis thaliana]
  misc_feature (9)..(372): Homolog of NCBI NO: 25405771 NR Description: hypothetical protein T22H22.20 [imported] -
  misc_feature (8)..(372): Homolog of NCBI NO: 18405064 NR Description: GDSL-motif lipase/hydrolase protein [Arabidopsis
  misc_feature (6)..(371): Homolog of NCBI NO: 15217506 NR Description: GDSL-motif lipase/hydrolase protein [Arabidopsis
  misc_feature (8)..(368): Homolog of NCBI NO: 15220550 NR Description: GDSL-motif lipase/hydrolase protein [Arabidopsis
  misc_feature (8)..(372): Homolog of NCBI NO: 18405064 NR Description: GDSL-motif lipase/hydrolase protein [Arabidopsis
  misc_feature (9)..(372): Homolog of NCBI NO: 25405771 NR Description: hypothetical protein T22H22.20 [imported] -
  misc_feature (25)..(379): Homolog of NCBI NO: 23397291 NR Description: putative nodulin [Arabidopsis thaliana]
  misc_feature (1)..(379): Homolog of NCBI NO: 21553789 NR Description: putative nodulin [Arabidopsis thaliana]
  misc_feature (1)..(379): Homolog of NCBI NO: 15229919 NR Description: GDSL-motif lipase/hydrolase protein [Arabidopsis

SEQ ID NO: 38033 - protein, 294 aa, Arabidopsis thaliana; identical to SEQ ID NO: 30119
  peptide (1)..(294): Ceres Seq. ID no. 13504987
  misc_feature (1)..(280): Pfam Name: GDSL-like Lipase/Acylhydrolase Pfam Description: GDSL-like Lipase/Acylhydrolase
  misc_feature (1)..(280): Pfam Name: GDSL-like Lipase/Acylhydrolase Pfam Description: GDSL-like Lipase/Acylhydrolase
  misc_feature (1)..(287): Homolog of NCBI NO: 33147016 NR Description: putative early nodulin 8 precursor
  misc_feature (1)..(283): Homolog of NCBI NO: 15220550 NR Description: GDSL-motif lipase/hydrolase protein [Arabidopsis
  misc_feature (1)..(287): Homolog of NCBI NO: 15223585 NR Description: GDSL-motif lipase/hydrolase protein [Arabidopsis
  misc_feature (1)..(286): Homolog of NCBI NO: 15217506 NR Description: GDSL-motif lipase/hydrolase protein [Arabidopsis
  misc_feature (1)..(287): Homolog of NCBI NO: 21537184 NR Description: early nodule-specific protein, putative
  misc_feature (1)..(287): Homolog of NCBI NO: 33147016 NR Description: putative early nodulin 8 precursor
  misc_feature (1)..(287): Homolog of NCBI NO: 15223585 NR Description: GDSL-motif lipase/hydrolase protein [Arabidopsis
  misc_feature (1)..(287): Homolog of NCBI NO: 21537184 NR Description: early nodule-specific protein, putative
  misc_feature (1)..(294): Homolog of NCBI NO: 15229919 NR Description: GDSL-motif lipase/hydrolase protein [Arabidopsis
  misc_feature (1)..(294): Homolog of NCBI NO: 21553789 NR Description: putative nodulin [Arabidopsis thaliana]
  misc_feature (1)..(294): Homolog of NCBI NO: 23397291 NR Description: putative nodulin [Arabidopsis thaliana]
  misc_feature (1)..(287): Homolog of NCBI NO: 25405771 NR Description: hypothetical protein T22H22.20 [imported] -
  misc_feature (1)..(287): Homolog of NCBI NO: 18405064 NR Description: GDSL-motif lipase/hydrolase protein [Arabidopsis
  misc_feature (1)..(286): Homolog of NCBI NO: 15217506 NR Description: GDSL-motif lipase/hydrolase protein [Arabidopsis
  misc_feature (1)..(283): Homolog of NCBI NO: 15220550 NR Description: GDSL-motif lipase/hydrolase protein [Arabidopsis
  misc_feature (1)..(287): Homolog of NCBI NO: 18405064 NR Description: GDSL-motif lipase/hydrolase protein [Arabidopsis
  misc_feature (1)..(287): Homolog of NCBI NO: 25405771 NR Description: hypothetical protein T22H22.20 [imported] -
  misc_feature (1)..(294): Homolog of NCBI NO: 23397291 NR Description: putative nodulin [Arabidopsis thaliana]
  misc_feature (1)..(294): Homolog of NCBI NO: 21553789 NR Description: putative nodulin [Arabidopsis thaliana]
  misc_feature (1)..(294): Homolog of NCBI NO: 15229919 NR Description: GDSL-motif lipase/hydrolase protein [Arabidopsis

SEQ ID NO: 38034 - protein, 208 aa, Arabidopsis thaliana; identical to SEQ ID NO: 30120
  peptide (1)..(208): Ceres Seq. ID no. 13504988
  misc_feature (1)..(194): Pfam Name: GDSL-like Lipase/Acylhydrolase Pfam Description: GDSL-like Lipase/Acylhydrolase
  misc_feature (1)..(194): Pfam Name: GDSL-like Lipase/Acylhydrolase Pfam Description: GDSL-like Lipase/Acylhydrolase
  misc_feature (1)..(201): Homolog of NCBI NO: 33147016 NR Description: putative early nodulin 8 precursor
  misc_feature (1)..(197): Homolog of NCBI NO: 15220550 NR Description: GDSL-motif lipase/hydrolase protein [Arabidopsis
  misc_feature (1)..(201): Homolog of NCBI NO: 15223585 NR Description: GDSL-motif lipase/hydrolase protein [Arabidopsis
  misc_feature (1)..(200): Homolog of NCBI NO: 15217506 NR Description: GDSL-motif lipase/hydrolase protein [Arabidopsis
  misc_feature (1)..(201): Homolog of NCBI NO: 21537184 NR Description: early nodule-specific protein, putative
  misc_feature (1)..(201): Homolog of NCBI NO: 33147016 NR Description: putative early nodulin 8 precursor
  misc_feature (1)..(201): Homolog of NCBI NO: 15223585 NR Description: GDSL-motif lipase/hydrolase protein [Arabidopsis
  misc_feature (1)..(201): Homolog of NCBI NO: 21537184 NR Description: early nodule-specific protein, putative
  misc_feature (1)..(208): Homolog of NCBI NO: 15229919 NR Description: GDSL-motif lipase/hydrolase protein [Arabidopsis
  misc_feature (1)..(208): Homolog of NCBI NO: 21553789 NR Description: putative nodulin [Arabidopsis thaliana]
  misc_feature (1)..(208): Homolog of NCBI NO: 23397291 NR Description: putative nodulin [Arabidopsis thaliana]
  misc_feature (1)..(201): Homolog of NCBI NO: 25405771 NR Description: hypothetical protein T22H22.20 [imported] -
  misc_feature (1)..(201): Homolog of NCBI NO: 18405064 NR Description: GDSL-motif lipase/hydrolase protein [Arabidopsis
  misc_feature (1)..(200): Homolog of NCBI NO: 15217506 NR Description: GDSL-motif lipase/hydrolase protein [Arabidopsis
  misc_feature (1)..(197): Homolog of NCBI NO: 15220550 NR Description: GDSL-motif lipase/hydrolase protein [Arabidopsis
  misc_feature (1)..(201): Homolog of NCBI NO: 18405064 NR Description: GDSL-motif lipase/hydrolase protein [Arabidopsis
  misc_feature (1)..(201): Homolog of NCBI NO: 25405771 NR Description: hypothetical protein T22H22.20 [imported] -
  misc_feature (1)..(208): Homolog of NCBI NO: 23397291 NR Description: putative nodulin [Arabidopsis thaliana]
  misc_feature (1)..(208): Homolog of NCBI NO: 21553789 NR Description: putative nodulin [Arabidopsis thaliana]
  misc_feature (1)..(208): Homolog of NCBI NO: 15229919 NR Description: GDSL-motif lipase/hydrolase protein [Arabidopsis

SEQ ID NO: 38035 - DNA, 1171 bp, Arabidopsis thaliana
  misc_feature (1)..(1171): Ceres Seq. ID no. 12327829
  misc_feature: MA Experiment ID: 20000117 Result: Down-regulated in Transcription
  misc_feature: MA Experiment 20000117 PARAMETER Experiment Name: At_100uM_ABA_Mutants_cDNA_P Parameter: Plant Line Value: Columbia
  misc_feature: MA Experiment 20000117 PARAMETER Experiment Name: At_100uM_ABA_Mutants_cDNA_P Parameter: Timepoint (hr) Value: 6
  misc_feature: MA Experiment 20000117 PARAMETER Experiment Name: At_100uM_ABA_Mutants_cDNA_P Parameter: Tissue Value: Aerial
  misc_feature: MA Experiment 20000117 PARAMETER Experiment Name: At_100uM_ABA_Mutants_cDNA_P Parameter: Treatment Value: 100uM ABA vs. No Treatment
  misc_feature: MA Experiment ID: 20000451 Result: Down-regulated in Transcription
  misc_feature: MA Experiment 20000451 PARAMETER Experiment Name: At_CS6879_Shoots-Roots_P Parameter: Age (day) Value: 14
  misc_feature: MA Experiment 20000451 PARAMETER Experiment Name: At_CS6879_Shoots-Roots_P Parameter: Organism Value: A. thaliana
  misc_feature: MA Experiment 20000451 PARAMETER Experiment Name: At_CS6879_Shoots-Roots_P Parameter: Plant Line Value: CS6879 vs. WS
  misc_feature: MA Experiment 20000451 PARAMETER Experiment Name: At_CS6879_Shoots-Roots_P Parameter: Tissue Value: Roots
aaacgaataaagaagtaactgtgaaagagcgaagaagagtcacacaaaaaaaacaatggcggaatcttcagagcctccggttgttctccttcaccgaccaccgtctctaactttcatggacgagattctgactcgtgaattccgtactctcatcaccgacacttcatcatcggaatcactcccgagcttcctcccccgtcacgcctcctccgccagagccttcgttatcaccggcagacttccggtaaccgaagaactcctttctcatctcccttctctccagatactcgtctgcactagcgtcggcatcgatcacatcgatctcgccgcatgcaagcgtcgcggcatcgttatcaccaacgctggcaacgcgttttccgatgacgttgctgattgtgccgtcggtttgcttattagtgttctccgtcgtattcctgcagccgatcgttacgtccgggctggtaattgggcgaaatttggggattttcaattagggtccaaggtaagtgggaagagagttgggatagttggattggggagcattggatcatttgttgctaaaagacttgaatcatttggctgtgttatctcttacaattcaaggagtcagaaacagagtagtccataccggttttactctgacattctctcgttagcagagaacaacgatgtacttgtcctctgctgctctttgacagacgaaacgcaccatattgtgaatagagaagtgatggagttgcttggtaaggatggggttgtgatcaatgtgggacgaggaaagttgattgatgagaaggagatggtcaagtgtttggttgacggtgtgattggtggtgctggtttagatgtgtttgagaatgaaccggcagttcctcaggagttgtttggtttggataatgtagtgttgtctcctcattttgctgtggctacaccagggtctttggacaatgttgcacagattgctttagctaacttgaaggcgtttttctcgaaccggcctttgctttctccggttcaattggattgagagagcgcccggtttgatcaggtagctaaattagttaagctattgtttattataatcaataattcaaaaagaaagtgtaatgaatatttgaatgtaccctgacattctctcccaaagaagaagaattaatgacgcatattattt

SEQ ID NO: 38036 - protein, 323 aa, Arabidopsis thaliana
  peptide (1)..(323): Ceres Seq. ID no. 12327830
  misc_feature (17)..(105): Pfam Name: D-isomer specific 2-hydroxyacid dehydrogenase, Pfam Description: D-isomer specific 2-hydroxyacid dehydrogenase,
  misc_feature (16)..(320): Homolog of NCBI NO: 15890302 NR Description: AGR_L_379p [Agrobacterium tumefaciens]
  misc_feature (1)..(320): Homolog of NCBI NO: 21636166 NR Description: unknown [Aegilops tauschii]
  misc_feature (10)..(320): Homolog of NCBI NO: 15220005 NR Description: putative D-isomer specific 2-hydroxyacid
  misc_feature (10)..(320): Homolog of NCBI NO: 34904262 NR Description: putative Caulobacter crescentus D-isomer specific
  misc_feature (5)..(321): Homolog of NCBI NO: 32488422 NR Description: OSJNBb0085F13.12 [Oryza sativa (japonica
  misc_feature (2)..(320): Homolog of NCBI NO: 32488421 NR Description: OSJNBb0085F13.11 [Oryza sativa (japonica
  misc_feature (4)..(322): Homolog of NCBI NO: 38345306 NR Description: OSJNBb0085F13.6 [Oryza sativa (japonica
  misc_feature (1)..(320): Homolog of NCBI NO: 7485630 NR Description: probable glycerate dehydrogenase [imported] -
  misc_feature (8)..(322): Homolog of NCBI NO: 38345308 NR Description: OSJNBb0085F13.13 [Oryza sativa (japonica
  misc_feature (1)..(323): Homolog of NCBI NO: 15222015 NR Description: hypothetical protein; protein id: At1g12550.1
MAESSEPPVVLLHRPPSLTFMDEILTREFRTLITDTSSSESLPSFLPRHASSARAFVITGRLPVTEELLSHLPSLQILVCTSVGIDHIDLAACKRRGIVITNAGNAFSDDVADCAVGLLISVLRRIPAADRYVRAGNWAKFGDFQLGSKVSGKRVGIVGLGSIGSFVAKRLESFGCVISYNSRSQKQSSPYRFYSDILSLAENNDVLVLCCSLTDETHHIVNREVMELLGKDGVVINVGRGKLIDEKEMVKCLVDGVIGGAGLDVFENEPAVPQELFGLDNVVLSPHFAVATPGSLDNVAQIALANLKAFFSNRPLLSPVQLD

SEQ ID NO: 38037 - protein, 303 aa, Arabidopsis thaliana
  peptide (1)..(303): Ceres Seq. ID no. 12327831
  misc_feature (1)..(85): Pfam Name: D-isomer specific 2-hydroxyacid dehydrogenase, Pfam Description: D-isomer specific 2-hydroxyacid dehydrogenase,
  misc_feature (1)..(300): Homolog of NCBI NO: 15890302 NR Description: AGR_L_379p [Agrobacterium tumefaciens]
  misc_feature (1)..(300): Homolog of NCBI NO: 21636166 NR Description: unknown [Aegilops tauschii]
  misc_feature (1)..(300): Homolog of NCBI NO: 15220005 NR Description: putative D-isomer specific 2-hydroxyacid
  misc_feature (1)..(300): Homolog of NCBI NO: 34904262 NR Description: putative Caulobacter crescentus D-isomer specific
  misc_feature (1)..(301): Homolog of NCBI NO: 32488422 NR Description: OSJNBb0085F13.12 [Oryza sativa (japonica
  misc_feature (1)..(300): Homolog of NCBI NO: 32488421 NR Description: OSJNBb0085F13.11 [Oryza sativa (japonica
  misc_feature (1)..(302): Homolog of NCBI NO: 38345306 NR Description: OSJNBb0085F13.6 [Oryza sativa (japonica
  misc_feature (1)..(300): Homolog of NCBI NO: 7485630 NR Description: probable glycerate dehydrogenase [imported] -
  misc_feature (1)..(302): Homolog of NCBI NO: 38345308 NR Description: OSJNBb0085F13.13 [Oryza sativa (japonica
  misc_feature (1)..(303): Homolog of NCBI NO: 15222015 NR Description: hypothetical protein; protein id: At1g12550.1
MDEILTREFRTLITDTSSSESLPSFLPRHASSARAFVITGRLPVTEELLSHLPSLQILVCTSVGIDHIDLAACKRRGIVITNAGNAFSDDVADCAVGLLISVLRRIPAADRYVRAGNWAKFGDFQLGSKVSGKRVGIVGLGSIGSFVAKRLESFGCVISYNSRSQKQSSPYRFYSDILSLAENNDVLVLCCSLTDETHHIVNREVMELLGKDGVVINVGRGKLIDEKEMVKCLVDGVIGGAGLDVFENEPAVPQELFGLDNVVLSPHFAVATPGSLDNVAQIALANLKAFFSNRPLLSPVQLD

SEQ ID NO: 38038 - DNA, 1014 bp, Arabidopsis thaliana
  misc_feature (1)..(1014): Ceres Seq. ID no. 12329789
  misc_feature: MA Experiment ID: 108473 Result: Down-regulated in Transcription
  misc_feature: MA Experiment 108473 PARAMETER Experiment Name: At_Drought_Flowers_cDNA_P Parameter: Timepoint (hr) Value: 7 d
  misc_feature: MA Experiment 108473 PARAMETER Experiment Name: At_Drought_Flowers_cDNA_P Parameter: Tissue Value: Flower
  misc_feature: MA Experiment 108473 PARAMETER Experiment Name: At_Drought_Flowers_cDNA_P Parameter: Treatment Value: Drought vs. No Drought
  misc_feature: MA Experiment ID: 108501 Result: Down-regulated in Transcription
  misc_feature: MA Experiment 108501 PARAMETER Experiment Name: At_ap2_floral_buds_cDNA_P Parameter: Plant Line Value: ap2 (Ler.)
  misc_feature: MA Experiment 108501 PARAMETER Experiment Name: At_ap2_floral_buds_cDNA_P Parameter: Tissue Value: Closed Flower
  misc_feature: MA Experiment ID: 20000069 Result: Up-regulated in Transcription
  misc_feature: MA Experiment 20000069 PARAMETER Experiment Name: At_100uM_ABA_Mutants_cDNA_P Parameter: Plant Line Value: CS23
  misc_feature: MA Experiment 20000069 PARAMETER Experiment Name: At_100uM_ABA_Mutants_cDNA_P Parameter: Timepoint (hr) Value: 6
  misc_feature: MA Experiment 20000069 PARAMETER Experiment Name: At_100uM_ABA_Mutants_cDNA_P Parameter: Tissue Value: Aerial
  misc_feature: MA Experiment 20000069 PARAMETER Experiment Name: At_100uM_ABA_Mutants_cDNA_P Parameter: Treatment Value: 100uM ABA vs. No Treatment
  misc_feature: MA Experiment ID: 20000070 Result: Up-regulated in Transcription
  misc_feature: MA Experiment 20000070 PARAMETER Experiment Name: At_100uM_ABA_Mutants_cDNA_P Parameter: Plant Line Value: CS24
  misc_feature: MA Experiment 20000070 PARAMETER Experiment Name: At_100uM_ABA_Mutants_cDNA_P Parameter: Timepoint (hr) Value: 6
  misc_feature: MA Experiment 20000070 PARAMETER Experiment Name: At_100uM_ABA_Mutants_cDNA_P Parameter: Tissue Value: Aerial
  misc_feature: MA Experiment 20000070 PARAMETER Experiment Name: At_100uM_ABA_Mutants_cDNA_P Parameter: Treatment Value: 100uM ABA vs. No Treatment
  misc_feature: MA Experiment ID: 20000071 Result: Up-regulated in Transcription
  misc_feature: MA Experiment 20000071 PARAMETER Experiment Name: At_100uM_ABA_Mutants_cDNA_P Parameter: Plant Line Value: CS8104
  misc_feature: MA Experiment 20000071 PARAMETER Experiment Name: At_100uM_ABA_Mutants_cDNA_P Parameter: Timepoint (hr) Value: 6
  misc_feature: MA Experiment 20000071 PARAMETER Experiment Name: At_100uM_ABA_Mutants_cDNA_P Parameter: Tissue Value: Aerial
  misc_feature: MA Experiment 20000071 PARAMETER Experiment Name: At_100uM_ABA_Mutants_cDNA_P Parameter: Treatment Value: 100uM ABA vs. No Treatment
  misc_feature: MA Experiment ID: 20000086 Result: Up-regulated in Transcription
  misc_feature: MA Experiment 20000086 PARAMETER Experiment Name: At_100uM_ABA_Mutants_cDNA_P Parameter: Plant Line Value: CS22
  misc_feature: MA Experiment 20000086 PARAMETER Experiment Name: At_100uM_ABA_Mutants_cDNA_P Parameter: Timepoint (hr) Value: 6
  misc_feature: MA Experiment 20000086 PARAMETER Experiment Name: At_100uM_ABA_Mutants_cDNA_P Parameter: Tissue Value: Aerial
  misc_feature: MA Experiment 20000086 PARAMETER Experiment Name: At_100uM_ABA_Mutants_cDNA_P Parameter: Treatment Value: 100uM ABA vs. No Treatment
  misc_feature: MA Experiment ID: 20000087 Result: Up-regulated in Transcription
  misc_feature: MA Experiment 20000087 PARAMETER Experiment Name: At_100uM_ABA_Mutants_cDNA_P Parameter: Plant Line Value: WS
  misc_feature: MA Experiment 20000087 PARAMETER Experiment Name: At_100uM_ABA_Mutants_cDNA_P Parameter: Timepoint (hr) Value: 6
  misc_feature: MA Experiment 20000087 PARAMETER Experiment Name: At_100uM_ABA_Mutants_cDNA_P Parameter: Tissue Value: Aerial
  misc_feature: MA Experiment 20000087 PARAMETER Experiment Name: At_100uM_ABA_Mutants_cDNA_P Parameter: Treatment Value: 100uM ABA vs. No Treatment
  misc_feature: MA Experiment ID: 20000089 Result: Up-regulated in Transcription
  misc_feature: MA Experiment ID: 20000117 Result: Up-regulated in Transcription
  misc_feature: MA Experiment 20000117 PARAMETER Experiment Name: At_100uM_ABA_Mutants_cDNA_P Parameter: Plant Line Value: Columbia
  misc_feature: MA Experiment 20000117 PARAMETER Experiment Name: At_100uM_ABA_Mutants_cDNA_P Parameter: Timepoint (hr) Value: 6
  misc_feature: MA Experiment 20000117 PARAMETER Experiment Name: At_100uM_ABA_Mutants_cDNA_P Parameter: Tissue Value: Aerial
  misc_feature: MA Experiment 20000117 PARAMETER Experiment Name: At_100uM_ABA_Mutants_cDNA_P Parameter: Treatment Value: 100uM ABA vs. No Treatment
  misc_feature: MA Experiment ID: 20000355 Result: Down-regulated in Transcription
  misc_feature: MA Experiment 20000355 PARAMETER Experiment Name: At_Siliques_Sub_P Parameter: Age (day) Value: 21
  misc_feature: MA Experiment 20000355 PARAMETER Experiment Name: At_Siliques_Sub_P Parameter: Organism Value: A. thaliana
  misc_feature: MA Experiment 20000355 PARAMETER Experiment Name: At_Siliques_Sub_P Parameter: Plant Line Value: WS
  misc_feature: MA Experiment 20000355 PARAMETER Experiment Name: At_Siliques_Sub_P Parameter: Tissue Value: Less Than 5mm Siliques vs. Whole Plant
  misc_feature: MA Experiment ID: 20000440 Result: Up-regulated in Transcription
  misc_feature: MA Experiment 20000440 PARAMETER Experiment Name: At_Closed-Flower__Sub_P Parameter: Tissue Value: Closed Flower vs. Whole Plant
gtcactctccgttaattctaacggtcatgtcagacgccgtaaccaaaaccgtcgcccctctccgtcgtaaagctaatcctattaacggaaaacacactaacggcgtcaccatcgacggaatcttcgacgaccacaatcgccaaataggaccaataaatagccaaatggaagatattgctcagaaaactgatgacggtggaggaggagaatggacaagcaaagcgtcgtttatgacgtggacgatgcatgacataatttacgtggcgagacaccattggataccgtgtttattcgcggccggagttatgttttttacggttgtggagtacacgttccagatgactcctgcgagttctcagccgtttgatctaggatttgtggccacacgttatctgcataacatcttggcatcttcacccaatcttaacaccgttttagccgctttaaacacgattttggtagggatgcaaacaacgtatattggatgtacatgggcagtggaaggacgaccacgggcaaccatcgcggctttattcatgttcacttgtcgtggcattctcggctactctactcagctccctcgccctcaggaatttttaggatcaggagtagattatccggtcggaaacgtgtcgttcttcctcttctactcaggtcacgtcgccggatcgatgatcgcatcgttggacatgaagagaatgcagaggtttaggctggcgatgttttttgacattctcaatgtattgcaatccatcaggctgcttggtacgagaggacactacacgattgatattgcggttggagttggcgctgggattctctttgactcattggccgggaagtacaaagagatgagcaagagacatttacggaatactcgttgtagtttgatttcaaaagactctctagtcacttaaatctatttttttttccggcaaaataattgtatattacactaaatctatttcttcttaaaacgtttagaaacacatttagttgaagtttaatgatttc

SEQ ID NO: 38039 - protein, 304 aa, Arabidopsis thaliana
  peptide (1)..(304): Ceres Seq. ID no. 12329790
  misc_feature (55)..(303): Homolog of NCBI NO: 13926235 NR Description: AT3g15820/MSJ11_22 [Arabidopsis thaliana]
  misc_feature (9)..(303): Homolog of NCBI NO: 18400910 NR Description: expressed protein
  misc_feature (9)..(304): Homolog of NCBI NO: 15232701 NR Description: unknown protein; protein id: At3g15830.1
HSPLILTVMSDAVTKTVAPLRRKANPINGKHTNGVTIDGIFDDHNRQIGPINSQMEDIAQKTDDGGGGEWTSKASFMTWTMHDIIYVARHHWIPCLFAAGVMFFTVVEYTFQMTPASSQPFDLGFVATRYLHNILASSPNLNTVLAALNTILVGMQTTYIGCTWAVEGRPRATIAALFMFTCRGILGYSTQLPRPQEFLGSGVDYPVGNVSFFLFYSGHVAGSMIASLDMKRMQRFRLAMFFDILNVLQSIRLLGTRGHYTIDIAVGVGAGILFDSLAGKYKEMSKRHLRNTRCSLISKDSLVT

SEQ ID NO: 38040 - protein, 296 aa, Arabidopsis thaliana
  peptide (1)..(296): Ceres Seq. ID no. 12329791
  misc_feature (47)..(295): Homolog of NCBI NO: 13926235 NR Description: AT3g15820/MSJ11_22 [Arabidopsis thaliana]
  misc_feature (1)..(295): Homolog of NCBI NO: 18400910 NR Description: expressed protein
  misc_feature (1)..(296): Homolog of NCBI NO: 15232701 NR Description: unknown protein; protein id: At3g15830.1
MSDAVTKTVAPLRRKANPINGKHTNGVTIDGIFDDHNRQIGPINSQMEDIAQKTDDGGGGEWTSKASFMTWTMHDIIYVARHHWIPCLFAAGVMFFTVVEYTFQMTPASSQPFDLGFVATRYLHNILASSPNLNTVLAALNTILVGMQTTYIGCTWAVEGRPRATIAALFMFTCRGILGYSTQLPRPQEFLGSGVDYPVGNVSFFLFYSGHVAGSMIASLDMKRMQRFRLAMFFDILNVLQSIRLLGTRGHYTIDIAVGVGAGILFDSLAGKYKEMSKRHLRNTRCSLISKDSLVT

SEQ ID NO: 38041 - protein, 250 aa, Arabidopsis thaliana
  peptide (1)..(250): Ceres Seq. ID no. 12329792
  misc_feature (1)..(249): Homolog of NCBI NO: 13926235 NR Description: AT3g15820/MSJ11_22 [Arabidopsis thaliana]
  misc_feature (1)..(249): Homolog of NCBI NO: 18400910 NR Description: expressed protein
  misc_feature (1)..(250): Homolog of NCBI NO: 15232701 NR Description: unknown protein; protein id: At3g15830.1
MEDIAQKTDDGGGGEWTSKASFMTWTMHDIIYVARHHWIPCLFAAGVMFFTVVEYTFQMTPASSQPFDLGFVATRYLHNILASSPNLNTVLAALNTILVGMQTTYIGCTWAVEGRPRATIAALFMFTCRGILGYSTQLPRPQEFLGSGVDYPVGNVSFFLFYSGHVAGSMIASLDMKRMQRFRLAMFFDILNVLQSIRLLGTRGHYTIDIAVGVGAGILFDSLAGKYKEMSKRHLRNTRCSLISKDSLVT

SEQ ID NO: 38042 - DNA, 1982 bp, Arabidopsis thaliana
  misc_feature (1)..(1982): Ceres Seq. ID no. 12331159
  misc_feature: MA Experiment ID: 108434 Result: Up-regulated in Transcription
  misc_feature: MA Experiment 108434 PARAMETER Experiment Name: At_Root_Tips_cDNA_P Parameter: Tissue Value: Root Tips
  misc_feature: MA Experiment ID: 108462 Result: Up-regulated in Transcription
  misc_feature: MA Experiment 108462 PARAMETER Experiment Name: At_Germinating_Seeds_cDNA_P Parameter: Age (day) Value: 2 vs. 0
  misc_feature: MA Experiment 108462 PARAMETER Experiment Name: At_Germinating_Seeds_cDNA_P Parameter: Tissue Value: Germinating Seeds
  misc_feature: MA Experiment ID: 108463 Result: Up-regulated in Transcription
  misc_feature: MA Experiment 108463 PARAMETER Experiment Name: At_Germinating_Seeds_cDNA_P Parameter: Age (day) Value: 3 vs. 0
  misc_feature: MA Experiment 108463 PARAMETER Experiment Name: At_Germinating_Seeds_cDNA_P Parameter: Tissue Value: Germinating Seeds
  misc_feature: MA Experiment ID: 108464 Result: Up-regulated in Transcription
  misc_feature: MA Experiment 108464 PARAMETER Experiment Name: At_Germinating_Seeds_cDNA_P Parameter: Age (day) Value: 4 vs. 0
  misc_feature: MA Experiment 108464 PARAMETER Experiment Name: At_Germinating_Seeds_cDNA_P Parameter: Tissue Value: Germinating Seeds
  misc_feature: MA Experiment ID: 20000087 Result: Down-regulated in Transcription
  misc_feature: MA Experiment 20000087 PARAMETER Experiment Name: At_100uM_ABA_Mutants_cDNA_P Parameter: Plant Line Value: WS
  misc_feature: MA Experiment 20000087 PARAMETER Experiment Name: At_100uM_ABA_Mutants_cDNA_P Parameter: Timepoint (hr) Value: 6
  misc_feature: MA Experiment 20000087 PARAMETER Experiment Name: At_100uM_ABA_Mutants_cDNA_P Parameter: Tissue Value: Aerial
  misc_feature: MA Experiment 20000087 PARAMETER Experiment Name: At_100uM_ABA_Mutants_cDNA_P Parameter: Treatment Value: 100uM ABA vs. No Treatment
  misc_feature: MA Experiment ID: 20000179 Result: Up-regulated in Transcription
  misc_feature: MA Experiment 20000179 PARAMETER Experiment Name: At_Germinating_Seeds_P Parameter: Age (hr) Value: 6 vs. 0
  misc_feature: MA Experiment 20000179 PARAMETER Experiment Name: At_Germinating_Seeds_P Parameter: Tissue Value: Germinating Seeds
  misc_feature: MA Experiment ID: 20000180 Result: Up-regulated in Transcription
  misc_feature: MA Experiment 20000180 PARAMETER Experiment Name: At_Germinating_Seeds_P Parameter: Age (hr) Value: 24 vs. 0
  misc_feature: MA Experiment 20000180 PARAMETER Experiment Name: At_Germinating_Seeds_P Parameter: Tissue Value: Germinating Seeds
gatccttgtcacaaaatgtcgcgtaattcttctactgatttcagctcaatcgctcaaattcgagtttgcgtttagaaattgaagttgactcttctgttcttgaatctatctccgatcggtgaactatctctcagtaccaggagattgatcactccttcgacattgctctttgaattcgtcctcaagggtattaatgagctcgtagaagctaccagaaatggcgtccatgagctctggtgatgaaagccttcgactttgcatgtttgatttgaggagaggtcaaactgaaggacaagagttagagaaaattttgttcttttatcctgccgatttagacttctcgacgcagttatcagtgatcgggctcagtgaagggcttattacttttactagacttttctctccggaggcggcttgtgaagtgatcgaagcagaaagacattcccatgttttctatgaggctgaacctgatatctggatggttatggttgtggagaaaaataaggagacaggagcgatatggaggatcgatgcattaaggagggtgcttaaagaagtgcactcactctttgtgatgtttcacgggtcaattagggcattaatcgaaaaagaaccaacaggagggcttacccgatcactattgtacccgttcatcacagattatttaagcacatttcaaatatggtctctctcggaagactgctgctgtgaattttttgttgggaagaaacttcagctaccaactttccgtgaaactttgagagagcgtggaactgttcaaatgcttactttagcaagggacactgcagttgaagttcagtctcttgttcaagtactagattcatgtgctgggagcttacgatgtcactctatgatcttatttcaagatcttttggtttcaacaaccctctcagctgatgataccgtcgacttgtttacatttgcggtaatgaggttgacctcaaaagctttctcctctgatacgagttcttggtcatatctacgtaaagggcctggttcatctgaaatctcttctagatctaatctggcacccgttggctcaattgattccctacactcaagaaacggtaataacatgcatcatgttattaggccactacaaaatgataagtggacaaaagggaaagatgggtttctaataaccgatatttggggtcttgagactggcggctcccctgattctgccatccctacaatttggcttcagcagacacaagaaagaatgtatctccttgcctatcagcataaaagtctcaccttacttcttctgatgcctacaaatgccattgtcaatggagatttaagcatctcagccgtgaaacagcaagttattgaagatgcatcactgagaattttgaaaattgaagagaatatttcaagagggtggggcggtgagaatgcttaccatattaagggttaccgttacttagtagttgataatgacacgaaagtatccagatcttctccttcaggaaaagtaacaacacttgcaaaggagtctctacttgcactaaacaagcttagagaagaagtggattcagaaaaaagccgtgcaaaaggacaggagaaagacatggaaatatgcatcagagctaagaacaatgtgtgggtgatcgcccgtgtgaccagaggcaaagagctttacatggctttggagaaaggcagcgacactcttcttgataccacagacgctgttggaagattcagcaacaggtattgcagcggagcattcttgatggactaagttttcgtgttctttcttctggttttgggaagagggttcttctagtttcaagtacgaagtgaaaagctcagaagaagtaatgagcacttctctctcagccattaattttgttttgtgagaaattgcagagaggaaaacgattgtgttcttagttggcctgtagatatgtaacaatgatattccacgttggatcagtgcaaacaaatccttttttgtg

SEQ ID NO: 38043 - protein, 515 aa, Arabidopsis thaliana
  peptide (1)..(515): Ceres Seq. ID no. 12331160
  misc_feature (245)..(506): Homolog of NCBI NO: 14517360 NR Description: At1g80910/F23A5_21 [Arabidopsis thaliana]
  misc_feature (161)..(515): Homolog of NCBI NO: 38175489 NR Description: putative myrosinase precursor
  misc_feature (203)..(515): Homolog of NCBI NO: 18266049 NR Description: myrosinase precursor [Brassica oleracea]
  misc_feature (1)..(322): Homolog of NCBI NO: 15220866 NR Description: myrosinase precursor, putative; protein id:
  misc_feature (1)..(322): Homolog of NCBI NO: 25372816 NR Description: F23A5.27 [imported] - Arabidopsis thaliana
  misc_feature (136)..(515): Homolog of NCBI NO: 25372816 NR Description: F23A5.27 [imported] - Arabidopsis thaliana
  misc_feature (136)..(515): Homolog of NCBI NO: 15220866 NR Description: myrosinase precursor, putative; protein id:
  misc_feature (1)..(515): Homolog of NCBI NO: 30684673 NR Description: expressed protein [Arabidopsis thaliana]
  misc_feature (1)..(515): Homolog of NCBI NO: 18394314 NR Description: expressed protein
  misc_feature (1)..(515): Homolog of NCBI NO: 21618002 NR Description: unknown [Arabidopsis thaliana]
MASMSSGDESLRLCMFDLRRGQTEGQELEKILFFYPADLDFSTQLSVIGLSEGLITFTRLFSPEAACEVIEAERHSHVFYEAEPDIWMVMVVEKNKETGAIWRIDALRRVLKEVHSLFVMFHGSIRALIEKEPTGGLTRSLLYPFITDYLSTFQIWSLSEDCCCEFFVGKKLQLPTFRETLRERGTVQMLTLARDTAVEVQSLVQVLDSCAGSLRCHSMILFQDLLVSTTLSADDTVDLFTFAVMRLTSKAFSSDTSSWSYLRKGPGSSEISSRSNLAPVGSIDSLHSRNGNNMHHVIRPLQNDKWTKGKDGFLITDIWGLETGGSPDSAIPTIWLQQTQERMYLLAYQHKSLTLLLLMPTNAIVNGDLSISAVKQQVIEDASLRILKIEENISRGWGGENAYHIKGYRYLVVDNDTKVSRSSPSGKVTTLAKESLLALNKLREEVDSEKSRAKGQEKDMEICIRAKNNVWVIARVTRGKELYMALEKGSDTLLDTTDAVGRFSNRYCSGAFLMD

SEQ ID NO: 38044 - protein, 512 aa, Arabidopsis thaliana
  peptide (1)..(512): Ceres Seq. ID no. 12331161
  misc_feature (242)..(503): Homolog of NCBI NO: 14517360 NR Description: At1g80910/F23A5_21 [Arabidopsis thaliana]
  misc_feature (158)..(512): Homolog of NCBI NO: 38175489 NR Description: putative myrosinase precursor
  misc_feature (200)..(512): Homolog of NCBI NO: 18266049 NR Description: myrosinase precursor [Brassica oleracea]
  misc_feature (1)..(319): Homolog of NCBI NO: 15220866 NR Description: myrosinase precursor, putative; protein id:
  misc_feature (1)..(319): Homolog of NCBI NO: 25372816 NR Description: F23A5.27 [imported] - Arabidopsis thaliana
  misc_feature (133)..(512): Homolog of NCBI NO: 25372816 NR Description: F23A5.27 [imported] - Arabidopsis thaliana
  misc_feature (133)..(512): Homolog of NCBI NO: 15220866 NR Description: myrosinase precursor, putative; protein id:
  misc_feature (1)..(512): Homolog of NCBI NO: 30684673 NR Description: expressed protein [Arabidopsis thaliana]
  misc_feature (1)..(512): Homolog of NCBI NO: 18394314 NR Description: expressed protein
  misc_feature (1)..(512): Homolog of NCBI NO: 21618002 NR Description: unknown [Arabidopsis thaliana]
MSSGDESLRLCMFDLRRGQTEGQELEKILFFYPADLDFSTQLSVIGLSEGLITFTRLFSPEAACEVIEAERHSHVFYEAEPDIWMVMVVEKNKETGAIWRIDALRRVLKEVHSLFVMFHGSIRALIEKEPTGGLTRSLLYPFITDYLSTFQIWSLSEDCCCEFFVGKKLQLPTFRETLRERGTVQMLTLARDTAVEVQSLVQVLDSCAGSLRCHSMILFQDLLVSTTLSADDTVDLFTFAVMRLTSKAFSSDTSSWSYLRKGPGSSEISSRSNLAPVGSIDSLHSRNGNNMHHVIRPLQNDKWTKGKDGFLITDIWGLETGGSPDSAIPTIWLQQTQERMYLLAYQHKSLTLLLLMPTNAIVNGDLSISAVKQQVIEDASLRILKIEENISRGWGGENAYHIKGYRYLVVDNDTKVSRSSPSGKVTTLAKESLLALNKLREEVDSEKSRAKGQEKDMEICIRAKNNVWVIARVTRGKELYMALEKGSDTLLDTTDAVGRFSNRYCSGAFLMD

SEQ ID NO: 38045 - protein, 501 aa, Arabidopsis thaliana
  peptide (1)..(501): Ceres Seq. ID no. 12331162
  misc_feature (231)..(492): Homolog of NCBI NO: 14517360 NR Description: At1g80910/F23A5_21 [Arabidopsis thaliana]
  misc_feature (147)..(501): Homolog of NCBI NO: 38175489 NR Description: putative myrosinase precursor
  misc_feature (189)..(501): Homolog of NCBI NO: 18266049 NR Description: myrosinase precursor [Brassica oleracea]
  misc_feature (1)..(308): Homolog of NCBI NO: 15220866 NR Description: myrosinase precursor, putative; protein id:
  misc_feature (1)..(308): Homolog of NCBI NO: 25372816 NR Description: F23A5.27 [imported] - Arabidopsis thaliana
  misc_feature (122)..(501): Homolog of NCBI NO: 25372816 NR Description: F23A5.27 [imported] - Arabidopsis thaliana
  misc_feature (122)..(501): Homolog of NCBI NO: 15220866 NR Description: myrosinase precursor, putative; protein id:
  misc_feature (1)..(501): Homolog of NCBI NO: 30684673 NR Description: expressed protein [Arabidopsis thaliana]
  misc_feature (1)..(501): Homolog of NCBI NO: 18394314 NR Description: expressed protein
  misc_feature (1)..(501): Homolog of NCBI NO: 21618002 NR Description: unknown [Arabidopsis thaliana]
MFDLRRGQTEGQELEKILFFYPADLDFSTQLSVIGLSEGLITFTRLFSPEAACEVIEAERHSHVFYEAEPDIWMVMVVEKNKETGAIWRIDALRRVLKEVHSLFVMFHGSIRALIEKEPTGGLTRSLLYPFITDYLSTFQIWSLSEDCCCEFFVGKKLQLPTFRETLRERGTVQMLTLARDTAVEVQSLVQVLDSCAGSLRCHSMILFQDLLVSTTLSADDTVDLFTFAVMRLTSKAFSSDTSSWSYLRKGPGSSEISSRSNLAPVGSIDSLHSRNGNNMHHVIRPLQNDKWTKGKDGFLITDIWGLETGGSPDSAIPTIWLQQTQERMYLLAYQHKSLTLLLLMPTNAIVNGDLSISAVKQQVIEDASLRILKIEENISRGWGGENAYHIKGYRYLVVDNDTKVSRSSPSGKVTTLAKESLLALNKLREEVDSEKSRAKGQEKDMEICIRAKNNVWVIARVTRGKELYMALEKGSDTLLDTTDAVGRFSNRYCSGAFLMD

SEQ ID NO: 38046 - DNA, 1646 bp, Arabidopsis thaliana
  misc_feature (1)..(1646): Ceres Seq. ID no. 13574937
  misc_feature: MA Experiment ID: 20000265 Result: Up-regulated in Transcription
  misc_feature: MA Experiment 20000265 PARAMETER Experiment Name: At_Open_Flower_P Parameter: Age (day) Value: 21
  misc_feature: MA Experiment 20000265 PARAMETER Experiment Name: At_Open_Flower_P Parameter: Plant Line Value: WS
  misc_feature: MA Experiment 20000265 PARAMETER Experiment Name: At_Open_Flower_P Parameter: Tissue Value: Closed Flower vs. Whole Plant
  misc_feature: MA Experiment ID: 20000495 Result: Up-regulated in Transcription
  misc_feature: MA Experiment 20000495 PARAMETER Experiment Name: At_Guard_Cells_P Parameter: Harvest Date Value: 8/2/2002
  misc_feature: MA Experiment 20000495 PARAMETER Experiment Name: At_Guard_Cells_P Parameter: Organism Value: A. thaliana
  misc_feature: MA Experiment 20000495 PARAMETER Experiment Name: At_Guard_Cells_P Parameter: Tissue Value: Guard Cells vs. Leaves
  misc_feature: MA Experiment ID: 20000496 Result: Up-regulated in Transcription
  misc_feature: MA Experiment 20000496 PARAMETER Experiment Name: At_Guard_Cells_P Parameter: Harvest Date Value: 7/19/2002
  misc_feature: MA Experiment 20000496 PARAMETER Experiment Name: At_Guard_Cells_P Parameter: Organism Value: Canola
  misc_feature: MA Experiment 20000496 PARAMETER Experiment Name: At_Guard_Cells_P Parameter: Tissue Value: Guard Cells vs. Leaves
  misc_feature: MA Experiment ID: 20001247 Result: Up-regulated in Transcription
  misc_feature: MA Experiment 20001247 PARAMETER Experiment Name: At_Far-red-induction_P Parameter: Age (day) Value: 7
  misc_feature: MA Experiment 20001247 PARAMETER Experiment Name: At_Far-red-induction_P Parameter: Light Value: Far-red vs. White
  misc_feature: MA Experiment 20001247 PARAMETER Experiment Name: At_Far-red-induction_P Parameter: Organism Value: A. thaliana
  misc_feature: MA Experiment 20001247 PARAMETER Experiment Name: At_Far-red-induction_P Parameter: Plant Line Value: Columbia
  misc_feature: MA Experiment 20001247 PARAMETER Experiment Name: At_Far-red-induction_P Parameter: Timepoint (hr) Value: 1
  misc_feature: MA Experiment 20001247 PARAMETER Experiment Name: At_Far-red-induction_P Parameter: Tissue Value: Whole Plant
aacaatctactactactattatattttcttacacattttgcatcactctttttcaggatttttggttctcgagaaaaaagtgaagatttttgagattctctttcgatggattacgaacgaatcggaaagacccaggttactagtagcggcggcggattttctccggggaagttaaggagtatgcttcttctaggtgttgatagaaagaagaatgaagaagaagaatcaactcctacaatgagatctgggtctaatcaaattgatgaccctagggtttatgttgctagtggattagatgattgcaaagatgttgatgttgtgagtgagattactgattgttctacttcagggatagctagatcgattagtttgggtcttcaagagtattctgattatgataatgtgaatgagatcaagagtgtttctgcatcatctgtctttgagtttcaaaagactgagaaggaaaaagttaatcaaagaatgcctattagatcattctctaaaccagctccatctaaatgggatgatgctcagaaatggattgctagtcctacggctaaccgaccgaagactggacaggttcaggttccgggttcgaagaaagggcctagctttggtcgtcagtcttctatgaagattgttgaagttgctgaacatagagtggttgaagagcctgatacaaagagaatagatgtaagccaagtgaaaaaggatatgggaaacaagtttggtagctgggaagttgattcgtacactaccgtggattcatatgtcaaaccggttcttatggttgagaactctattgtagaatcagcaactgaagttaatctcagccgtcatgactcgtcagtcgcaactgcgtttgctcaaccgccttcaacggcaaggtctgtgtcaatgagagacatgggaactgaaatgactcctatagcgagccaagaaccttctagaaacgggacaccgattagggcaacaacgccaatacgaagtcctatatcttctgaaccttcaagtccaggcagacaagcatcagcttctcctatgagtaacaaggaactgtcagagaaagagcttcaaatgaaaactaggagagagataatggtgttgggtactcaacttggtaaatttaacattgctgcttgggctagcaaggaggatgaagataaagacgcatccacatcattaaagaccaaagcttctctacaaacttctaaaagtgtttctgaagctcgtgctacagcgtgggaggaagcggaaaaagctaagcacatggctaggttcagacgcgaagagatgaagattcaagcatgggagaatcatcagaaggcgaaatctgaagccgagatgaagaaaaccgaggttaaagttgagaggattaagggacgagcacaagaccggttgatgaagaaactcgctacaatcgagcgcaaagcagaggaaaagcgagcagcggctgaagcaaagaaggatcatcaggcagctaaaacagagaaacaagctgaacaaatccgaagaacaggcaaagtaccttcattgttgttctcttgctttagcttttgttcttaaatccaatcctantgtgaatgtgatgttgttaattctcaagaacacatctttctatcatcatttgtataataaaagctttg

SEQ ID NO: 38047 - protein, 486 aa, Arabidopsis thaliana
  peptide (1)..(486): Ceres Seq. ID no. 13574938
  misc_feature (368)..(479): Pfam Name: Remorin, C-terminal region Pfam Description: Remorin, C-terminal region
  misc_feature (254)..(471): Homolog of NCBI NO: 23928441 NR Description: hypothetical protein [Zea mays]
  misc_feature (275)..(482): Homolog of NCBI NO: 15233068 NR Description: DNA-binding protein -related [Arabidopsis
  misc_feature (263)..(481): Homolog of NCBI NO: 15220963 NR Description: hypothetical protein [Arabidopsis thaliana]
  misc_feature (355)..(486): Homolog of NCBI NO: 28393368 NR Description: unknown protein [Arabidopsis thaliana]
  misc_feature (355)..(486): Homolog of NCBI NO: 21536537 NR Description: unknown [Arabidopsis thaliana]
  misc_feature (355)..(486): Homolog of NCBI NO: 18408804 NR Description: expressed protein [Arabidopsis thaliana]
  misc_feature (226)..(485): Homolog of NCBI NO: 38344336 NR Description: OSJNBa0058K23.18 [Oryza sativa (japonica
  misc_feature (185)..(485): Homolog of NCBI NO: 15220725 NR Description: expressed protein [Arabidopsis thaliana]
  misc_feature (228)..(485): Homolog of NCBI NO: 34902218 NR Description: Unknown protein [Oryza sativa (japonica
  misc_feature (1)..(486): Homolog of NCBI NO: 18395321 NR Description: expressed protein [Arabidopsis thaliana]
MDYERIGKTQVTSSGGGFSPGKLRSMLLLGVDRKKNEEEESTPTMRSGSNQIDDPRVYVASGLDDCKDVDVVSEITDCSTSGIARSISLGLQEYSDYDNVNEIKSVSASSVFEFQKTEKEKVNQRMPIRSFSKPAPSKWDDAQKWIASPTANRPKTGQVQVPGSKKGPSFGRQSSMKIVEVAEHRVVEEPDTKRIDVSQVKKDMGNKFGSWEVDSYTTVDSYVKPVLMVENSIVESATEVNLSRHDSSVATAFAQPPSTARSVSMRDMGTEMTPIASQEPSRNGTPIRATTPIRSPISSEPSSPGRQASASPMSNKELSEKELQMKTRREIMVLGTQLGKFNIAAWASKEDEDKDASTSLKTKASLQTSKSVSEARATAWEEAEKAKHMARFRREEMKIQAWENHQKAKSEAEMKKTEVKVERIKGRAQDRLMKKLATIERKAEEKRAAAEAKKDHQAAKTEKQAEQIRRTGKVPSLLFSCFSFCS

SEQ ID NO: 38048 - protein, 461 aa, Arabidopsis thaliana
  peptide (1)..(461): Ceres Seq. ID no. 13574939
  misc_feature (343)..(454): Pfam Name: Remorin, C-terminal region Pfam Description: Remorin, C-terminal region
  misc_feature (229)..(446): Homolog of NCBI NO: 23928441 NR Description: hypothetical protein [Zea mays]
  misc_feature (250)..(457): Homolog of NCBI NO: 15233068 NR Description: DNA-binding protein -related [Arabidopsis
  misc_feature (238)..(456): Homolog of NCBI NO: 15220963 NR Description: hypothetical protein [Arabidopsis thaliana]
  misc_feature (330)..(461): Homolog of NCBI NO: 21536537 NR Description: unknown [Arabidopsis thaliana]
  misc_feature (330)..(461): Homolog of NCBI NO: 28393368 NR Description: unknown protein [Arabidopsis thaliana]
  misc_feature (330)..(461): Homolog of NCBI NO: 18408804 NR Description: expressed protein [Arabidopsis thaliana]
  misc_feature (201)..(460): Homolog of NCBI NO: 38344336 NR Description: OSJNBa0058K23.18 [Oryza sativa (japonica
  misc_feature (160)..(460): Homolog of NCBI NO: 15220725 NR Description: expressed protein [Arabidopsis thaliana]
  misc_feature (203)..(460): Homolog of NCBI NO: 34902218 NR Description: Unknown protein [Oryza sativa (japonica
  misc_feature (1)..(461): Homolog of NCBI NO: 18395321 NR Description: expressed protein [Arabidopsis thaliana]
MLLLGVDRKKNEEEESTPTMRSGSNQIDDPRVYVASGLDDCKDVDVVSEITDCSTSGIARSISLGLQEYSDYDNVNEIKSVSASSVFEFQKTEKEKVNQRMPIRSFSKPAPSKWDDAQKWIASPTANRPKTGQVQVPGSKKGPSFGRQSSMKIVEVAEHRVVEEPDTKRIDVSQVKKDMGNKFGSWEVDSYTTVDSYVKPVLMVENSIVESATEVNLSRHDSSVATAFAQPPSTARSVSMRDMGTEMTPIASQEPSRNGTPIRATTPIRSPISSEPSSPGRQASASPMSNKELSEKELQMKTRREIMVLGTQLGKFNIAAWASKEDEDKDASTSLKTKASLQTSKSVSEARATAWEEAEKAKHMARFRREEMKIQAWENHQKAKSEAEMKKTEVKVERIKGRAQDRLMKKLATIERKAEEKRAAAEAKKDHQAAKTEKQAEQIRRTGKVPSLLFSCFSFCS

SEQ ID NO: 38049 - protein, 442 aa, Arabidopsis thaliana
  peptide (1)..(442): Ceres Seq. ID no. 13574940
  misc_feature (324)..(435): Pfam Name: Remorin, C-terminal region Pfam Description: Remorin, C-terminal region
  misc_feature (210)..(427): Homolog of NCBI NO: 23928441 NR Description: hypothetical protein [Zea mays]
  misc_feature (231)..(438): Homolog of NCBI NO: 15233068 NR Description: DNA-binding protein -related [Arabidopsis
  misc_feature (219)..(437): Homolog of NCBI NO: 15220963 NR Description: hypothetical protein [Arabidopsis thaliana]
  misc_feature (311)..(442): Homolog of NCBI NO: 21536537 NR Description: unknown [Arabidopsis thaliana]
  misc_feature (311)..(442): Homolog of NCBI NO: 28393368 NR Description: unknown protein [Arabidopsis thaliana]
  misc_feature (311)..(442): Homolog of NCBI NO: 18408804 NR Description: expressed protein [Arabidopsis thaliana]
  misc_feature (182)..(441): Homolog of NCBI NO: 38344336 NR Description: OSJNBa0058K23.18 [Oryza sativa (japonica
  misc_feature (141)..(441): Homolog of NCBI NO: 15220725 NR Description: expressed protein [Arabidopsis thaliana]
  misc_feature (184)..(441): Homolog of NCBI NO: 34902218 NR Description: Unknown protein [Oryza sativa (japonica
  misc_feature (1)..(442): Homolog of NCBI NO: 18395321 NR Description: expressed protein [Arabidopsis thaliana]
MRSGSNQIDDPRVYVASGLDDCKDVDVVSEITDCSTSGIARSISLGLQEYSDYDNVNEIKSVSASSVFEFQKTEKEKVNQRMPIRSFSKPAPSKWDDAQKWIASPTANRPKTGQVQVPGSKKGPSFGRQSSMKIVEVAEHRVVEEPDTKRIDVSQVKKDMGNKFGSWEVDSYTTVDSYVKPVLMVENSIVESATEVNLSRHDSSVATAFAQPPSTARSVSMRDMGTEMTPIASQEPSRNGTPIRATTPIRSPISSEPSSPGRQASASPMSNKELSEKELQMKTRREIMVLGTQLGKFNIAAWASKEDEDKDASTSLKTKASLQTSKSVSEARATAWEEAEKAKHMARFRREEMKIQAWENHQKAKSEAEMKKTEVKVERIKGRAQDRLMKKLATIERKAEEKRAAAEAKKDHQAAKTEKQAEQIRRTGKVPSLLFSCFSFCS

SEQ ID NO: 38050 - DNA, 591 bp, Arabidopsis thaliana
  misc_feature (1)..(591): Ceres Seq. ID no. 12466015
  misc_feature: MA Experiment ID: 20001557 Result: Up-regulated in Transcription
  misc_feature: MA Experiment 20001557 PARAMETER Experiment Name: At_Drought_Soil_Dry_P Parameter: Age (day) Value: 27
  misc_feature: MA Experiment 20001557 PARAMETER Experiment Name: At_Drought_Soil_Dry_P Parameter: Organism Value: A. thaliana
  misc_feature: MA Experiment 20001557 PARAMETER Experiment Name: At_Drought_Soil_Dry_P Parameter: Plant Line Value: WS
  misc_feature: MA Experiment 20001557 PARAMETER Experiment Name: At_Drought_Soil_Dry_P Parameter: Post Timepoint (hr) Value: 3
  misc_feature: MA Experiment 20001557 PARAMETER Experiment Name: At_Drought_Soil_Dry_P Parameter: Post-Treatment Value: Re-Water vs. No Drought
  misc_feature: MA Experiment 20001557 PARAMETER Experiment Name: At_Drought_Soil_Dry_P Parameter: Timepoint (day) Value: 13
  misc_feature: MA Experiment 20001557 PARAMETER Experiment Name: At_Drought_Soil_Dry_P Parameter: Treatment Value: Drought vs. No Drought
  misc_feature: MA Experiment ID: 20001558 Result: Up-regulated in Transcription
  misc_feature: MA Experiment 20001558 PARAMETER Experiment Name: At_Drought_Soil_Dry_P Parameter: Age (day) Value: 27
  misc_feature: MA Experiment 20001558 PARAMETER Experiment Name: At_Drought_Soil_Dry_P Parameter: Organism Value: A. thaliana
  misc_feature: MA Experiment 20001558 PARAMETER Experiment Name: At_Drought_Soil_Dry_P Parameter: Plant Line Value: WS
  misc_feature: MA Experiment 20001558 PARAMETER Experiment Name: At_Drought_Soil_Dry_P Parameter: Post Timepoint (hr) Value: 6
  misc_feature: MA Experiment 20001558 PARAMETER Experiment Name: At_Drought_Soil_Dry_P Parameter: Post-Treatment Value: Re-Water vs. No Drought
  misc_feature: MA Experiment 20001558 PARAMETER Experiment Name: At_Drought_Soil_Dry_P Parameter: Timepoint (day) Value: 13
  misc_feature: MA Experiment 20001558 PARAMETER Experiment Name: At_Drought_Soil_Dry_P Parameter: Treatment Value: Drought vs. No Drought
caaaatgtccatacaaggatctagctgcaccaaccgatgtcttcattgacaagccacccacaggggaatcatctaccatgtccgctgcacctggaactggcaaggccgcgtatgtcccgcctagcatgagagcaggtgcagacagaagcgctgtgggttcagacatgaggaggaggaacgatgagaactctgtgcgtgtaaccaatctgtccgaggatacccgtgaacctgacttgatggagctgttccatccgtttggagctgtcacacgtgtctatgtggccattgatcagaaaactgaagtgagcagaggatttggtttcgtcaatttcgtgagcagagaagacgctcaaagagcaatcaacaaattgaatggttatggttatgataacctcatcctcagggttgaatgggcaactccaagaccaacctagaaagaaatgtctgatgttgagaccttaaaactcttctcattctcgtctttcttgttatggatttttgtttatcgaccagtttgtttgttggtttggtttctgtatgaatagatgagaatttgttcaatttctctttaatacataaggcatgcttttt

SEQ ID NO: 38051 - protein, 143 aa, Arabidopsis thaliana
  peptide (1)..(143): Ceres Seq. ID no. 12466016
  misc_feature (64)..(135): Pfam Name: RNA recognition motif. (a.k.a. RRM, RBD, or RNP domain) Pfam Description: RNA recognition motif. (a.k.a. RRM, RBD, or RNP
  misc_feature (1)..(141): Homolog of NCBI NO: 19112519 NR Description: eukaryotic translation initiation factor 3
  misc_feature (1)..(141): Homolog of NCBI NO: 2951777 NR Description: translation initiation factor 3
  misc_feature (1)..(140): Homolog of NCBI NO: 29124629 NR Description: Similar to eukaryotic translation initiation
  misc_feature (1)..(140): Homolog of NCBI NO: 4503517 NR Description: eukaryotic translation initiation factor 3,
  misc_feature (1)..(140): Homolog of NCBI NO: 30583983 NR Description: Homo sapiens eukaryotic translation initiation
  misc_feature (1)..(140): Homolog of NCBI NO: 23503064 NR Description: Eukaryotic translation initiation factor 3
  misc_feature (1)..(141): Homolog of NCBI NO: 30681225 NR Description: eukaryotic translation initiation factor 3,
  misc_feature (1)..(141): Homolog of NCBI NO: 10177573 NR Description: eukaryotic translation initiation factor 3
  misc_feature (1)..(143): Homolog of NCBI NO: 15229743 NR Description: eukaryotic translation initiation factor 3
  misc_feature (1)..(143): Homolog of NCBI NO: 12407751 NR Description: initiation factor 3g [Arabidopsis thaliana]
KCPYKDLAAPTDVFIDKPPTGESSTMSAAPGTGKAAYVPPSMRAGADRSAVGSDMRRRNDENSVRVTNLSEDTREPDLMELFHPFGAVTRVYVAIDQKTEVSRGFGFVNFVSREDAQRAINKLNGYGYDNLILRVEWATPRPT

SEQ ID NO: 38052 - protein, 118 aa, Arabidopsis thaliana
  peptide (1)..(118): Ceres Seq. ID no. 12466017
  misc_feature (39)..(110): Pfam Name: RNA recognition motif. (a.k.a. RRM, RBD, or RNP domain) Pfam Description: RNA recognition motif. (a.k.a. RRM, RBD, or RNP
  misc_feature (1)..(116): Homolog of NCBI NO: 19112519 NR Description: eukaryotic translation initiation factor 3
  misc_feature (1)..(116): Homolog of NCBI NO: 2951777 NR Description: translation initiation factor 3
  misc_feature (1)..(115): Homolog of NCBI NO: 29124629 NR Description: Similar to eukaryotic translation initiation
  misc_feature (1)..(115): Homolog of NCBI NO: 4503517 NR Description: eukaryotic translation initiation factor 3,
  misc_feature (1)..(115): Homolog of NCBI NO: 30583983 NR Description: Homo sapiens eukaryotic translation initiation
  misc_feature (1)..(115): Homolog of NCBI NO: 23503064 NR Description: Eukaryotic translation initiation factor 3
  misc_feature (1)..(116): Homolog of NCBI NO: 30681225 NR Description: eukaryotic translation initiation factor 3,
  misc_feature (1)..(116): Homolog of NCBI NO: 10177573 NR Description: eukaryotic translation initiation factor 3
  misc_feature (1)..(118): Homolog of NCBI NO: 15229743 NR Description: eukaryotic translation initiation factor 3
  misc_feature (1)..(118): Homolog of NCBI NO: 12407751 NR Description: initiation factor 3g [Arabidopsis thaliana]
MSAAPGTGKAAYVPPSMRAGADRSAVGSDMRRRNDENSVRVTNLSEDTREPDLMELFHPFGAVTRVYVAIDQKTEVSRGFGFVNFVSREDAQRAINKLNGYGYDNLILRVEWATPRPT

SEQ ID NO: 38053 - protein, 102 aa, Arabidopsis thaliana
  peptide (1)..(102): Ceres Seq. ID no. 12466018
  misc_feature (23)..(94): Pfam Name: RNA recognition motif. (a.k.a. RRM, RBD, or RNP domain) Pfam Description: RNA recognition motif. (a.k.a. RRM, RBD, or RNP
  misc_feature (1)..(100): Homolog of NCBI NO: 19112519 NR Description: eukaryotic translation initiation factor 3
  misc_feature (1)..(100): Homolog of NCBI NO: 2951777 NR Description: translation initiation factor 3
  misc_feature (1)..(99): Homolog of NCBI NO: 29124629 NR Description: Similar to eukaryotic translation initiation
  misc_feature (1)..(99): Homolog of NCBI NO: 4503517 NR Description: eukaryotic translation initiation factor 3,
  misc_feature (1)..(99): Homolog of NCBI NO: 30583983 NR Description: Homo sapiens eukaryotic translation initiation
  misc_feature (1)..(99): Homolog of NCBI NO: 23503064 NR Description: Eukaryotic translation initiation factor 3
  misc_feature (1)..(100): Homolog of NCBI NO: 30681225 NR Description: eukaryotic translation initiation factor 3,
  misc_feature (1)..(100): Homolog of NCBI NO: 10177573 NR Description: eukaryotic translation initiation factor 3
  misc_feature (1)..(102): Homolog of NCBI NO: 15229743 NR Description: eukaryotic translation initiation factor 3
  misc_feature (1)..(102): Homolog of NCBI NO: 12407751 NR Description: initiation factor 3g [Arabidopsis thaliana]
MRAGADRSAVGSDMRRRNDENSVRVTNLSEDTREPDLMELFHPFGAVTRVYVAIDQKTEVSRGFGFVNFVSREDAQRAINKLNGYGYDNLILRVEWATPRPT

SEQ ID NO: 38054 - DNA, 1097 bp, Arabidopsis thaliana
  misc_feature (1)..(1097): Ceres Seq. ID no. 12337666
  misc_feature: MA Experiment ID: 108434 Result: Down-regulated in Transcription
  misc_feature: MA Experiment 108434 PARAMETER Experiment Name: At_Root_Tips_cDNA_P Parameter: Tissue Value: Root Tips
  misc_feature: MA Experiment ID: 20000169 Result: Up-regulated in Transcription
  misc_feature: MA Experiment 20000169 PARAMETER Experiment Name: At_100uM_ABA_P Parameter: Age (day) Value: 14
  misc_feature: MA Experiment 20000169 PARAMETER Experiment Name: At_100uM_ABA_P Parameter: Organism Value: A. thaliana
  misc_feature: MA Experiment 20000169 PARAMETER Experiment Name: At_100uM_ABA_P Parameter: Plant Line Value: WS
  misc_feature: MA Experiment 20000169 PARAMETER Experiment Name: At_100uM_ABA_P Parameter: Timepoint (hr) Value: 6
  misc_feature: MA Experiment 20000169 PARAMETER Experiment Name: At_100uM_ABA_P Parameter: Tissue Value: Aerial
  misc_feature: MA Experiment 20000169 PARAMETER Experiment Name: At_100uM_ABA_P Parameter: Treatment Value: 100uM ABA vs. No Treatment
  misc_feature: MA Experiment ID: 20000180 Result: Up-regulated in Transcription
  misc_feature: MA Experiment 20000180 PARAMETER Experiment Name: At_Germinating_Seeds_P Parameter: Age (hr) Value: 24 vs. 0
  misc_feature: MA Experiment 20000180 PARAMETER Experiment Name: At_Germinating_Seeds_P Parameter: Tissue Value: Germinating Seeds
  misc_feature: MA Experiment ID: 20000227 Result: Down-regulated in Transcription
  misc_feature: MA Experiment 20000227 PARAMETER Experiment Name: At_Root-Tips-vs-Tops_P Parameter: Tissue Value: Root Tips vs. Root Tops
  misc_feature: MA Experiment ID: 20000234 Result: Down-regulated in Transcription
  misc_feature: MA Experiment 20000234 PARAMETER Experiment Name: At_Siliques_P Parameter: Age (day) Value: 21
  misc_feature: MA Experiment 20000234 PARAMETER Experiment Name: At_Siliques_P Parameter: Organism Value: A. thaliana
  misc_feature: MA Experiment 20000234 PARAMETER Experiment Name: At_Siliques_P Parameter: Plant Line Value: WS
  misc_feature: MA Experiment 20000234 PARAMETER Experiment Name: At_Siliques_P Parameter: Tissue Value: Less Than 5mm Siliques vs. Whole Plant
  misc_feature: MA Experiment ID: 20000265 Result: Down-regulated in Transcription
  misc_feature: MA Experiment 20000265 PARAMETER Experiment Name: At_Open_Flower_P Parameter: Age (day) Value: 21
  misc_feature: MA Experiment 20000265 PARAMETER Experiment Name: At_Open_Flower_P Parameter: Plant Line Value: WS
  misc_feature: MA Experiment 20000265 PARAMETER Experiment Name: At_Open_Flower_P Parameter: Tissue Value: Closed Flower vs. Whole Plant
  misc_feature: MA Experiment ID: 20000286 Result: Down-regulated in Transcription
  misc_feature: MA Experiment 20000286 PARAMETER Experiment Name: At_Open_Flower_P Parameter: Age (day) Value: 21
  misc_feature: MA Experiment 20000286 PARAMETER Experiment Name: At_Open_Flower_P Parameter: Plant Line Value: WS
  misc_feature: MA Experiment 20000286 PARAMETER Experiment Name: At_Open_Flower_P Parameter: Tissue Value: Half Open vs. Whole Plant
  misc_feature: MA Experiment ID: 20001450 Result: Up-regulated in Transcription
  misc_feature: MA Experiment 20001450 PARAMETER Experiment Name: At_Far-red-induction_P Parameter: Age (day) Value: 7
  misc_feature: MA Experiment 20001450 PARAMETER Experiment Name: At_Far-red-induction_P Parameter: Light Value: Far-red vs. White
  misc_feature: MA Experiment 20001450 PARAMETER Experiment Name: At_Far-red-induction_P Parameter: Organism Value: A. thaliana
  misc_feature: MA Experiment 20001450 PARAMETER Experiment Name: At_Far-red-induction_P Parameter: Plant Line Value: Columbia
  misc_feature: MA Experiment 20001450 PARAMETER Experiment Name: At_Far-red-induction_P Parameter: Timepoint (hr) Value: 8
  misc_feature: MA Experiment 20001450 PARAMETER Experiment Name: At_Far-red-induction_P Parameter: Tissue Value: Whole Plant
  misc_feature: MA Experiment ID: 20001451 Result: Up-regulated in Transcription
  misc_feature: MA Experiment 20001451 PARAMETER Experiment Name: At_Far-red-induction_P Parameter: Age (day) Value: 7
  misc_feature: MA Experiment 20001451 PARAMETER Experiment Name: At_Far-red-induction_P Parameter: Light Value: Far-red vs. White
  misc_feature: MA Experiment 20001451 PARAMETER Experiment Name: At_Far-red-induction_P Parameter: Organism Value: A. thaliana
  misc_feature: MA Experiment 20001451 PARAMETER Experiment Name: At_Far-red-induction_P Parameter: Plant Line Value: Columbia
  misc_feature: MA Experiment 20001451 PARAMETER Experiment Name: At_Far-red-induction_P Parameter: Timepoint (hr) Value: 24
  misc_feature: MA Experiment 20001451 PARAMETER Experiment Name: At_Far-red-induction_P Parameter: Tissue Value: Whole Plant
  misc_feature: MA Experiment ID: 20001557 Result: Down-regulated in Transcription
  misc_feature: MA Experiment 20001557 PARAMETER Experiment Name: At_Drought_Soil_Dry_P Parameter: Age (day) Value: 27
  misc_feature: MA Experiment 20001557 PARAMETER Experiment Name: At_Drought_Soil_Dry_P Parameter: Organism Value: A. thaliana
  misc_feature: MA Experiment 20001557 PARAMETER Experiment Name: At_Drought_Soil_Dry_P Parameter: Plant Line Value: WS
  misc_feature: MA Experiment 20001557 PARAMETER Experiment Name: At_Drought_Soil_Dry_P Parameter: Post Timepoint (hr) Value: 3
  misc_feature: MA Experiment 20001557 PARAMETER Experiment Name: At_Drought_Soil_Dry_P Parameter: Post-Treatment Value: Re-Water vs. No Drought
  misc_feature: MA Experiment 20001557 PARAMETER Experiment Name: At_Drought_Soil_Dry_P Parameter: Timepoint (day) Value: 13
  misc_feature: MA Experiment 20001557 PARAMETER Experiment Name: At_Drought_Soil_Dry_P Parameter: Treatment Value: Drought vs. No Drought
  misc_feature: MA Experiment ID: 20001558 Result: Down-regulated in Transcription
  misc_feature: MA Experiment 20001558 PARAMETER Experiment Name: At_Drought_Soil_Dry_P Parameter: Age (day) Value: 27
  misc_feature: MA Experiment 20001558 PARAMETER Experiment Name: At_Drought_Soil_Dry_P Parameter: Organism Value: A. thaliana
  misc_feature: MA Experiment 20001558 PARAMETER Experiment Name: At_Drought_Soil_Dry_P Parameter: Plant Line Value: WS
  misc_feature: MA Experiment 20001558 PARAMETER Experiment Name: At_Drought_Soil_Dry_P Parameter: Post Timepoint (hr) Value: 6
  misc_feature: MA Experiment 20001558 PARAMETER Experiment Name: At_Drought_Soil_Dry_P Parameter: Post-Treatment Value: Re-Water vs. No Drought
  misc_feature: MA Experiment 20001558 PARAMETER Experiment Name: At_Drought_Soil_Dry_P Parameter: Timepoint (day) Value: 13
  misc_feature: MA Experiment 20001558 PARAMETER Experiment Name: At_Drought_Soil_Dry_P Parameter: Treatment Value: Drought vs. No Drought
aattgcatattcgaagataatagccacatgtatgagatgacgtggttggataatagcttgtagtgttaaaatacctcatttgacctttcgacattcatacgcaatcgactcattccacggatctgcttactcattgattctcgataaattgttcttctcccacagacaccagattctaccaatcatttgctcgaaaaggaatcatgggtcttaaagctggaacctttgtgcttctcttgttgggtttgatcttggtctctgacgctagatctttcgttgactccaccatctcagagaaagtttccaacaaggaagacgtttgcactctgtgtgaggaatatgttactgatgctctcagctaccttgagaaaaatgtcacacaagcggagatcatcgaagatcttcatgatcggtgttcccaattgcgcggatattcgcagcagtgcataagtttggtggattactatgttcctcttttcttcttacaactagagtcgtttcaacctcattatttctgcaagaggatgaatctttgtggcaaagttgtagctcttgtcgaagaagctcgtcaggacagttgcggtgtatgccacaggactgtttcagagattctcatcaaactacaagatcctgacacacagctggatatcgttgaactgcttatcaagggatgcaaatcgctcaagaactacgagaagaagtgcaagacgttggtgtttgaatatggacctctgatactcgtaaatgcagaggaattcctagtgaaaaacgacgtctgcacactcttgcgcgcatgcccccctgagaaatcggttctaaggcagccggagttggctgattcttgaatgttcaaaacgttgctataacaggattttaattccttatgggttatacaagtaggaacacgagctgctccatgagaatggttgcagactttgtgtagtgtctatatgtatggattcaaacacatcctccaaaatgtccctttgcctttgtgtaaataatgatcgctacaacaattgtacctctactatgatatcactgtattctatttgaggtttgttacattttatatgaatgatattagtgtagtttgc

SEQ ID NO: 38055 - protein, 213 aa, Arabidopsis thaliana
  peptide (1)..(213): Ceres Seq. ID no. 12337667
  misc_feature (37)..(75): Pfam Name: Saposin-like type B, region 1 Pfam Description: Saposin-like type B, region 1
  misc_feature (39)..(198): Homolog of NCBI NO: 34896130 NR Description: P0701D05.19 [Oryza sativa (japonica
  misc_feature (42)..(204): Homolog of NCBI NO: 6942199 NR Description: putative protein [Vitis riparia]
  misc_feature (6)..(199): Homolog of NCBI NO: 15241065 NR Description: putative protein
  misc_feature (1)..(213): Homolog of NCBI NO: 15231028 NR Description: putative protein
MGLKAGTFVLLLLGLILVSDARSFVDSTISEKVSNKEDVCTLCEEYVTDALSYLEKNVTQAEIIEDLHDRCSQLRGYSQQCISLVDYYVPLFFLQLESFQPHYFCKRMNLCGKVVALVEEARQDSCGVCHRTVSEILIKLQDPDTQLDIVELLIKGCKSLKNYEKKCKTLVFEYGPLILVNAEEFLVKNDVCTLLRACPPEKSVLRQPELADS

SEQ ID NO: 38056 - protein, 106 aa, Arabidopsis thaliana
  peptide (1)..(106): Ceres Seq. ID no. 12337668
  misc_feature (1)..(91): Homolog of NCBI NO: 34896130 NR Description: P0701D05.19 [Oryza sativa (japonica
  misc_feature (1)..(97): Homolog of NCBI NO: 6942199 NR Description: putative protein [Vitis riparia]
  misc_feature (1)..(92): Homolog of NCBI NO: 15241065 NR Description: putative protein
  misc_feature (1)..(106): Homolog of NCBI NO: 15231028 NR Description: putative protein
MNLCGKVVALVEEARQDSCGVCHRTVSEILIKLQDPDTQLDIVELLIKGCKSLKNYEKKCKTLVFEYGPLILVNAEEFLVKNDVCTLLRACPPEKSVLRQPELADS

SEQ ID NO: 38057 - DNA, 1049 bp, Arabidopsis thaliana
  misc_feature (1)..(1049): Ceres Seq. ID no. 13491469
  misc_feature: MA Experiment ID: 20000794 Result: Down-regulated in Transcription
  misc_feature: MA Experiment 20000794 PARAMETER Experiment Name: At_Petals_P Parameter: Age (day) Value: 23-25 days
  misc_feature: MA Experiment 20000794 PARAMETER Experiment Name: At_Petals_P Parameter: Plant Line Value: WS
  misc_feature: MA Experiment 20000794 PARAMETER Experiment Name: At_Petals_P Parameter: Tissue Value: Petals vs. Whole plant
  misc_feature: MA Experiment ID: 20001560 Result: Up-regulated in Transcription
  misc_feature: MA Experiment 20001560 PARAMETER Experiment Name: At_Drought_Soil_Dry_P Parameter: Age (day) Value: 28
  misc_feature: MA Experiment 20001560 PARAMETER Experiment Name: At_Drought_Soil_Dry_P Parameter: Organism Value: A. thaliana
  misc_feature: MA Experiment 20001560 PARAMETER Experiment Name: At_Drought_Soil_Dry_P Parameter: Plant Line Value: WS
  misc_feature: MA Experiment 20001560 PARAMETER Experiment Name: At_Drought_Soil_Dry_P Parameter: Post Timepoint (hr) Value: None
  misc_feature: MA Experiment 20001560 PARAMETER Experiment Name: At_Drought_Soil_Dry_P Parameter: Post-Treatment Value: None
  misc_feature: MA Experiment 20001560 PARAMETER Experiment Name: At_Drought_Soil_Dry_P Parameter: Timepoint (day) Value: 14
  misc_feature: MA Experiment 20001560 PARAMETER Experiment Name: At_Drought_Soil_Dry_P Parameter: Treatment Value: Drought vs. No Drought
  misc_feature: MA Experiment ID: 20001911 Result: Down-regulated in Transcription
  misc_feature: MA Experiment 20001911 PARAMETER Experiment Name: At_Drought_Reproduction_P Parameter: Age (day) Value: 40
  misc_feature: MA Experiment 20001911 PARAMETER Experiment Name: At_Drought_Reproduction_P Parameter: Organism Value: A. thaliana
  misc_feature: MA Experiment 20001911 PARAMETER Experiment Name: At_Drought_Reproduction_P Parameter: Plant Line Value: WS
  misc_feature: MA Experiment 20001911 PARAMETER Experiment Name: At_Drought_Reproduction_P Parameter: Timepoint (day) Value: 10
  misc_feature: MA Experiment 20001911 PARAMETER Experiment Name: At_Drought_Reproduction_P Parameter: Tissue Value: Flowers
  misc_feature: MA Experiment 20001911 PARAMETER Experiment Name: At_Drought_Reproduction_P Parameter: Treatment Value: Drought vs. No Drought
gttttcttctccgtttctcgctcatcgcttactgaaaccagaaacaagtttagggtttttgcggaggtttcaaagttaacaatggcggaagagcacaagcacgaggaatcgatcatggagaagatctctgagaagatccatggtcacgatgactcttcttcttcttcttccgattcggatgacgataagaactctgcgtctctcaaaaccaagatttatcgtcttttcggaagagaacagcctcttcacaagcttttcggtggcggaaaacctgccgacattttcctgtggaggaacaagaaggtatcaggaggagtattgggtgctgcaactgtttcctggatcttattcgagttacttgagtacaatcttctcacactcttcggccacatttcaattcttgctctcgcagtattgttcttgtggtctagtgctagtaccttcattcacaagtcacctcttcatatccctgaagttcacatccccgaggatgttgttcttcagcttgcttctggattaaggattgaaatcaatcgtggatttactgttcttagggacattgcatcaggaagagatcttaagaagtttctgttggtgattgctggtttatgggttttgtccaaagttggtagctcctgcaacttcttgaccttaatctacatcgcaactgtacttctcttcacgattcccgtgctttacgagaagtatgaagataaagtagatgactttggtgaaaaggcgatgagggagatcaagaagcaatacgtggagttcgacgtgaaggttttgagtaaggtgatgagcaaaattcctaaaggagcctttgcctttatcaagaagaaagattagagagtgtgtaagtttctctcatcatcattatccgagattattcaagattgatatataaatctcgaagcattgtttttttggctgttggttaataaccctttattctctcaaatatctgctatatggattttattcgggttttaaccaaattttatagcaatattgaatctgattgaaatttgaattgatccttttttcgt

SEQ ID NO: 38058 - protein, 282 aa, Arabidopsis thaliana
  peptide (1)..(282): Ceres Seq. ID no. 13491470
  misc_feature (33)..(281): Homolog of NCBI NO: 34897094 NR Description: unknown protein [Oryza sativa (japonica
  misc_feature (35)..(266): Homolog of NCBI NO: 15234108 NR Description: hypothetical protein [Arabidopsis thaliana]
  misc_feature (36)..(63): Homolog of NCBI NO: 34904202 NR Description: P0492F05.25 [Oryza sativa (japonica
  misc_feature (65)..(266): Homolog of NCBI NO: 34904202 NR Description: P0492F05.25 [Oryza sativa (japonica
  misc_feature (28)..(266): Homolog of NCBI NO: 18406991 NR Description: expressed protein [Arabidopsis thaliana]
  misc_feature (29)..(282): Homolog of NCBI NO: 15236556 NR Description: expressed protein [Arabidopsis thaliana]
  misc_feature (31)..(273): Homolog of NCBI NO: 34909318 NR Description: OSJNBb0021A09.5 [Oryza sativa (japonica
  misc_feature (26)..(282): Homolog of NCBI NO: 15237093 NR Description: expressed protein [Arabidopsis thaliana]
  misc_feature (28)..(282): Homolog of NCBI NO: 15238125 NR Description: expressed protein [Arabidopsis thaliana]
  misc_feature (28)..(282): Homolog of NCBI NO: 15222616 NR Description: expressed protein [Arabidopsis thaliana]
VFFSVSRSSLTETRNKFRVFAEVSKLTMAEEHKHEESIMEKISEKIHGHDDSSSSSSDSDDDKNSASLKTKIYRLFGREQPLHKLFGGGKPADIFLWRNKKVSGGVLGAATVSWILFELLEYNLLTLFGHISILALAVLFLWSSASTFIHKSPLHIPEVHIPEDVVLQLASGLRIEINRGFTVLRDIASGRDLKKFLLVIAGLWVLSKVGSSCNFLTLIYIATVLLFTIPVLYEKYEDKVDDFGEKAMREIKKQYVEFDVKVLSKVMSKIPKGAFAFIKKKD

SEQ ID NO: 38059 - protein, 255 aa, Arabidopsis thaliana
  peptide (1)..(255): Ceres Seq. ID no. 13491471
  misc_feature (6)..(254): Homolog of NCBI NO: 34897094 NR Description: unknown protein [Oryza sativa (japonica
  misc_feature (8)..(239): Homolog of NCBI NO: 15234108 NR Description: hypothetical protein [Arabidopsis thaliana]
  misc_feature (9)..(36): Homolog of NCBI NO: 34904202 NR Description: P0492F05.25 [Oryza sativa (japonica
  misc_feature (38)..(239): Homolog of NCBI NO: 34904202 NR Description: P0492F05.25 [Oryza sativa (japonica
  misc_feature (1)..(239): Homolog of NCBI NO: 18406991 NR Description: expressed protein [Arabidopsis thaliana]
  misc_feature (2)..(255): Homolog of NCBI NO: 15236556 NR Description: expressed protein [Arabidopsis thaliana]
  misc_feature (4)..(246): Homolog of NCBI NO: 34909318 NR Description: OSJNBb0021A09.5 [Oryza sativa (japonica
  misc_feature (1)..(255): Homolog of NCBI NO: 15237093 NR Description: expressed protein [Arabidopsis thaliana]
  misc_feature (1)..(255): Homolog of NCBI NO: 15238125 NR Description: expressed protein [Arabidopsis thaliana]
  misc_feature (1)..(255): Homolog of NCBI NO: 15222616 NR Description: expressed protein [Arabidopsis thaliana]
MAEEHKHEESIMEKISEKIHGHDDSSSSSSDSDDDKNSASLKTKIYRLFGREQPLHKLFGGGKPADIFLWRNKKVSGGVLGAATVSWILFELLEYNLLTLFGHISILALAVLFLWSSASTFIHKSPLHIPEVHIPEDVVLQLASGLRIEINRGFTVLRDIASGRDLKKFLLVIAGLWVLSKVGSSCNFLTLIYIATVLLFTIPVLYEKYEDKVDDFGEKAMREIKKQYVEFDVKVLSKVMSKIPKGAFAFIKKKD

SEQ ID NO: 38060 - protein, 244 aa, Arabidopsis thaliana
  peptide (1)..(244): Ceres Seq. ID no. 13491472
  misc_feature (1)..(243): Homolog of NCBI NO: 34897094 NR Description: unknown protein [Oryza sativa (japonica
  misc_feature (1)..(228): Homolog of NCBI NO: 15234108 NR Description: hypothetical protein [Arabidopsis thaliana]
  misc_feature (1)..(25): Homolog of NCBI NO: 34904202 NR Description: P0492F05.25 [Oryza sativa (japonica
  misc_feature (27)..(228): Homolog of NCBI NO: 34904202 NR Description: P0492F05.25 [Oryza sativa (japonica
  misc_feature (1)..(228): Homolog of NCBI NO: 18406991 NR Description: expressed protein [Arabidopsis thaliana]
  misc_feature (1)..(244): Homolog of NCBI NO: 15236556 NR Description: expressed protein [Arabidopsis thaliana]
  misc_feature (1)..(235): Homolog of NCBI NO: 34909318 NR Description: OSJNBb0021A09.5 [Oryza sativa (japonica
  misc_feature (1)..(244): Homolog of NCBI NO: 15237093 NR Description: expressed protein [Arabidopsis thaliana]
  misc_feature (1)..(244): Homolog of NCBI NO: 15238125 NR Description: expressed protein [Arabidopsis thaliana]
  misc_feature (1)..(244): Homolog of NCBI NO: 15222616 NR Description: expressed protein [Arabidopsis thaliana]
MEKISEKIHGHDDSSSSSSDSDDDKNSASLKTKIYRLFGREQPLHKLFGGGKPADIFLWRNKKVSGGVLGAATVSWILFELLEYNLLTLFGHISILALAVLFLWSSASTFIHKSPLHIPEVHIPEDVVLQLASGLRIEINRGFTVLRDIASGRDLKKFLLVIAGLWVLSKVGSSCNFLTLIYIATVLLFTIPVLYEKYEDKVDDFGEKAMREIKKQYVEFDVKVLSKVMSKIPKGAFAFIKKKD

SEQ ID NO: 38061 - DNA, 1071 bp, Arabidopsis thaliana; identical to SEQ ID NO: 25085
  misc_feature (1)..(1071): Ceres Seq. ID no. 12385269
  misc_feature: MA Experiment ID: 108434 Result: Down-regulated in Transcription
  misc_feature: MA Experiment 108434 PARAMETER Experiment Name: At_Root_Tips_cDNA_P Parameter: Tissue Value: Root Tips
  misc_feature: MA Experiment ID: 108435 Result: Down-regulated in Transcription
  misc_feature: MA Experiment 108435 PARAMETER Experiment Name: At_stm_Mutants_cDNA_P Parameter: Plant Line Value: wt Landsburg vs stm
  misc_feature: MA Experiment 108435 PARAMETER Experiment Name: At_stm_Mutants_cDNA_P Parameter: Tissue Value: Shoot Apical Meristem Region
  misc_feature: MA Experiment ID: 108461 Result: Up-regulated in Transcription
  misc_feature: MA Experiment 108461 PARAMETER Experiment Name: At_Germinating_Seeds_cDNA_P Parameter: Age (day) Value: 1 vs. 0
  misc_feature: MA Experiment 108461 PARAMETER Experiment Name: At_Germinating_Seeds_cDNA_P Parameter: Tissue Value: Germinating Seeds
  misc_feature: MA Experiment ID: 108462 Result: Up-regulated in Transcription
  misc_feature: MA Experiment 108462 PARAMETER Experiment Name: At_Germinating_Seeds_cDNA_P Parameter: Age (day) Value: 2 vs. 0
  misc_feature: MA Experiment 108462 PARAMETER Experiment Name: At_Germinating_Seeds_cDNA_P Parameter: Tissue Value: Germinating Seeds
  misc_feature: MA Experiment ID: 108464 Result: Up-regulated in Transcription
  misc_feature: MA Experiment 108464 PARAMETER Experiment Name: At_Germinating_Seeds_cDNA_P Parameter: Age (day) Value: 4 vs. 0
  misc_feature: MA Experiment 108464 PARAMETER Experiment Name: At_Germinating_Seeds_cDNA_P Parameter: Tissue Value: Germinating Seeds
  misc_feature: MA Experiment ID: 108488 Result: Up-regulated in Transcription
  misc_feature: MA Experiment ID: 108489 Result: Down-regulated in Transcription
  misc_feature: MA Experiment ID: 108594 Result: Down-regulated in Transcription
  misc_feature: MA Experiment 108594 PARAMETER Experiment Name: At_Ler-rhl_Root_cDNA_P Parameter: Plant Line Value: null
  misc_feature: MA Experiment ID: 20000180 Result: Up-regulated in Transcription
  misc_feature: MA Experiment 20000180 PARAMETER Experiment Name: At_Germinating_Seeds_P Parameter: Age (hr) Value: 24 vs. 0
  misc_feature: MA Experiment 20000180 PARAMETER Experiment Name: At_Germinating_Seeds_P Parameter: Tissue Value: Germinating Seeds
  misc_feature: MA Experiment ID: 20000185 Result: Down-regulated in Transcription
  misc_feature: MA Experiment 20000185 PARAMETER Experiment Name: At_Roots__P Parameter: Age (day) Value: 7 vs. 21
  misc_feature: MA Experiment 20000185 PARAMETER Experiment Name: At_Roots__P Parameter: Organism Value: A. thaliana
  misc_feature: MA Experiment 20000185 PARAMETER Experiment Name: At_Roots__P Parameter: Tissue Value: Roots vs. Whole Plant
  misc_feature: MA Experiment ID: 20000269 Result: Down-regulated in Transcription
  misc_feature: MA Experiment 20000269 PARAMETER Experiment Name: At_1mM_KNO3_L-vs-H_Roots_P Parameter: Age (day) Value: 7,10,12
  misc_feature: MA Experiment 20000269 PARAMETER Experiment Name: At_1mM_KNO3_L-vs-H_Roots_P Parameter: Organism Value: A. thaliana
  misc_feature: MA Experiment 20000269 PARAMETER Experiment Name: At_1mM_KNO3_L-vs-H_Roots_P Parameter: Plant Line Value: WS
  misc_feature: MA Experiment 20000269 PARAMETER Experiment Name: At_1mM_KNO3_L-vs-H_Roots_P Parameter: Timepoint (day) Value: 7,10,12
  misc_feature: MA Experiment 20000269 PARAMETER Experiment Name: At_1mM_KNO3_L-vs-H_Roots_P Parameter: Tissue Value: Roots
  misc_feature: MA Experiment 20000269 PARAMETER Experiment Name: At_1mM_KNO3_L-vs-H_Roots_P Parameter: Treatment Value: 1mM KNO3 vs. 50mM KNO3
  misc_feature: MA Experiment ID: 20000437 Result: Down-regulated in Transcription
  misc_feature: MA Experiment 20000437 PARAMETER Experiment Name: At_Drought_P Parameter: Age (day) Value: 8
  misc_feature: MA Experiment 20000437 PARAMETER Experiment Name: At_Drought_P Parameter: Organism Value: A. thaliana
  misc_feature: MA Experiment 20000437 PARAMETER Experiment Name: At_Drought_P Parameter: Plant Line Value: WS
  misc_feature: MA Experiment 20000437 PARAMETER Experiment Name: At_Drought_P Parameter: Timepoint (hr) Value: 24
  misc_feature: MA Experiment 20000437 PARAMETER Experiment Name: At_Drought_P Parameter: Tissue Value: Whole Plant
  misc_feature: MA Experiment 20000437 PARAMETER Experiment Name: At_Drought_P Parameter: Treatment Value: Drought vs. No Drought
  misc_feature: MA Experiment ID: 20000439 Result: Down-regulated in Transcription
  misc_feature: MA Experiment 20000439 PARAMETER Experiment Name: At_Roots__P Parameter: Age (day) Value: 14 vs. 21
  misc_feature: MA Experiment 20000439 PARAMETER Experiment Name: At_Roots__P Parameter: Organism Value: A. thaliana
  misc_feature: MA Experiment 20000439 PARAMETER Experiment Name: At_Roots__P Parameter: Tissue Value: Roots vs. Whole Plant
  misc_feature: MA Experiment ID: 20000794 Result: Down-regulated in Transcription
  misc_feature: MA Experiment 20000794 PARAMETER Experiment Name: At_Petals_P Parameter: Age (day) Value: 23-25 days
  misc_feature: MA Experiment 20000794 PARAMETER Experiment Name: At_Petals_P Parameter: Plant Line Value: WS
  misc_feature: MA Experiment 20000794 PARAMETER Experiment Name: At_Petals_P Parameter: Tissue Value: Petals vs. Whole plant
  misc_feature: MA Experiment ID: 20001557 Result: Down-regulated in Transcription
  misc_feature: MA Experiment 20001557 PARAMETER Experiment Name: At_Drought_Soil_Dry_P Parameter: Age (day) Value: 27
  misc_feature: MA Experiment 20001557 PARAMETER Experiment Name: At_Drought_Soil_Dry_P Parameter: Organism Value: A. thaliana
  misc_feature: MA Experiment 20001557 PARAMETER Experiment Name: At_Drought_Soil_Dry_P Parameter: Plant Line Value: WS
  misc_feature: MA Experiment 20001557 PARAMETER Experiment Name: At_Drought_Soil_Dry_P Parameter: Post Timepoint (hr) Value: 3
  misc_feature: MA Experiment 20001557 PARAMETER Experiment Name: At_Drought_Soil_Dry_P Parameter: Post-Treatment Value: Re-Water vs. No Drought
  misc_feature: MA Experiment 20001557 PARAMETER Experiment Name: At_Drought_Soil_Dry_P Parameter: Timepoint (day) Value: 13
  misc_feature: MA Experiment 20001557 PARAMETER Experiment Name: At_Drought_Soil_Dry_P Parameter: Treatment Value: Drought vs. No Drought
  misc_feature: MA Experiment ID: 20001757 Result: Up-regulated in Transcription
  misc_feature: MA Experiment 20001757 PARAMETER Experiment Name: At_50mM_NH4NO3_L-to-H_P Parameter: Timepoint (hr) Value: 6
  misc_feature: MA Experiment 20001757 PARAMETER Experiment Name: At_50mM_NH4NO3_L-to-H_P Parameter: Tissue Value: Leaf
  misc_feature: MA Experiment 20001757 PARAMETER Experiment Name: At_50mM_NH4NO3_L-to-H_P Parameter: Treatment Value: 50mM NH4NO3 vs 100mM Mannitol
  misc_feature: MA Experiment ID: 20001904 Result: Down-regulated in Transcription
  misc_feature: MA Experiment 20001904 PARAMETER Experiment Name: At_Drought_Reproduction_P Parameter: Age (day) Value: 37
  misc_feature: MA Experiment 20001904 PARAMETER Experiment Name: At_Drought_Reproduction_P Parameter: Organism Value: A. thaliana
  misc_feature: MA Experiment 20001904 PARAMETER Experiment Name: At_Drought_Reproduction_P Parameter: Plant Line Value: WS
  misc_feature: MA Experiment 20001904 PARAMETER Experiment Name: At_Drought_Reproduction_P Parameter: Timepoint (day) Value: 7
  misc_feature: MA Experiment 20001904 PARAMETER Experiment Name: At_Drought_Reproduction_P Parameter: Tissue Value: Rosettes
  misc_feature: MA Experiment 20001904 PARAMETER Experiment Name: At_Drought_Reproduction_P Parameter: Treatment Value: Drought vs. No Drought
  misc_feature: MA Experiment ID: 20001906 Result: Down-regulated in Transcription
  misc_feature: MA Experiment 20001906 PARAMETER Experiment Name: At_Drought_Reproduction_P Parameter: Age (day) Value: 35
  misc_feature: MA Experiment 20001906 PARAMETER Experiment Name: At_Drought_Reproduction_P Parameter: Organism Value: A. thaliana
  misc_feature: MA Experiment 20001906 PARAMETER Experiment Name: At_Drought_Reproduction_P Parameter: Plant Line Value: WS
  misc_feature: MA Experiment 20001906 PARAMETER Experiment Name: At_Drought_Reproduction_P Parameter: Timepoint (day) Value: 5
  misc_feature: MA Experiment 20001906 PARAMETER Experiment Name: At_Drought_Reproduction_P Parameter: Tissue Value: Siliques
  misc_feature: MA Experiment 20001906 PARAMETER Experiment Name: At_Drought_Reproduction_P Parameter: Treatment Value: Drought vs. No Drought
  misc_feature: MA Experiment ID: 20001908 Result: Down-regulated in Transcription
  misc_feature: MA Experiment 20001908 PARAMETER Experiment Name: At_Drought_Reproduction_P Parameter: Age (day) Value: 40
  misc_feature: MA Experiment 20001908 PARAMETER Experiment Name: At_Drought_Reproduction_P Parameter: Organism Value: A. thaliana
  misc_feature: MA Experiment 20001908 PARAMETER Experiment Name: At_Drought_Reproduction_P Parameter: Plant Line Value: WS
  misc_feature: MA Experiment 20001908 PARAMETER Experiment Name: At_Drought_Reproduction_P Parameter: Timepoint (day) Value: 10
  misc_feature: MA Experiment 20001908 PARAMETER Experiment Name: At_Drought_Reproduction_P Parameter: Tissue Value: Siliques
  misc_feature: MA Experiment 20001908 PARAMETER Experiment Name: At_Drought_Reproduction_P Parameter: Treatment Value: Drought vs. No Drought

SEQ ID NO: 38062 - protein, 280 aa, Arabidopsis thaliana; identical to SEQ ID NO: 25086
  peptide (1)..(280): Ceres Seq. ID no. 12385270
  misc_feature (80)..(244): Pfam Name: Chlorophyll A-B binding protein Pfam Description: Chlorophyll A-B binding protein
  misc_feature (80)..(244): Pfam Name: Chlorophyll A-B binding protein Pfam Description: Chlorophyll A-B binding protein
  misc_feature (110)..(280): Homolog of NCBI NO: 15487754 NR Description: ASCAB9 [Centromadia pungens]
  misc_feature (2)..(280): Homolog of NCBI NO: 322391 NR Description: chlorophyll a/b-binding protein Lhcb5 - Scotch
  misc_feature (1)..(280): Homolog of NCBI NO: 7443226 NR Description: chlorophyll a/b-binding protein CP26 precursor -
  misc_feature (1)..(280): Homolog of NCBI NO: 100573 NR Description: chlorophyll a/b-binding protein CP29 precursor -
  misc_feature (1)..(280): Homolog of NCBI NO: 7443227 NR Description: chlorophyll a/b-binding protein CP26 precursor -
  misc_feature (110)..(280): Homolog of NCBI NO: 15487754 NR Description: ASCAB9 [Centromadia pungens]
  misc_feature (1)..(280): Homolog of NCBI NO: 7443226 NR Description: chlorophyll a/b-binding protein CP26 precursor -
  misc_feature (1)..(280): Homolog of NCBI NO: 7443227 NR Description: chlorophyll a/b-binding protein CP26 precursor -
  misc_feature (1)..(280): Homolog of NCBI NO: 15235029 NR Description: light-harvesting chlorophyll a/b binding protein
  misc_feature (1)..(280): Homolog of NCBI NO: 21593520 NR Description: chlorophyll a/b-binding protein-like [Arabidopsis
  misc_feature (3)..(280): Homolog of NCBI NO: 1644289 NR Description: chlorophyll a/b-binding protein CP26 in PS II
  misc_feature (3)..(280): Homolog of NCBI NO: 100200 NR Description: chlorophyll a/b-binding protein type I precursor
  misc_feature (3)..(280): Homolog of NCBI NO: 19184 NR Description: Type I (26 kD) CP29 polypeptide [Lycopersicon
  misc_feature (1)..(280): Homolog of NCBI NO: 100573 NR Description: chlorophyll a/b-binding protein CP29 precursor -
  misc_feature (2)..(280): Homolog of NCBI NO: 322391 NR Description: chlorophyll a/b-binding protein Lhcb5 - Scotch
  misc_feature (3)..(280): Homolog of NCBI NO: 19184 NR Description: Type I (26 kD) CP29 polypeptide [Lycopersicon
  misc_feature (3)..(280): Homolog of NCBI NO: 100200 NR Description: chlorophyll a/b-binding protein type I precursor
  misc_feature (3)..(280): Homolog of NCBI NO: 1644289 NR Description: chlorophyll a/b-binding protein CP26 in PS II
  misc_feature (1)..(280): Homolog of NCBI NO: 21593520 NR Description: chlorophyll a/b-binding protein-like [Arabidopsis
  misc_feature (1)..(280): Homolog of NCBI NO: 15235029 NR Description: light-harvesting chlorophyll a/b binding protein

SEQ ID NO: 38063 - protein, 272 aa, Arabidopsis thaliana; identical to SEQ ID NO: 25087
  peptide (1)..(272): Ceres Seq. ID no. 12385271
  misc_feature (72)..(236): Pfam Name: Chlorophyll A-B binding protein Pfam Description: Chlorophyll A-B binding protein
  misc_feature (72)..(236): Pfam Name: Chlorophyll A-B binding protein Pfam Description: Chlorophyll A-B binding protein
  misc_feature (102)..(272): Homolog of NCBI NO: 15487754 NR Description: ASCAB9 [Centromadia pungens]
  misc_feature (1)..(272): Homolog of NCBI NO: 322391 NR Description: chlorophyll a/b-binding protein Lhcb5 - Scotch
  misc_feature (1)..(272): Homolog of NCBI NO: 7443226 NR Description: chlorophyll a/b-binding protein CP26 precursor -
  misc_feature (1)..(272): Homolog of NCBI NO: 100573 NR Description: chlorophyll a/b-binding protein CP29 precursor -
  misc_feature (1)..(272): Homolog of NCBI NO: 7443227 NR Description: chlorophyll a/b-binding protein CP26 precursor -
  misc_feature (102)..(272): Homolog of NCBI NO: 15487754 NR Description: ASCAB9 [Centromadia pungens]
  misc_feature (1)..(272): Homolog of NCBI NO: 7443226 NR Description: chlorophyll a/b-binding protein CP26 precursor -
  misc_feature (1)..(272): Homolog of NCBI NO: 7443227 NR Description: chlorophyll a/b-binding protein CP26 precursor -
  misc_feature (1)..(272): Homolog of NCBI NO: 15235029 NR Description: light-harvesting chlorophyll a/b binding protein
  misc_feature (1)..(272): Homolog of NCBI NO: 21593520 NR Description: chlorophyll a/b-binding protein-like [Arabidopsis
  misc_feature (1)..(272): Homolog of NCBI NO: 1644289 NR Description: chlorophyll a/b-binding protein CP26 in PS II
  misc_feature (1)..(272): Homolog of NCBI NO: 100200 NR Description: chlorophyll a/b-binding protein type I precursor
  misc_feature (1)..(272): Homolog of NCBI NO: 19184 NR Description: Type I (26 kD) CP29 polypeptide [Lycopersicon
  misc_feature (1)..(272): Homolog of NCBI NO: 100573 NR Description: chlorophyll a/b-binding protein CP29 precursor -
  misc_feature (1)..(272): Homolog of NCBI NO: 322391 NR Description: chlorophyll a/b-binding protein Lhcb5 - Scotch
  misc_feature (1)..(272): Homolog of NCBI NO: 19184 NR Description: Type I (26 kD) CP29 polypeptide [Lycopersicon
  misc_feature (1)..(272): Homolog of NCBI NO: 100200 NR Description: chlorophyll a/b-binding protein type I precursor
  misc_feature (1)..(272): Homolog of NCBI NO: 1644289 NR Description: chlorophyll a/b-binding protein CP26 in PS II
  misc_feature (1)..(272): Homolog of NCBI NO: 21593520 NR Description: chlorophyll a/b-binding protein-like [Arabidopsis
  misc_feature (1)..(272): Homolog of NCBI NO: 15235029 NR Description: light-harvesting chlorophyll a/b binding protein

SEQ ID NO: 38064 - protein, 159 aa, Arabidopsis thaliana; identical to SEQ ID NO: 25088
  peptide (1)..(159): Ceres Seq. ID no. 12385272
  misc_feature (1)..(123): Pfam Name: Chlorophyll A-B binding protein Pfam Description: Chlorophyll A-B binding protein
  misc_feature (1)..(123): Pfam Name: Chlorophyll A-B binding protein Pfam Description: Chlorophyll A-B binding protein
  misc_feature (1)..(159): Homolog of NCBI NO: 15487754 NR Description: ASCAB9 [Centromadia pungens]
  misc_feature (1)..(159): Homolog of NCBI NO: 322391 NR Description: chlorophyll a/b-binding protein Lhcb5 - Scotch
  misc_feature (1)..(159): Homolog of NCBI NO: 7443226 NR Description: chlorophyll a/b-binding protein CP26 precursor -
  misc_feature (1)..(159): Homolog of NCBI NO: 100573 NR Description: chlorophyll a/b-binding protein CP29 precursor -
  misc_feature (1)..(159): Homolog of NCBI NO: 7443227 NR Description: chlorophyll a/b-binding protein CP26 precursor -
  misc_feature (1)..(159): Homolog of NCBI NO: 15487754 NR Description: ASCAB9 [Centromadia pungens]
  misc_feature (1)..(159): Homolog of NCBI NO: 7443226 NR Description: chlorophyll a/b-binding protein CP26 precursor -
  misc_feature (1)..(159): Homolog of NCBI NO: 7443227 NR Description: chlorophyll a/b-binding protein CP26 precursor -
  misc_feature (1)..(159): Homolog of NCBI NO: 15235029 NR Description: light-harvesting chlorophyll a/b binding protein
  misc_feature (1)..(159): Homolog of NCBI NO: 21593520 NR Description: chlorophyll a/b-binding protein-like [Arabidopsis
  misc_feature (1)..(159): Homolog of NCBI NO: 1644289 NR Description: chlorophyll a/b-binding protein CP26 in PS II
  misc_feature (1)..(159): Homolog of NCBI NO: 100200 NR Description: chlorophyll a/b-binding protein type I precursor
  misc_feature (1)..(159): Homolog of NCBI NO: 19184 NR Description: Type I (26 kD) CP29 polypeptide [Lycopersicon
  misc_feature (1)..(159): Homolog of NCBI NO: 100573 NR Description: chlorophyll a/b-binding protein CP29 precursor -
  misc_feature (1)..(159): Homolog of NCBI NO: 322391 NR Description: chlorophyll a/b-binding protein Lhcb5 - Scotch
  misc_feature (1)..(159): Homolog of NCBI NO: 19184 NR Description: Type I (26 kD) CP29 polypeptide [Lycopersicon
  misc_feature (1)..(159): Homolog of NCBI NO: 100200 NR Description: chlorophyll a/b-binding protein type I precursor
  misc_feature (1)..(159): Homolog of NCBI NO: 1644289 NR Description: chlorophyll a/b-binding protein CP26 in PS II
  misc_feature (1)..(159): Homolog of NCBI NO: 21593520 NR Description: chlorophyll a/b-binding protein-like [Arabidopsis
  misc_feature (1)..(159): Homolog of NCBI NO: 15235029 NR Description: light-harvesting chlorophyll a/b binding protein

SEQ ID NO: 38065 - DNA, 1444 bp, Arabidopsis thaliana
  misc_feature (1)..(1444): Ceres Seq. ID no. 12422058
  misc_feature: MA Experiment ID: 108434 Result: Down-regulated in Transcription
  misc_feature: MA Experiment 108434 PARAMETER Experiment Name: At_Root_Tips_cDNA_P Parameter: Tissue Value: Root Tips
  misc_feature: MA Experiment ID: 108463 Result: Up-regulated in Transcription
  misc_feature: MA Experiment 108463 PARAMETER Experiment Name: At_Germinating_Seeds_cDNA_P Parameter: Age (day) Value: 3 vs. 0
  misc_feature: MA Experiment 108463 PARAMETER Experiment Name: At_Germinating_Seeds_cDNA_P Parameter: Tissue Value: Germinating Seeds
  misc_feature: MA Experiment ID: 108464 Result: Up-regulated in Transcription
  misc_feature: MA Experiment 108464 PARAMETER Experiment Name: At_Germinating_Seeds_cDNA_P Parameter: Age (day) Value: 4 vs. 0
  misc_feature: MA Experiment 108464 PARAMETER Experiment Name: At_Germinating_Seeds_cDNA_P Parameter: Tissue Value: Germinating Seeds
  misc_feature: MA Experiment ID: 108579 Result: Down-regulated in Transcription
  misc_feature: MA Experiment 108579 PARAMETER Experiment Name: At_4deg_Cold_cDNA_P Parameter: Temperature (deg C) Value: 4 vs. 22
  misc_feature: MA Experiment 108579 PARAMETER Experiment Name: At_4deg_Cold_cDNA_P Parameter: Timepoint (hr) Value: 6
  misc_feature: MA Experiment 108579 PARAMETER Experiment Name: At_4deg_Cold_cDNA_P Parameter: Tissue Value: Aerial
  misc_feature: MA Experiment ID: 20000171 Result: Up-regulated in Transcription
  misc_feature: MA Experiment 20000171 PARAMETER Experiment Name: At_42deg_Heat_P Parameter: Age (day) Value: 14
  misc_feature: MA Experiment 20000171 PARAMETER Experiment Name: At_42deg_Heat_P Parameter: Organism Value: A. thaliana
  misc_feature: MA Experiment 20000171 PARAMETER Experiment Name: At_42deg_Heat_P Parameter: Plant Line Value: WS
  misc_feature: MA Experiment 20000171 PARAMETER Experiment Name: At_42deg_Heat_P Parameter: Temperature (deg C) Value: 42 vs. 22
  misc_feature: MA Experiment 20000171 PARAMETER Experiment Name: At_42deg_Heat_P Parameter: Timepoint (hr) Value: 1
  misc_feature: MA Experiment 20000171 PARAMETER Experiment Name: At_42deg_Heat_P Parameter: Tissue Value: Aerial
  misc_feature: MA Experiment ID: 20000179 Result: Up-regulated in Transcription
  misc_feature: MA Experiment 20000179 PARAMETER Experiment Name: At_Germinating_Seeds_P Parameter: Age (hr) Value: 6 vs. 0
  misc_feature: MA Experiment 20000179 PARAMETER Experiment Name: At_Germinating_Seeds_P Parameter: Tissue Value: Germinating Seeds
  misc_feature: MA Experiment ID: 20000495 Result: Up-regulated in Transcription
  misc_feature: MA Experiment 20000495 PARAMETER Experiment Name: At_Guard_Cells_P Parameter: Harvest Date Value: 8/2/2002
  misc_feature: MA Experiment 20000495 PARAMETER Experiment Name: At_Guard_Cells_P Parameter: Organism Value: A. thaliana
  misc_feature: MA Experiment 20000495 PARAMETER Experiment Name: At_Guard_Cells_P Parameter: Tissue Value: Guard Cells vs. Leaves
  misc_feature: MA Experiment ID: 20001450 Result: Up-regulated in Transcription
  misc_feature: MA Experiment 20001450 PARAMETER Experiment Name: At_Far-red-induction_P Parameter: Age (day) Value: 7
  misc_feature: MA Experiment 20001450 PARAMETER Experiment Name: At_Far-red-induction_P Parameter: Light Value: Far-red vs. White
  misc_feature: MA Experiment 20001450 PARAMETER Experiment Name: At_Far-red-induction_P Parameter: Organism Value: A. thaliana
  misc_feature: MA Experiment 20001450 PARAMETER Experiment Name: At_Far-red-induction_P Parameter: Plant Line Value: Columbia
  misc_feature: MA Experiment 20001450 PARAMETER Experiment Name: At_Far-red-induction_P Parameter: Timepoint (hr) Value: 8
  misc_feature: MA Experiment 20001450 PARAMETER Experiment Name: At_Far-red-induction_P Parameter: Tissue Value: Whole Plant
  misc_feature: MA Experiment ID: 20001451 Result: Up-regulated in Transcription
  misc_feature: MA Experiment 20001451 PARAMETER Experiment Name: At_Far-red-induction_P Parameter: Age (day) Value: 7
  misc_feature: MA Experiment 20001451 PARAMETER Experiment Name: At_Far-red-induction_P Parameter: Light Value: Far-red vs. White
  misc_feature: MA Experiment 20001451 PARAMETER Experiment Name: At_Far-red-induction_P Parameter: Organism Value: A. thaliana
  misc_feature: MA Experiment 20001451 PARAMETER Experiment Name: At_Far-red-induction_P Parameter: Plant Line Value: Columbia
  misc_feature: MA Experiment 20001451 PARAMETER Experiment Name: At_Far-red-induction_P Parameter: Timepoint (hr) Value: 24
  misc_feature: MA Experiment 20001451 PARAMETER Experiment Name: At_Far-red-induction_P Parameter: Tissue Value: Whole Plant
aatcttaacacaagcttgatcgtcctcatctgccaccaaaccaaagacataatttcttcggtgacttccatggctccgcctgtctctgatgattccctacagcctcgagatgtttgtgttgtgggagtggcgcgaacgcctataggggacttccttggctccctctcgtctttaactgctacaagacttgggtccatagccatccaagccgcacttaagagagcacatgttgatccggcccttgtggaagaggtcttctttggcaatgtcttaactgccaatcttgggcaagcaccagcaagacaggctgcacttggtgctgggattccctattctgtgatctgcaccactatcaacaaagtttgtgctgcaggaatgaaatctgtaatgctagcgtctcaaagtatccagctcggcttgaatgatattgttgttgctggtgggatggagagcatgtcaaacgtacctaagtacctcccggacgcaagaaggggttctcgattaggtcatgatactgttgttgatggtatgatgaaagatggactttgggatgtctataatgactttggaatgggagtttgtggagaaatatgcgctgaccagtaccgtattacaagagaagaacaggatgcttatgctatccagagctttgagcgtggtattgctgcgcaaaacactcagttgttcgcttgggaaattgttccggtcgaagtttccactggaagagggaggccttcagttgttattgacaaggatgaaggattggggaagtttgatgcagccaagttaaaaaagcttagaccaagtttcaaggaggatgggggatcagtcactgctggaaatgcatcaagcataagtgatggtgcggcagcgttagtgctagtgagtggagagaaggctcttgagcttggactgcatgttatcgctaagattagaggatacgctgatgctgctcaggcaccagagttattcacaaccacgccagctcttgctattcctaaagctataaagcgggctggtttggatgcatctcaagtggattattatgaaataaacgaagcattttctgtggtagctctagccaatcagaaactactgggattagatcctgaacggctcaatgcgcatggaggggctgtttcactgggacatccattgggctgtagcggtgctcgtatcttggtcacattattgggggtgttgagagcaaagaagggaaagtatggagtggcatcaatatgcaacggaggaggaggagcatcagcacttgtccttgagttcatgtcggagaagacaatcggatattcggcactctgaagctaatagctgttgttttataacgcaaagcttatgtatatggttcatgtgtgtgtcacaagactgtaactttgtacttgagagagatgcaataaaagtgtgttagaaaatgagcggtagatttccc

SEQ ID NO: 38066 - protein, 438 aa, Arabidopsis thaliana
  peptide (1)..(438): Ceres Seq. ID no. 12422059
  misc_feature (35)..(298): Pfam Name: Thiolase, N-terminal domain Pfam Description: Thiolase, N-terminal domain
  misc_feature (37)..(426): Homolog of NCBI NO: 11257345 NR Description: probable acetyl-CoA C-acetyltransferase (EC
  misc_feature (37)..(426): Homolog of NCBI NO: 19113478 NR Description: acetyl-coa acetyltransferase (EC 2.3.1.9)
  misc_feature (29)..(426): Homolog of NCBI NO: 7433657 NR Description: acetyl-CoA C-acetyltransferase (EC 2.3.1.9),
  misc_feature (24)..(438): Homolog of NCBI NO: 34894172 NR Description: putative acetoacyl-CoA-thiolase
  misc_feature (37)..(428): Homolog of NCBI NO: 30695409 NR Description: acetyl-CoA C-acetyltransferase
  misc_feature (29)..(428): Homolog of NCBI NO: 30695411 NR Description: acetyl-CoA C-acetyltransferase
  misc_feature (29)..(428): Homolog of NCBI NO: 8777413 NR Description: acetyl-CoA C-acetyltransferase [Arabidopsis
  misc_feature (24)..(438): Homolog of NCBI NO: 16417944 NR Description: acetyl Co-A acetyltransferase [Hevea brasiliensis]
  misc_feature (24)..(428): Homolog of NCBI NO: 30695277 NR Description: acetyl-CoA C-acetyltransferase
  misc_feature (24)..(438): Homolog of NCBI NO: 15238793 NR Description: acetoacyl-CoA-thiolase
NLNTSLIVLICHQTKDIISSVTSMAPPVSDDSLQPRDVCVVGVARTPIGDFLGSLSSLTATRLGSIAIQAALKRAHVDPALVEEVFFGNVLTANLGQAPARQAALGAGIPYSVICTTINKVCAAGMKSVMLASQSIQLGLNDIVVAGGMESMSNVPKYLPDARRGSRLGHDTVVDGMMKDGLWDVYNDFGMGVCGEICADQYRITREEQDAYAIQSFERGIAAQNTQLFAWEIVPVEVSTGRGRPSVVIDKDEGLGKFDAAKLKKLRPSFKEDGGSVTAGNASSISDGAAALVLVSGEKALELGLHVIAKIRGYADAAQAPELFTTTPALAIPKAIKRAGLDASQVDYYEINEAFSVVALANQKLLGLDPERLNAHGGAVSLGHPLGCSGARILVTLLGVLRAKKGKYGVASICNGGGGASALVLEFMSEKTIGYSAL

SEQ ID NO: 38067 - protein, 415 aa, Arabidopsis thaliana
  peptide (1)..(415): Ceres Seq. ID no. 12422060
  misc_feature (12)..(275): Pfam Name: Thiolase, N-terminal domain Pfam Description: Thiolase, N-terminal domain
  misc_feature (14)..(403): Homolog of NCBI NO: 11257345 NR Description: probable acetyl-CoA C-acetyltransferase (EC
  misc_feature (14)..(403): Homolog of NCBI NO: 19113478 NR Description: acetyl-coa acetyltransferase (EC 2.3.1.9)
  misc_feature (6)..(403): Homolog of NCBI NO: 7433657 NR Description: acetyl-CoA C-acetyltransferase (EC 2.3.1.9),
  misc_feature (1)..(415): Homolog of NCBI NO: 34894172 NR Description: putative acetoacyl-CoA-thiolase
  misc_feature (14)..(405): Homolog of NCBI NO: 30695409 NR Description: acetyl-CoA C-acetyltransferase
  misc_feature (6)..(405): Homolog of NCBI NO: 30695411 NR Description: acetyl-CoA C-acetyltransferase
  misc_feature (6)..(405): Homolog of NCBI NO: 8777413 NR Description: acetyl-CoA C-acetyltransferase [Arabidopsis
  misc_feature (1)..(415): Homolog of NCBI NO: 16417944 NR Description: acetyl Co-A acetyltransferase [Hevea brasiliensis]
  misc_feature (1)..(405): Homolog of NCBI NO: 30695277 NR Description: acetyl-CoA C-acetyltransferase
  misc_feature (1)..(415): Homolog of NCBI NO: 15238793 NR Description: acetoacyl-CoA-thiolase
MAPPVSDDSLQPRDVCVVGVARTPIGDFLGSLSSLTATRLGSIAIQAALKRAHVDPALVEEVFFGNVLTANLGQAPARQAALGAGIPYSVICTTINKVCAAGMKSVMLASQSIQLGLNDIVVAGGMESMSNVPKYLPDARRGSRLGHDTVVDGMMKDGLWDVYNDFGMGVCGEICADQYRITREEQDAYAIQSFERGIAAQNTQLFAWEIVPVEVSTGRGRPSVVIDKDEGLGKFDAAKLKKLRPSFKEDGGSVTAGNASSISDGAAALVLVSGEKALELGLHVIAKIRGYADAAQAPELFTTTPALAIPKAIKRAGLDASQVDYYEINEAFSVVALANQKLLGLDPERLNAHGGAVSLGHPLGCSGARILVTLLGVLRAKKGKYGVASICNGGGGASALVLEFMSEKTIGYSAL

SEQ ID NO: 38068 - protein, 313 aa, Arabidopsis thaliana
  peptide (1)..(313): Ceres Seq. ID no. 12422061
  misc_feature (1)..(173): Pfam Name: Thiolase, N-terminal domain Pfam Description: Thiolase, N-terminal domain
  misc_feature (1)..(301): Homolog of NCBI NO: 11257345 NR Description: probable acetyl-CoA C-acetyltransferase (EC
  misc_feature (1)..(301): Homolog of NCBI NO: 19113478 NR Description: acetyl-coa acetyltransferase (EC 2.3.1.9)
  misc_feature (1)..(301): Homolog of NCBI NO: 7433657 NR Description: acetyl-CoA C-acetyltransferase (EC 2.3.1.9),
  misc_feature (1)..(313): Homolog of NCBI NO: 34894172 NR Description: putative acetoacyl-CoA-thiolase
  misc_feature (1)..(303): Homolog of NCBI NO: 30695409 NR Description: acetyl-CoA C-acetyltransferase
  misc_feature (1)..(303): Homolog of NCBI NO: 30695411 NR Description: acetyl-CoA C-acetyltransferase
  misc_feature (1)..(303): Homolog of NCBI NO: 8777413 NR Description: acetyl-CoA C-acetyltransferase [Arabidopsis
  misc_feature (1)..(313): Homolog of NCBI NO: 16417944 NR Description: acetyl Co-A acetyltransferase [Hevea brasiliensis]
  misc_feature (1)..(303): Homolog of NCBI NO: 30695277 NR Description: acetyl-CoA C-acetyltransferase
  misc_feature (1)..(313): Homolog of NCBI NO: 15238793 NR Description: acetoacyl-CoA-thiolase
MKSVMLASQSIQLGLNDIVVAGGMESMSNVPKYLPDARRGSRLGHDTVVDGMMKDGLWDVYNDFGMGVCGEICADQYRITREEQDAYAIQSFERGIAAQNTQLFAWEIVPVEVSTGRGRPSVVIDKDEGLGKFDAAKLKKLRPSFKEDGGSVTAGNASSISDGAAALVLVSGEKALELGLHVIAKIRGYADAAQAPELFTTTPALAIPKAIKRAGLDASQVDYYEINEAFSVVALANQKLLGLDPERLNAHGGAVSLGHPLGCSGARILVTLLGVLRAKKGKYGVASICNGGGGASALVLEFMSEKTIGYSAL

SEQ ID NO: 38069 - DNA, 1310 bp, Arabidopsis thaliana
  misc_feature (1)..(1310): Ceres Seq. ID no. 12327792
  misc_feature: MA Experiment ID: 108573 Result: Down-regulated in Transcription
  misc_feature: MA Experiment 108573 PARAMETER Experiment Name: At_Drought_cDNA_P Parameter: Timepoint (hr) Value: 6
  misc_feature: MA Experiment 108573 PARAMETER Experiment Name: At_Drought_cDNA_P Parameter: Tissue Value: Aerial
  misc_feature: MA Experiment 108573 PARAMETER Experiment Name: At_Drought_cDNA_P Parameter: Treatment Value: Drought vs. No Drought
  misc_feature: MA Experiment ID: 20000089 Result: Down-regulated in Transcription
  misc_feature: MA Experiment ID: 20000090 Result: Down-regulated in Transcription
  misc_feature: MA Experiment ID: 20000173 Result: Down-regulated in Transcription
  misc_feature: MA Experiment 20000173 PARAMETER Experiment Name: At_42deg_Heat_P Parameter: Age (day) Value: 14
  misc_feature: MA Experiment 20000173 PARAMETER Experiment Name: At_42deg_Heat_P Parameter: Organism Value: A. thaliana
  misc_feature: MA Experiment 20000173 PARAMETER Experiment Name: At_42deg_Heat_P Parameter: Plant Line Value: WS
  misc_feature: MA Experiment 20000173 PARAMETER Experiment Name: At_42deg_Heat_P Parameter: Temperature (deg C) Value: 42 vs. 22
  misc_feature: MA Experiment 20000173 PARAMETER Experiment Name: At_42deg_Heat_P Parameter: Timepoint (hr) Value: 6
  misc_feature: MA Experiment 20000173 PARAMETER Experiment Name: At_42deg_Heat_P Parameter: Tissue Value: Aerial
  misc_feature: MA Experiment ID: 20000235 Result: Up-regulated in Transcription
  misc_feature: MA Experiment 20000235 PARAMETER Experiment Name: At_Siliques_P Parameter: Age (day) Value: 21
  misc_feature: MA Experiment 20000235 PARAMETER Experiment Name: At_Siliques_P Parameter: Organism Value: A. thaliana
  misc_feature: MA Experiment 20000235 PARAMETER Experiment Name: At_Siliques_P Parameter: Plant Line Value: WS
  misc_feature: MA Experiment 20000235 PARAMETER Experiment Name: At_Siliques_P Parameter: Tissue Value: 5-10mm Siliques vs. Whole Plant
  misc_feature: MA Experiment ID: 20000264 Result: Up-regulated in Transcription
  misc_feature: MA Experiment 20000264 PARAMETER Experiment Name: At_Open_Flower_P Parameter: Age (day) Value: 21
  misc_feature: MA Experiment 20000264 PARAMETER Experiment Name: At_Open_Flower_P Parameter: Plant Line Value: WS
  misc_feature: MA Experiment 20000264 PARAMETER Experiment Name: At_Open_Flower_P Parameter: Tissue Value: Open Flower vs. Whole Plant
  misc_feature: MA Experiment ID: 20000265 Result: Up-regulated in Transcription
  misc_feature: MA Experiment 20000265 PARAMETER Experiment Name: At_Open_Flower_P Parameter: Age (day) Value: 21
  misc_feature: MA Experiment 20000265 PARAMETER Experiment Name: At_Open_Flower_P Parameter: Plant Line Value: WS
  misc_feature: MA Experiment 20000265 PARAMETER Experiment Name: At_Open_Flower_P Parameter: Tissue Value: Closed Flower vs. Whole Plant
  misc_feature: MA Experiment ID: 20000495 Result: Up-regulated in Transcription
  misc_feature: MA Experiment 20000495 PARAMETER Experiment Name: At_Guard_Cells_P Parameter: Harvest Date Value: 8/2/2002
  misc_feature: MA Experiment 20000495 PARAMETER Experiment Name: At_Guard_Cells_P Parameter: Organism Value: A. thaliana
  misc_feature: MA Experiment 20000495 PARAMETER Experiment Name: At_Guard_Cells_P Parameter: Tissue Value: Guard Cells vs. Leaves
  misc_feature: MA Experiment ID: 20001248 Result: Down-regulated in Transcription
  misc_feature: MA Experiment 20001248 PARAMETER Experiment Name: At_Far-red-induction_P Parameter: Age (day) Value: 7
  misc_feature: MA Experiment 20001248 PARAMETER Experiment Name: At_Far-red-induction_P Parameter: Light Value: Far-red vs. White
  misc_feature: MA Experiment 20001248 PARAMETER Experiment Name: At_Far-red-induction_P Parameter: Organism Value: A. thaliana
  misc_feature: MA Experiment 20001248 PARAMETER Experiment Name: At_Far-red-induction_P Parameter: Plant Line Value: Columbia
  misc_feature: MA Experiment 20001248 PARAMETER Experiment Name: At_Far-red-induction_P Parameter: Timepoint (hr) Value: 4
  misc_feature: MA Experiment 20001248 PARAMETER Experiment Name: At_Far-red-induction_P Parameter: Tissue Value: Whole Plant
agaatcagaagagagtacatgagtttcctcttctgcctctttggtgattcttagcatttattattactcactcatcttcttttcattacattacataccaaacaagagctctcaaatggaaaggtttcaaggacacatcaacccctgtttcttcgatcgaaaaccggatgtgagaagcctcgaggttcaaggatttgcagaggctcaaagctttgctttcaaagaaaaagaggaagaaagcttacaagatacagttctatttctacagatgctgcaaagtgaagacccctcatcgtttttttcaatcaaagagccaaactttctgacgctactgtctcttcaaaccctcaaggagccttgggaactcgaaagatatctttcacttgaggattcacaatttcattcaccggtccaatctgagaccaaccgccttcatggaaggagccaatcaagctgtgtcaagccaagaaattccctttagccaagcaaacatgacactcccttcttctacctcatcaccactcagtgcacattcaagacgaaagcgcaaaatcaaccacttgctgcctcaagaaatgactagagaaaagagaaagaggaggaaaacaaaaccaagtaaaaacaatgaagagattgagaatcaaagaataaaccacattgctgttgaacgaaacagaagacgtcaaatgaacgaacatatcaactctctccgggcccttctcccaccttcctacatccaacgaggagaccaagcttccatagtaggaggagcaataaactacgtgaaggtcctcgagcaaatcatacaatctctcgaatcgcaaaagagaacgcaacaacaaagtaacagtgaggtagtagaaaacgcacttaatcatctcttaggcatttcgtcgaacgacctgtggacaactcttgaagatcaaacttgtatccccaagatcgaagctacagtgatacaaaaccatgtcagccttaaagttcaatgtgagaagaaacaaggacaacttctcaaaggaatcatatcacttgaaaagcttaaactcactgttcttcatctcaatatcactacttcgtctcattcctctgtttcttattccttcaacctcaagatggaagatgagtgcgacttagagtcagccgacgagattacggcggctgttcatcggattttcgatattccgacaatttgattaaacacatataattccaaaaatattaacagctgacaaaatggtatcttttttttttttcctacttgtaccatttttttaagaattaagagaataaaaaaatttcgtttttcgttc

SEQ ID NO: 38070 - protein, 252 aa, Arabidopsis thaliana
  peptide (1)..(252): Ceres Seq. ID no. 12327793
  misc_feature (70)..(121): Pfam Name: Helix-loop-helix DNA-binding domain Pfam Description: Helix-loop-helix DNA-binding domain
  misc_feature (167)..(246): Homolog of NCBI NO: 34902426 NR Description: Unknown protein [Oryza sativa (japonica
  misc_feature (52)..(139): Homolog of NCBI NO: 34902426 NR Description: Unknown protein [Oryza sativa (japonica
  misc_feature (52)..(131): Homolog of NCBI NO: 37533680 NR Description: putative helix-loop-helix DNA-binding protein
  misc_feature (167)..(248): Homolog of NCBI NO: 37533680 NR Description: putative helix-loop-helix DNA-binding protein
  misc_feature (50)..(248): Homolog of NCBI NO: 15234187 NR Description: bHLH protein
  misc_feature (1)..(248): Homolog of NCBI NO: 15226442 NR Description: unknown protein; protein id: At2g46810.1
  misc_feature (1)..(252): Homolog of NCBI NO: 11282339 NR Description: hypothetical protein F21F14.120 - Arabidopsis
  misc_feature (1)..(252): Homolog of NCBI NO: 18412203 NR Description: putative protein
  misc_feature (1)..(252): Homolog of NCBI NO: 21618009 NR Description: unknown [Arabidopsis thaliana]
  misc_feature (1)..(252): Homolog of NCBI NO: 30695519 NR Description: bHLH protein family [Arabidopsis thaliana]
MEGANQAVSSQEIPFSQANMTLPSSTSSPLSAHSRRKRKINHLLPQEMTREKRKRRKTKPSKNNEEIENQRINHIAVERNRRRQMNEHINSLRALLPPSYIQRGDQASIVGGAINYVKVLEQIIQSLESQKRTQQQSNSEVVENALNHLLGISSNDLWTTLEDQTCIPKIEATVIQNHVSLKVQCEKKQGQLLKGIISLEKLKLTVLHLNITTSSHSSVSYSFNLKMEDECDLESADEITAAVHRIFDIPTI

SEQ ID NO: 38071 - protein, 233 aa, Arabidopsis thaliana
  peptide (1)..(233): Ceres Seq. ID no. 12327794
  misc_feature (51)..(102): Pfam Name: Helix-loop-helix DNA-binding domain Pfam Description: Helix-loop-helix DNA-binding domain
  misc_feature (148)..(227): Homolog of NCBI NO: 34902426 NR Description: Unknown protein [Oryza sativa (japonica
  misc_feature (33)..(120): Homolog of NCBI NO: 34902426 NR Description: Unknown protein [Oryza sativa (japonica
  misc_feature (33)..(112): Homolog of NCBI NO: 37533680 NR Description: putative helix-loop-helix DNA-binding protein
  misc_feature (148)..(229): Homolog of NCBI NO: 37533680 NR Description: putative helix-loop-helix DNA-binding protein
  misc_feature (31)..(229): Homolog of NCBI NO: 15234187 NR Description: bHLH protein
  misc_feature (1)..(229): Homolog of NCBI NO: 15226442 NR Description: unknown protein; protein id: At2g46810.1
  misc_feature (1)..(233): Homolog of NCBI NO: 11282339 NR Description: hypothetical protein F21F14.120 - Arabidopsis
  misc_feature (1)..(233): Homolog of NCBI NO: 18412203 NR Description: putative protein
  misc_feature (1)..(233): Homolog of NCBI NO: 21618009 NR Description: unknown [Arabidopsis thaliana]
  misc_feature (1)..(233): Homolog of NCBI NO: 30695519 NR Description: bHLH protein family [Arabidopsis thaliana]
MTLPSSTSSPLSAHSRRKRKINHLLPQEMTREKRKRRKTKPSKNNEEIENQRINHIAVERNRRRQMNEHINSLRALLPPSYIQRGDQASIVGGAINYVKVLEQIIQSLESQKRTQQQSNSEVVENALNHLLGISSNDLWTTLEDQTCIPKIEATVIQNHVSLKVQCEKKQGQLLKGIISLEKLKLTVLHLNITTSSHSSVSYSFNLKMEDECDLESADEITAAVHRIFDIPTI

SEQ ID NO: 38072 - protein, 205 aa, Arabidopsis thaliana
  peptide (1)..(205): Ceres Seq. ID no. 12327795
  misc_feature (23)..(74): Pfam Name: Helix-loop-helix DNA-binding domain Pfam Description: Helix-loop-helix DNA-binding domain
  misc_feature (120)..(199): Homolog of NCBI NO: 34902426 NR Description: Unknown protein [Oryza sativa (japonica
  misc_feature (5)..(92): Homolog of NCBI NO: 34902426 NR Description: Unknown protein [Oryza sativa (japonica
  misc_feature (5)..(84): Homolog of NCBI NO: 37533680 NR Description: putative helix-loop-helix DNA-binding protein
  misc_feature (120)..(201): Homolog of NCBI NO: 37533680 NR Description: putative helix-loop-helix DNA-binding protein
  misc_feature (3)..(201): Homolog of NCBI NO: 15234187 NR Description: bHLH protein
  misc_feature (1)..(201): Homolog of NCBI NO: 15226442 NR Description: unknown protein; protein id: At2g46810.1
  misc_feature (1)..(205): Homolog of NCBI NO: 11282339 NR Description: hypothetical protein F21F14.120 - Arabidopsis
  misc_feature (1)..(205): Homolog of NCBI NO: 18412203 NR Description: putative protein
  misc_feature (1)..(205): Homolog of NCBI NO: 21618009 NR Description: unknown [Arabidopsis thaliana]
  misc_feature (1)..(205): Homolog of NCBI NO: 30695519 NR Description: bHLH protein family [Arabidopsis thaliana]
MTREKRKRRKTKPSKNNEEIENQRINHIAVERNRRRQMNEHINSLRALLPPSYIQRGDQASIVGGAINYVKVLEQIIQSLESQKRTQQQSNSEVVENALNHLLGISSNDLWTTLEDQTCIPKIEATVIQNHVSLKVQCEKKQGQLLKGIISLEKLKLTVLHLNITTSSHSSVSYSFNLKMEDECDLESADEITAAVHRIFDIPTI

SEQ ID NO: 38073 - DNA, 1194 bp, Arabidopsis thaliana
  misc_feature (1)..(1194): Ceres Seq. ID no. 13488606
  misc_feature: MA Experiment ID: 108462 Result: Down-regulated in Transcription
  misc_feature: MA Experiment 108462 PARAMETER Experiment Name: At_Germinating_Seeds_cDNA_P Parameter: Age (day) Value: 2 vs. 0
  misc_feature: MA Experiment 108462 PARAMETER Experiment Name: At_Germinating_Seeds_cDNA_P Parameter: Tissue Value: Germinating Seeds
  misc_feature: MA Experiment ID: 20000112 Result: Up-regulated in Transcription
  misc_feature: MA Experiment 20000112 PARAMETER Experiment Name: At_42deg_Heat_cDNA_P Parameter: Temperature (deg C) Value: 42 vs. 22
  misc_feature: MA Experiment 20000112 PARAMETER Experiment Name: At_42deg_Heat_cDNA_P Parameter: Timepoint (hr) Value: 2
  misc_feature: MA Experiment 20000112 PARAMETER Experiment Name: At_42deg_Heat_cDNA_P Parameter: Tissue Value: Aerial
  misc_feature: MA Experiment ID: 20000184 Result: Down-regulated in Transcription
  misc_feature: MA Experiment 20000184 PARAMETER Experiment Name: At_Shoots__P Parameter: Age (day) Value: 7
  misc_feature: MA Experiment 20000184 PARAMETER Experiment Name: At_Shoots__P Parameter: Tissue Value: Shoots vs. Whole Plant
  misc_feature: MA Experiment ID: 20000227 Result: Down-regulated in Transcription
  misc_feature: MA Experiment 20000227 PARAMETER Experiment Name: At_Root-Tips-vs-Tops_P Parameter: Tissue Value: Root Tips vs. Root Tops
  misc_feature: MA Experiment ID: 20001905 Result: Up-regulated in Transcription
  misc_feature: MA Experiment 20001905 PARAMETER Experiment Name: At_Drought_Reproduction_P Parameter: Age (day) Value: 40
  misc_feature: MA Experiment 20001905 PARAMETER Experiment Name: At_Drought_Reproduction_P Parameter: Organism Value: A. thaliana
  misc_feature: MA Experiment 20001905 PARAMETER Experiment Name: At_Drought_Reproduction_P Parameter: Plant Line Value: WS
  misc_feature: MA Experiment 20001905 PARAMETER Experiment Name: At_Drought_Reproduction_P Parameter: Timepoint (day) Value: 10
  misc_feature: MA Experiment 20001905 PARAMETER Experiment Name: At_Drought_Reproduction_P Parameter: Tissue Value: Rosettes
  misc_feature: MA Experiment 20001905 PARAMETER Experiment Name: At_Drought_Reproduction_P Parameter: Treatment Value: Drought vs. No Drought
aaaaccgacattgacctgacagtttcttacgccggcgagcgaactcgacgaagaagacaacttccttttgttgcacctgtgagtctgcgaccatggctatgcaatctggtattgggttatcgaagattttgattctagctggagcaggttatactagtacgattctggttaagaatgggaagatggcagatattttgggtgagcttcaggctttggttaagcgatttgagaaatctggagatcatgtagatgatgattctgatgccatgactactcagatgcaacgattagcaatggaggttcggcaattggcttcgtcgcggcagataactgttatgaatggagctcagggagctgattttacaccgtttattgtcccggcagcgacattgggagcattaggctatggctatatgtggttcaagggaatttcattctctgatatcatgtgtgtaacgaagcggaacatggaaaatgcagtgtcgaacttgaccaagcatttggataccgtttcagaagctattttgaatgctaagaagcacctgagccagcggcttcagaaggtggacgataagctagacttgcagaaagatctcttaaagggagtccaggataatgtgggtttggctcttgaggatcttgctaacattggagatgattttgacgcaatgcatagcatctttggtggtatgggtgggaaattagatagcattgagtacaagcagaatattgcgaacatgggtttgatatatctgtgcgactctttgggtggagaaaatcacaagatgccggatatattgatgcaggagaagcttcggctttcagggaagtcaaacacatgtatagtacttacaaccgaagaaacttcaagctcagagggtttaaaagaaagcgataagatacagctactagatgactgctaattcaaatggtgccaatatatcatcaagcaagaagccacgagtctgatagcattgacgagaatgaccctggatttggatagaaagaaggtataggattaataggagtgattattatgtattggtatttagaatagtgtgtcctttgaggcaagtaagaagattgagaaaaataaaaagaatgtgctttttttttccttcaattttttcgcatccaacaaaaaatgaaacctatattttttctaataatatactgcattatgcacaatttgtc

SEQ ID NO: 38074 - protein, 276 aa, Arabidopsis thaliana
  peptide (1)..(276): Ceres Seq. ID no. 13488607
  misc_feature (7)..(218): Homolog of NCBI NO: 30688826 NR Description: expressed protein [Arabidopsis thaliana]
  misc_feature (9)..(218): Homolog of NCBI NO: 22329773 NR Description: expressed protein [Arabidopsis thaliana]
  misc_feature (7)..(211): Homolog of NCBI NO: 34894218 NR Description: P0439B06.30 [Oryza sativa (japonica
  misc_feature (1)..(245): Homolog of NCBI NO: 34906300 NR Description: unnamed protein product [Oryza sativa (japonica
  misc_feature (1)..(249): Homolog of NCBI NO: 18390460 NR Description: expressed protein [Arabidopsis thaliana]
  misc_feature (1)..(266): Homolog of NCBI NO: 25361065 NR Description: protein T7N9.6 [imported] - Arabidopsis thaliana
  misc_feature (1)..(266): Homolog of NCBI NO: 21537323 NR Description: unknown [Arabidopsis thaliana]
  misc_feature (1)..(266): Homolog of NCBI NO: 18396143 NR Description: bZIP family transcription factor [Arabidopsis
  misc_feature (1)..(262): Homolog of NCBI NO: 7487252 NR Description: hypothetical protein At2g02730 [imported] -
  misc_feature (1)..(276): Homolog of NCBI NO: 15227027 NR Description: expressed protein [Arabidopsis thaliana]
MAMQSGIGLSKILILAGAGYTSTILVKNGKMADILGELQALVKRFEKSGDHVDDDSDAMTTQMQRLAMEVRQLASSRQITVMNGAQGADFTPFIVPAATLGALGYGYMWFKGISFSDIMCVTKRNMENAVSNLTKHLDTVSEAILNAKKHLSQRLQKVDDKLDLQKDLLKGVQDNVGLALEDLANIGDDFDAMHSIFGGMGGKLDSIEYKQNIANMGLIYLCDSLGGENHKMPDILMQEKLRLSGKSNTCIVLTTEETSSSEGLKESDKIQLLDDC

SEQ ID NO: 38075 - protein, 274 aa, Arabidopsis thaliana
  peptide (1)..(274): Ceres Seq. ID no. 13488608
  misc_feature (5)..(216): Homolog of NCBI NO: 30688826 NR Description: expressed protein [Arabidopsis thaliana]
  misc_feature (7)..(216): Homolog of NCBI NO: 22329773 NR Description: expressed protein [Arabidopsis thaliana]
  misc_feature (5)..(209): Homolog of NCBI NO: 34894218 NR Description: P0439B06.30 [Oryza sativa (japonica
  misc_feature (1)..(243): Homolog of NCBI NO: 34906300 NR Description: unnamed protein product [Oryza sativa (japonica
  misc_feature (1)..(247): Homolog of NCBI NO: 18390460 NR Description: expressed protein [Arabidopsis thaliana]
  misc_feature (1)..(264): Homolog of NCBI NO: 25361065 NR Description: protein T7N9.6 [imported] - Arabidopsis thaliana
  misc_feature (1)..(264): Homolog of NCBI NO: 21537323 NR Description: unknown [Arabidopsis thaliana]
  misc_feature (1)..(264): Homolog of NCBI NO: 18396143 NR Description: bZIP family transcription factor [Arabidopsis
  misc_feature (1)..(260): Homolog of NCBI NO: 7487252 NR Description: hypothetical protein At2g02730 [imported] -
  misc_feature (1)..(274): Homolog of NCBI NO: 15227027 NR Description: expressed protein [Arabidopsis thaliana]
MQSGIGLSKILILAGAGYTSTILVKNGKMADILGELQALVKRFEKSGDHVDDDSDAMTTQMQRLAMEVRQLASSRQITVMNGAQGADFTPFIVPAATLGALGYGYMWFKGISFSDIMCVTKRNMENAVSNLTKHLDTVSEAILNAKKHLSQRLQKVDDKLDLQKDLLKGVQDNVGLALEDLANIGDDFDAMHSIFGGMGGKLDSIEYKQNIANMGLIYLCDSLGGENHKMPDILMQEKLRLSGKSNTCIVLTTEETSSSEGLKESDKIQLLDDC

SEQ ID NO: 38076 - protein, 246 aa, Arabidopsis thaliana
  peptide (1)..(246): Ceres Seq. ID no. 13488609
  misc_feature (1)..(188): Homolog of NCBI NO: 30688826 NR Description: expressed protein [Arabidopsis thaliana]
  misc_feature (1)..(188): Homolog of NCBI NO: 22329773 NR Description: expressed protein [Arabidopsis thaliana]
  misc_feature (1)..(181): Homolog of NCBI NO: 34894218 NR Description: P0439B06.30 [Oryza sativa (japonica
  misc_feature (1)..(215): Homolog of NCBI NO: 34906300 NR Description: unnamed protein product [Oryza sativa (japonica
  misc_feature (1)..(219): Homolog of NCBI NO: 18390460 NR Description: expressed protein [Arabidopsis thaliana]
  misc_feature (1)..(236): Homolog of NCBI NO: 25361065 NR Description: protein T7N9.6 [imported] - Arabidopsis thaliana
  misc_feature (1)..(236): Homolog of NCBI NO: 21537323 NR Description: unknown [Arabidopsis thaliana]
  misc_feature (1)..(236): Homolog of NCBI NO: 18396143 NR Description: bZIP family transcription factor [Arabidopsis
  misc_feature (1)..(232): Homolog of NCBI NO: 7487252 NR Description: hypothetical protein At2g02730 [imported] -
  misc_feature (1)..(246): Homolog of NCBI NO: 15227027 NR Description: expressed protein [Arabidopsis thaliana]
MADILGELQALVKRFEKSGDHVDDDSDAMTTQMQRLAMEVRQLASSRQITVMNGAQGADFTPFIVPAATLGALGYGYMWFKGISFSDIMCVTKRNMENAVSNLTKHLDTVSEAILNAKKHLSQRLQKVDDKLDLQKDLLKGVQDNVGLALEDLANIGDDFDAMHSIFGGMGGKLDSIEYKQNIANMGLIYLCDSLGGENHKMPDILMQEKLRLSGKSNTCIVLTTEETSSSEGLKESDKIQLLDDC

SEQ ID NO: 38077 - DNA, 1326 bp, Arabidopsis thaliana
  misc_feature (1)..(1326): Ceres Seq. ID no. 13489024
  misc_feature: MA Experiment ID: 108462 Result: Up-regulated in Transcription
  misc_feature: MA Experiment 108462 PARAMETER Experiment Name: At_Germinating_Seeds_cDNA_P Parameter: Age (day) Value: 2 vs. 0
  misc_feature: MA Experiment 108462 PARAMETER Experiment Name: At_Germinating_Seeds_cDNA_P Parameter: Tissue Value: Germinating Seeds
  misc_feature: MA Experiment ID: 108463 Result: Up-regulated in Transcription
  misc_feature: MA Experiment 108463 PARAMETER Experiment Name: At_Germinating_Seeds_cDNA_P Parameter: Age (day) Value: 3 vs. 0
  misc_feature: MA Experiment 108463 PARAMETER Experiment Name: At_Germinating_Seeds_cDNA_P Parameter: Tissue Value: Germinating Seeds
  misc_feature: MA Experiment ID: 108464 Result: Up-regulated in Transcription
  misc_feature: MA Experiment 108464 PARAMETER Experiment Name: At_Germinating_Seeds_cDNA_P Parameter: Age (day) Value: 4 vs. 0
  misc_feature: MA Experiment 108464 PARAMETER Experiment Name: At_Germinating_Seeds_cDNA_P Parameter: Tissue Value: Germinating Seeds
  misc_feature: MA Experiment ID: 20001451 Result: Up-regulated in Transcription
  misc_feature: MA Experiment 20001451 PARAMETER Experiment Name: At_Far-red-induction_P Parameter: Age (day) Value: 7
  misc_feature: MA Experiment 20001451 PARAMETER Experiment Name: At_Far-red-induction_P Parameter: Light Value: Far-red vs. White
  misc_feature: MA Experiment 20001451 PARAMETER Experiment Name: At_Far-red-induction_P Parameter: Organism Value: A. thaliana
  misc_feature: MA Experiment 20001451 PARAMETER Experiment Name: At_Far-red-induction_P Parameter: Plant Line Value: Columbia
  misc_feature: MA Experiment 20001451 PARAMETER Experiment Name: At_Far-red-induction_P Parameter: Timepoint (hr) Value: 24
  misc_feature: MA Experiment 20001451 PARAMETER Experiment Name: At_Far-red-induction_P Parameter: Tissue Value: Whole Plant
  misc_feature: MA Experiment ID: 20001558 Result: Down-regulated in Transcription
  misc_feature: MA Experiment 20001558 PARAMETER Experiment Name: At_Drought_Soil_Dry_P Parameter: Age (day) Value: 27
  misc_feature: MA Experiment 20001558 PARAMETER Experiment Name: At_Drought_Soil_Dry_P Parameter: Organism Value: A. thaliana
  misc_feature: MA Experiment 20001558 PARAMETER Experiment Name: At_Drought_Soil_Dry_P Parameter: Plant Line Value: WS
  misc_feature: MA Experiment 20001558 PARAMETER Experiment Name: At_Drought_Soil_Dry_P Parameter: Post Timepoint (hr) Value: 6
  misc_feature: MA Experiment 20001558 PARAMETER Experiment Name: At_Drought_Soil_Dry_P Parameter: Post-Treatment Value: Re-Water vs. No Drought
  misc_feature: MA Experiment 20001558 PARAMETER Experiment Name: At_Drought_Soil_Dry_P Parameter: Timepoint (day) Value: 13
  misc_feature: MA Experiment 20001558 PARAMETER Experiment Name: At_Drought_Soil_Dry_P Parameter: Treatment Value: Drought vs. No Drought
atcaagctccggactcaaaacccaaatctctgagaaagaatcaaagccaatattcgatcaatcaagctggagtggaagaaagggaaagtgaacccattcgtgaggggaataagatagaggttaattaggcccaaatcgatgcctttaaatgtagtcaatgatcgtgatggctcttctcgcattcttttgaccgaccctgccggatcaactgctgaggtgcttttgtatggagggcaagtggtttcttggaaaaacgaaaggagagagaagttgctttatatgagcaccaaggcgcaattgaagccaccaaaggcgatcaggggagggttacctatcagctttccacagtttggaaattttggtgcacttgagcgacatggatttgcccgtaacagattctggtcacttgataatgatccttcacctctgcctccggctaaccagcaatcaactgttgatttagtattgaagtctactgaagatgatttgaagatatggcctcatagctttgaacttcgtgttcgcatatctatcagtcctggaaaacttacaataatcccgcgtgtgaggaacactgacacaaaggcattttcctttatgttttcacttcgtaactacttatatgtatccgatataagtgaagttcgggttgagggtctggagacgcttgattatctggacaacttggtgcgtagagaaagattcacggagcaggcagatgcaattacctttgacggcgaggttgataaagtgtacttgaacacgccgacaaagattgccatcatagatcatgagaggaaaagaactatcgagttgcgaaaggaaggcatgccaaatgcagctgtgtggaacccttgggacaagaaggccaagagtattgcagatatgggagatgaggattacacaacaatgctgtgtgtagattctggtgctatagaaagcccaattgtgttgaagccacatgaagagtggaaaggaagacaagaactctctatcgtctcctcaagctactgcagcggtcagctcgatccacgtaaggttctttatggggattactgataatatatatgaaatcaaacttggaaacatcatcagtcttatattttgatcgtcttcatggataaagcgattgatgcccaaacaaatctgatatgatatgattttgtttggagctattgccctttgtgagtttctgacaggcacacagaaagataggcaaatgtagtattttgtaacgttgccttctgtgtggcggtcagggacttattaatatgtattatggttcacccggaaacatgagtcttatattgaatcgtcttcttcatg

SEQ ID NO: 38078 - protein, 306 aa, Arabidopsis thaliana
  peptide (1)..(306): Ceres Seq. ID no. 13489025
  misc_feature (13)..(285): Pfam Name: Aldose 1-epimerase Pfam Description: Aldose 1-epimerase
  misc_feature (10)..(302): Homolog of NCBI NO: 19387263 NR Description: putative apospory-associated protein C
  misc_feature (1)..(304): Homolog of NCBI NO: 40253263 NR Description: putative Aldose 1-epimerase
  misc_feature (5)..(304): Homolog of NCBI NO: 2501555 NR Description: POSSIBLE APOSPORY-ASSOCIATED PROTEIN C
  misc_feature (1)..(304): Homolog of NCBI NO: 38344152 NR Description: OSJNBa0041A02.19 [Oryza sativa (japonica
  misc_feature (10)..(302): Homolog of NCBI NO: 15242099 NR Description: aldose 1-epimerase family [Arabidopsis thaliana]
  misc_feature (1)..(305): Homolog of NCBI NO: 16612258 NR Description: AT3g01590/F4P13_13 [Arabidopsis thaliana]
  misc_feature (1)..(305): Homolog of NCBI NO: 18395868 NR Description: aldose 1-epimerase family [Arabidopsis thaliana]
  misc_feature (1)..(306): Homolog of NCBI NO: 18417396 NR Description: aldose 1-epimerase family [Arabidopsis thaliana]
  misc_feature (1)..(306): Homolog of NCBI NO: 28393808 NR Description: unknown protein [Arabidopsis thaliana]
  misc_feature (1)..(306): Homolog of NCBI NO: 11281678 NR Description: hypothetical protein F18O22.290 - Arabidopsis
MPLNVVNDRDGSSRILLTDPAGSTAEVLLYGGQVVSWKNERREKLLYMSTKAQLKPPKAIRGGLPISFPQFGNFGALERHGFARNRFWSLDNDPSPLPPANQQSTVDLVLKSTEDDLKIWPHSFELRVRISISPGKLTIIPRVRNTDTKAFSFMFSLRNYLYVSDISEVRVEGLETLDYLDNLVRRERFTEQADAITFDGEVDKVYLNTPTKIAIIDHERKRTIELRKEGMPNAAVWNPWDKKAKSIADMGDEDYTTMLCVDSGAIESPIVLKPHEEWKGRQELSIVSSSYCSGQLDPRKVLYGDY

SEQ ID NO: 38079 - protein, 259 aa, Arabidopsis thaliana
  peptide (1)..(259): Ceres Seq. ID no. 13489026
  misc_feature (1)..(238): Pfam Name: Aldose 1-epimerase Pfam Description: Aldose 1-epimerase
  misc_feature (1)..(255): Homolog of NCBI NO: 19387263 NR Description: putative apospory-associated protein C
  misc_feature (1)..(257): Homolog of NCBI NO: 40253263 NR Description: putative Aldose 1-epimerase
  misc_feature (1)..(257): Homolog of NCBI NO: 2501555 NR Description: POSSIBLE APOSPORY-ASSOCIATED PROTEIN C
  misc_feature (1)..(257): Homolog of NCBI NO: 38344152 NR Description: OSJNBa0041A02.19 [Oryza sativa (japonica
  misc_feature (1)..(255): Homolog of NCBI NO: 15242099 NR Description: aldose 1-epimerase family [Arabidopsis thaliana]
  misc_feature (1)..(258): Homolog of NCBI NO: 16612258 NR Description: AT3g01590/F4P13_13 [Arabidopsis thaliana]
  misc_feature (1)..(258): Homolog of NCBI NO: 18395868 NR Description: aldose 1-epimerase family [Arabidopsis thaliana]
  misc_feature (1)..(259): Homolog of NCBI NO: 18417396 NR Description: aldose 1-epimerase family [Arabidopsis thaliana]
  misc_feature (1)..(259): Homolog of NCBI NO: 28393808 NR Description: unknown protein [Arabidopsis thaliana]
  misc_feature (1)..(259): Homolog of NCBI NO: 11281678 NR Description: hypothetical protein F18O22.290 - Arabidopsis
MSTKAQLKPPKAIRGGLPISFPQFGNFGALERHGFARNRFWSLDNDPSPLPPANQQSTVDLVLKSTEDDLKIWPHSFELRVRISISPGKLTIIPRVRNTDTKAFSFMFSLRNYLYVSDISEVRVEGLETLDYLDNLVRRERFTEQADAITFDGEVDKVYLNTPTKIAIIDHERKRTIELRKEGMPNAAVWNPWDKKAKSIADMGDEDYTTMLCVDSGAIESPIVLKPHEEWKGRQELSIVSSSYCSGQLDPRKVLYGDY

SEQ ID NO: 38080 - protein, 153 aa, Arabidopsis thaliana
  peptide (1)..(153): Ceres Seq. ID no. 13489027
  misc_feature (1)..(132): Pfam Name: Aldose 1-epimerase Pfam Description: Aldose 1-epimerase
  misc_feature (1)..(149): Homolog of NCBI NO: 19387263 NR Description: putative apospory-associated protein C
  misc_feature (1)..(151): Homolog of NCBI NO: 40253263 NR Description: putative Aldose 1-epimerase
  misc_feature (1)..(151): Homolog of NCBI NO: 2501555 NR Description: POSSIBLE APOSPORY-ASSOCIATED PROTEIN C
  misc_feature (1)..(151): Homolog of NCBI NO: 38344152 NR Description: OSJNBa0041A02.19 [Oryza sativa (japonica
  misc_feature (1)..(149): Homolog of NCBI NO: 15242099 NR Description: aldose 1-epimerase family [Arabidopsis thaliana]
  misc_feature (1)..(152): Homolog of NCBI NO: 16612258 NR Description: AT3g01590/F4P13_13 [Arabidopsis thaliana]
  misc_feature (1)..(152): Homolog of NCBI NO: 18395868 NR Description: aldose 1-epimerase family [Arabidopsis thaliana]
  misc_feature (1)..(153): Homolog of NCBI NO: 18417396 NR Description: aldose 1-epimerase family [Arabidopsis thaliana]
  misc_feature (1)..(153): Homolog of NCBI NO: 28393808 NR Description: unknown protein [Arabidopsis thaliana]
  misc_feature (1)..(153): Homolog of NCBI NO: 11281678 NR Description: hypothetical protein F18O22.290 - Arabidopsis
MFSLRNYLYVSDISEVRVEGLETLDYLDNLVRRERFTEQADAITFDGEVDKVYLNTPTKIAIIDHERKRTIELRKEGMPNAAVWNPWDKKAKSIADMGDEDYTTMLCVDSGAIESPIVLKPHEEWKGRQELSIVSSSYCSGQLDPRKVLYGDY

SEQ ID NO: 38081 - DNA, 1108 bp, Arabidopsis thaliana
  misc_feature (1)..(1108): Ceres Seq. ID no. 12371248
  misc_feature: MA Experiment ID: 20000185 Result: Up-regulated in Transcription
  misc_feature: MA Experiment 20000185 PARAMETER Experiment Name: At_Roots__P Parameter: Age (day) Value: 7 vs. 21
  misc_feature: MA Experiment 20000185 PARAMETER Experiment Name: At_Roots__P Parameter: Organism Value: A. thaliana
  misc_feature: MA Experiment 20000185 PARAMETER Experiment Name: At_Roots__P Parameter: Tissue Value: Roots vs. Whole Plant
  misc_feature: MA Experiment ID: 20000227 Result: Up-regulated in Transcription
  misc_feature: MA Experiment 20000227 PARAMETER Experiment Name: At_Root-Tips-vs-Tops_P Parameter: Tissue Value: Root Tips vs. Root Tops
  misc_feature: MA Experiment ID: 20000437 Result: Down-regulated in Transcription
  misc_feature: MA Experiment 20000437 PARAMETER Experiment Name: At_Drought_P Parameter: Age (day) Value: 8
  misc_feature: MA Experiment 20000437 PARAMETER Experiment Name: At_Drought_P Parameter: Organism Value: A. thaliana
  misc_feature: MA Experiment 20000437 PARAMETER Experiment Name: At_Drought_P Parameter: Plant Line Value: WS
  misc_feature: MA Experiment 20000437 PARAMETER Experiment Name: At_Drought_P Parameter: Timepoint (hr) Value: 24
  misc_feature: MA Experiment 20000437 PARAMETER Experiment Name: At_Drought_P Parameter: Tissue Value: Whole Plant
  misc_feature: MA Experiment 20000437 PARAMETER Experiment Name: At_Drought_P Parameter: Treatment Value: Drought vs. No Drought
  misc_feature: MA Experiment ID: 20000794 Result: Down-regulated in Transcription
  misc_feature: MA Experiment 20000794 PARAMETER Experiment Name: At_Petals_P Parameter: Age (day) Value: 23-25 days
  misc_feature: MA Experiment 20000794 PARAMETER Experiment Name: At_Petals_P Parameter: Plant Line Value: WS
  misc_feature: MA Experiment 20000794 PARAMETER Experiment Name: At_Petals_P Parameter: Tissue Value: Petals vs. Whole plant
  misc_feature: MA Experiment ID: 20001451 Result: Down-regulated in Transcription
  misc_feature: MA Experiment 20001451 PARAMETER Experiment Name: At_Far-red-induction_P Parameter: Age (day) Value: 7
  misc_feature: MA Experiment 20001451 PARAMETER Experiment Name: At_Far-red-induction_P Parameter: Light Value: Far-red vs. White
  misc_feature: MA Experiment 20001451 PARAMETER Experiment Name: At_Far-red-induction_P Parameter: Organism Value: A. thaliana
  misc_feature: MA Experiment 20001451 PARAMETER Experiment Name: At_Far-red-induction_P Parameter: Plant Line Value: Columbia
  misc_feature: MA Experiment 20001451 PARAMETER Experiment Name: At_Far-red-induction_P Parameter: Timepoint (hr) Value: 24
  misc_feature: MA Experiment 20001451 PARAMETER Experiment Name: At_Far-red-induction_P Parameter: Tissue Value: Whole Plant
  misc_feature: MA Experiment ID: 20001557 Result: Up-regulated in Transcription
  misc_feature: MA Experiment 20001557 PARAMETER Experiment Name: At_Drought_Soil_Dry_P Parameter: Age (day) Value: 27
  misc_feature: MA Experiment 20001557 PARAMETER Experiment Name: At_Drought_Soil_Dry_P Parameter: Organism Value: A. thaliana
  misc_feature: MA Experiment 20001557 PARAMETER Experiment Name: At_Drought_Soil_Dry_P Parameter: Plant Line Value: WS
  misc_feature: MA Experiment 20001557 PARAMETER Experiment Name: At_Drought_Soil_Dry_P Parameter: Post Timepoint (hr) Value: 3
  misc_feature: MA Experiment 20001557 PARAMETER Experiment Name: At_Drought_Soil_Dry_P Parameter: Post-Treatment Value: Re-Water vs. No Drought
  misc_feature: MA Experiment 20001557 PARAMETER Experiment Name: At_Drought_Soil_Dry_P Parameter: Timepoint (day) Value: 13
  misc_feature: MA Experiment 20001557 PARAMETER Experiment Name: At_Drought_Soil_Dry_P Parameter: Treatment Value: Drought vs. No Drought
  misc_feature: MA Experiment ID: 20001558 Result: Up-regulated in Transcription
  misc_feature: MA Experiment 20001558 PARAMETER Experiment Name: At_Drought_Soil_Dry_P Parameter: Age (day) Value: 27
  misc_feature: MA Experiment 20001558 PARAMETER Experiment Name: At_Drought_Soil_Dry_P Parameter: Organism Value: A. thaliana
  misc_feature: MA Experiment 20001558 PARAMETER Experiment Name: At_Drought_Soil_Dry_P Parameter: Plant Line Value: WS
  misc_feature: MA Experiment 20001558 PARAMETER Experiment Name: At_Drought_Soil_Dry_P Parameter: Post Timepoint (hr) Value: 6
  misc_feature: MA Experiment 20001558 PARAMETER Experiment Name: At_Drought_Soil_Dry_P Parameter: Post-Treatment Value: Re-Water vs. No Drought
  misc_feature: MA Experiment 20001558 PARAMETER Experiment Name: At_Drought_Soil_Dry_P Parameter: Timepoint (day) Value: 13
  misc_feature: MA Experiment 20001558 PARAMETER Experiment Name: At_Drought_Soil_Dry_P Parameter: Treatment Value: Drought vs. No Drought
  misc_feature: MA Experiment ID: 20001560 Result: Up-regulated in Transcription
  misc_feature: MA Experiment 20001560 PARAMETER Experiment Name: At_Drought_Soil_Dry_P Parameter: Age (day) Value: 28
  misc_feature: MA Experiment 20001560 PARAMETER Experiment Name: At_Drought_Soil_Dry_P Parameter: Organism Value: A. thaliana
  misc_feature: MA Experiment 20001560 PARAMETER Experiment Name: At_Drought_Soil_Dry_P Parameter: Plant Line Value: WS
  misc_feature: MA Experiment 20001560 PARAMETER Experiment Name: At_Drought_Soil_Dry_P Parameter: Post Timepoint (hr) Value: None
  misc_feature: MA Experiment 20001560 PARAMETER Experiment Name: At_Drought_Soil_Dry_P Parameter: Post-Treatment Value: None
  misc_feature: MA Experiment 20001560 PARAMETER Experiment Name: At_Drought_Soil_Dry_P Parameter: Timepoint (day) Value: 14
  misc_feature: MA Experiment 20001560 PARAMETER Experiment Name: At_Drought_Soil_Dry_P Parameter: Treatment Value: Drought vs. No Drought
  misc_feature: MA Experiment ID: 20001757 Result: Up-regulated in Transcription
  misc_feature: MA Experiment 20001757 PARAMETER Experiment Name: At_50mM_NH4NO3_L-to-H_P Parameter: Timepoint (hr) Value: 6
  misc_feature: MA Experiment 20001757 PARAMETER Experiment Name: At_50mM_NH4NO3_L-to-H_P Parameter: Tissue Value: Leaf
  misc_feature: MA Experiment 20001757 PARAMETER Experiment Name: At_50mM_NH4NO3_L-to-H_P Parameter: Treatment Value: 50mM NH4NO3 vs 100mM Mannitol
aataaccttttcggtgctcaagcgccgtttctagggtttttctctgaggaagaagcgtttcatttctctgaatttcatcgaaaatggcggaaagaggaggagaaggcggcgcagagcgtggcggtgaccgtggtgacttcggacgtggattcggcggtggacgtggaggtggccgtggccgtgatcgtggtccaagaggccgtggaagacgtggaggccgtgcctcggaagaaacgaaatgggttccagtgaccaaactaggtcgtctagtggctgacaataaaataacgaagctagagcagatctatctccattctctcccagtaaaggagtaccaaatcatagatcatcttgttggtcctacgttgaaagacgaggttatgaagatcatgcctgttcagaaacaaaccagagctggtcaaaggactagattcaaggcctttgttgttgttggtgatggtaatggtcatgttggtttgggtgtcaagtgttctaaggaagttgctactgccattagaggagctattattcttgctaagctctctgttgttccggtgaggagaggttactgggggaataagattgggaagccacacactgtgccttgtaaggttactgggaagtgtggctctgttactgtgagaatggttcctgctccgagaggttctggtattgttgctgctagggttcctaagaaggttcttcagttcgctggtattgatgatgtctttacttcttccagaggatctactaaaactcttggaaactttgtcaaggcgacgtttgactgcttacagaagacatatgggttccttacaccagagttctggaaagagactagattctccagatcgccctaccaagagcacactgatttcttgtcgactaaggctgtttctgcaaccaaggttatcacggagggtgaagaccaagcttaagaccttcatgagataagttttggttgttcttaatactaattcctactttgaaaaagagtatttttttttcttgattatctatgagttttgttattggtggtttcgttactgttttggattttgttagatgtttgccttaatgcaaatttcaatgaaatagcttttgcaat

SEQ ID NO: 38082 - protein, 284 aa, Arabidopsis thaliana
  peptide (1)..(284): Ceres Seq. ID no. 12371249
  misc_feature (177)..(250): Pfam Name: Ribosomal protein S5, C-terminal domain Pfam Description: Ribosomal protein S5, C-terminal domain
  misc_feature (177)..(250): Pfam Name: Ribosomal protein S5, C-terminal domain Pfam Description: Ribosomal protein S5, C-terminal domain
  misc_feature (1)..(267): Homolog of NCBI NO: 34393314 NR Description: putative 40S ribosomal protein S2
  misc_feature (1)..(231): Homolog of NCBI NO: 8979936 NR Description: Identical to gene XW6 from Arabidopsis thaliana and contains a Ribosomal protein S5 PF|00333 domain. ESTs
  misc_feature (1)..(279): Homolog of NCBI NO: 15230312 NR Description: 40S ribosomal protein S2 homolog
  misc_feature (1)..(284): Homolog of NCBI NO: 21553851 NR Description: 40S ribosomal protein S2 [Arabidopsis thaliana]
  misc_feature (1)..(284): Homolog of NCBI NO: 15227443 NR Description: 40S ribosomal protein S2
  misc_feature (1)..(267): Homolog of NCBI NO: 34393314 NR Description: putative 40S ribosomal protein S2
  misc_feature (1)..(279): Homolog of NCBI NO: 15230312 NR Description: 40S ribosomal protein S2 homolog
  misc_feature (1)..(284): Homolog of NCBI NO: 15227443 NR Description: 40S ribosomal protein S2
  misc_feature (1)..(284): Homolog of NCBI NO: 15217951 NR Description: ribosomal protein S2, putative; protein id:
  misc_feature (1)..(284): Homolog of NCBI NO: 21618011 NR Description: ribosomal protein S2, putative [Arabidopsis
  misc_feature (1)..(284): Homolog of NCBI NO: 18406325 NR Description: ribosomal protein S2, putative
  misc_feature (1)..(284): Homolog of NCBI NO: 21539457 NR Description: ribosomal protein S2, putative [Arabidopsis
  misc_feature (3)..(284): Homolog of NCBI NO: 25294520 NR Description: hypothetical protein RF12
  misc_feature (1)..(284): Homolog of NCBI NO: 21553851 NR Description: 40S ribosomal protein S2 [Arabidopsis thaliana]
  misc_feature (1)..(231): Homolog of NCBI NO: 8979936 NR Description: Identical to gene XW6 from Arabidopsis thaliana and contains a Ribosomal protein S5 PF|00333 domain. ESTs
  misc_feature (3)..(284): Homolog of NCBI NO: 25294520 NR Description: hypothetical protein RF12
  misc_feature (1)..(284): Homolog of NCBI NO: 21539457 NR Description: ribosomal protein S2, putative [Arabidopsis
  misc_feature (1)..(284): Homolog of NCBI NO: 18406325 NR Description: ribosomal protein S2, putative
  misc_feature (1)..(284): Homolog of NCBI NO: 21618011 NR Description: ribosomal protein S2, putative [Arabidopsis
  misc_feature (1)..(284): Homolog of NCBI NO: 15217951 NR Description: ribosomal protein S2, putative; protein id:
MAERGGEGGAERGGDRGDFGRGFGGGRGGGRGRDRGPRGRGRRGGRASEETKWVPVTKLGRLVADNKITKLEQIYLHSLPVKEYQIIDHLVGPTLKDEVMKIMPVQKQTRAGQRTRFKAFVVVGDGNGHVGLGVKCSKEVATAIRGAIILAKLSVVPVRRGYWGNKIGKPHTVPCKVTGKCGSVTVRMVPAPRGSGIVAARVPKKVLQFAGIDDVFTSSRGSTKTLGNFVKATFDCLQKTYGFLTPEFWKETRFSRSPYQEHTDFLSTKAVSATKVITEGEDQA

SEQ ID NO: 38083 - protein, 185 aa, Arabidopsis thaliana
  peptide (1)..(185): Ceres Seq. ID no. 12371250
  misc_feature (78)..(151): Pfam Name: Ribosomal protein S5, C-terminal domain Pfam Description: Ribosomal protein S5, C-terminal domain
  misc_feature (78)..(151): Pfam Name: Ribosomal protein S5, C-terminal domain Pfam Description: Ribosomal protein S5, C-terminal domain
  misc_feature (1)..(168): Homolog of NCBI NO: 34393314 NR Description: putative 40S ribosomal protein S2
  misc_feature (1)..(132): Homolog of NCBI NO: 8979936 NR Description: Identical to gene XW6 from Arabidopsis thaliana and contains a Ribosomal protein S5 PF|00333 domain. ESTs
  misc_feature (1)..(180): Homolog of NCBI NO: 15230312 NR Description: 40S ribosomal protein S2 homolog
  misc_feature (1)..(185): Homolog of NCBI NO: 21553851 NR Description: 40S ribosomal protein S2 [Arabidopsis thaliana]
  misc_feature (1)..(185): Homolog of NCBI NO: 15227443 NR Description: 40S ribosomal protein S2
  misc_feature (1)..(168): Homolog of NCBI NO: 34393314 NR Description: putative 40S ribosomal protein S2
  misc_feature (1)..(180): Homolog of NCBI NO: 15230312 NR Description: 40S ribosomal protein S2 homolog
  misc_feature (1)..(185): Homolog of NCBI NO: 15227443 NR Description: 40S ribosomal protein S2
  misc_feature (1)..(185): Homolog of NCBI NO: 15217951 NR Description: ribosomal protein S2, putative; protein id:
  misc_feature (1)..(185): Homolog of NCBI NO: 21618011 NR Description: ribosomal protein S2, putative [Arabidopsis
  misc_feature (1)..(185): Homolog of NCBI NO: 18406325 NR Description: ribosomal protein S2, putative
  misc_feature (1)..(185): Homolog of NCBI NO: 21539457 NR Description: ribosomal protein S2, putative [Arabidopsis
  misc_feature (1)..(185): Homolog of NCBI NO: 25294520 NR Description: hypothetical protein RF12
  misc_feature (1)..(185): Homolog of NCBI NO: 21553851 NR Description: 40S ribosomal protein S2 [Arabidopsis thaliana]
  misc_feature (1)..(132): Homolog of NCBI NO: 8979936 NR Description: Identical to gene XW6 from Arabidopsis thaliana and contains a Ribosomal protein S5 PF|00333 domain. ESTs
  misc_feature (1)..(185): Homolog of NCBI NO: 25294520 NR Description: hypothetical protein RF12
  misc_feature (1)..(185): Homolog of NCBI NO: 21539457 NR Description: ribosomal protein S2, putative [Arabidopsis
  misc_feature (1)..(185): Homolog of NCBI NO: 18406325 NR Description: ribosomal protein S2, putative
  misc_feature (1)..(185): Homolog of NCBI NO: 21618011 NR Description: ribosomal protein S2, putative [Arabidopsis
  misc_feature (1)..(185): Homolog of NCBI NO: 15217951 NR Description: ribosomal protein S2, putative; protein id:
MKIMPVQKQTRAGQRTRFKAFVVVGDGNGHVGLGVKCSKEVATAIRGAIILAKLSVVPVRRGYWGNKIGKPHTVPCKVTGKCGSVTVRMVPAPRGSGIVAARVPKKVLQFAGIDDVFTSSRGSTKTLGNFVKATFDCLQKTYGFLTPEFWKETRFSRSPYQEHTDFLSTKAVSATKVITEGEDQA

SEQ ID NO: 38084 - protein, 182 aa, Arabidopsis thaliana
  peptide (1)..(182): Ceres Seq. ID no. 12371251
  misc_feature (75)..(148): Pfam Name: Ribosomal protein S5, C-terminal domain Pfam Description: Ribosomal protein S5, C-terminal domain
  misc_feature (75)..(148): Pfam Name: Ribosomal protein S5, C-terminal domain Pfam Description: Ribosomal protein S5, C-terminal domain
  misc_feature (1)..(165): Homolog of NCBI NO: 34393314 NR Description: putative 40S ribosomal protein S2
  misc_feature (1)..(129): Homolog of NCBI NO: 8979936 NR Description: Identical to gene XW6 from Arabidopsis thaliana and contains a Ribosomal protein S5 PF|00333 domain. ESTs
  misc_feature (1)..(177): Homolog of NCBI NO: 15230312 NR Description: 40S ribosomal protein S2 homolog
  misc_feature (1)..(182): Homolog of NCBI NO: 21553851 NR Description: 40S ribosomal protein S2 [Arabidopsis thaliana]
  misc_feature (1)..(182): Homolog of NCBI NO: 15227443 NR Description: 40S ribosomal protein S2
  misc_feature (1)..(165): Homolog of NCBI NO: 34393314 NR Description: putative 40S ribosomal protein S2
  misc_feature (1)..(177): Homolog of NCBI NO: 15230312 NR Description: 40S ribosomal protein S2 homolog
  misc_feature (1)..(182): Homolog of NCBI NO: 15227443 NR Description: 40S ribosomal protein S2
  misc_feature (1)..(182): Homolog of NCBI NO: 15217951 NR Description: ribosomal protein S2, putative; protein id:
  misc_feature (1)..(182): Homolog of NCBI NO: 21618011 NR Description: ribosomal protein S2, putative [Arabidopsis
  misc_feature (1)..(182): Homolog of NCBI NO: 18406325 NR Description: ribosomal protein S2, putative
  misc_feature (1)..(182): Homolog of NCBI NO: 21539457 NR Description: ribosomal protein S2, putative [Arabidopsis
  misc_feature (1)..(182): Homolog of NCBI NO: 25294520 NR Description: hypothetical protein RF12
  misc_feature (1)..(182): Homolog of NCBI NO: 21553851 NR Description: 40S ribosomal protein S2 [Arabidopsis thaliana]
  misc_feature (1)..(129): Homolog of NCBI NO: 8979936 NR Description: Identical to gene XW6 from Arabidopsis thaliana and contains a Ribosomal protein S5 PF|00333 domain. ESTs
  misc_feature (1)..(182): Homolog of NCBI NO: 25294520 NR Description: hypothetical protein RF12
  misc_feature (1)..(182): Homolog of NCBI NO: 21539457 NR Description: ribosomal protein S2, putative [Arabidopsis
  misc_feature (1)..(182): Homolog of NCBI NO: 18406325 NR Description: ribosomal protein S2, putative
  misc_feature (1)..(182): Homolog of NCBI NO: 21618011 NR Description: ribosomal protein S2, putative [Arabidopsis
  misc_feature (1)..(182): Homolog of NCBI NO: 15217951 NR Description: ribosomal protein S2, putative; protein id:
MPVQKQTRAGQRTRFKAFVVVGDGNGHVGLGVKCSKEVATAIRGAIILAKLSVVPVRRGYWGNKIGKPHTVPCKVTGKCGSVTVRMVPAPRGSGIVAARVPKKVLQFAGIDDVFTSSRGSTKTLGNFVKATFDCLQKTYGFLTPEFWKETRFSRSPYQEHTDFLSTKAVSATKVITEGEDQA

SEQ ID NO: 38085 - DNA, 854 bp, Arabidopsis thaliana
  misc_feature (1)..(854): Ceres Seq. ID no. 12330075
  misc_feature: MA Experiment ID: 20000179 Result: Down-regulated in Transcription
  misc_feature: MA Experiment 20000179 PARAMETER Experiment Name: At_Germinating_Seeds_P Parameter: Age (hr) Value: 6 vs. 0
  misc_feature: MA Experiment 20000179 PARAMETER Experiment Name: At_Germinating_Seeds_P Parameter: Tissue Value: Germinating Seeds
  misc_feature: MA Experiment ID: 20000180 Result: Up-regulated in Transcription
  misc_feature: MA Experiment 20000180 PARAMETER Experiment Name: At_Germinating_Seeds_P Parameter: Age (hr) Value: 24 vs. 0
  misc_feature: MA Experiment 20000180 PARAMETER Experiment Name: At_Germinating_Seeds_P Parameter: Tissue Value: Germinating Seeds
  misc_feature: MA Experiment ID: 20000185 Result: Up-regulated in Transcription
  misc_feature: MA Experiment 20000185 PARAMETER Experiment Name: At_Roots__P Parameter: Age (day) Value: 7 vs. 21
  misc_feature: MA Experiment 20000185 PARAMETER Experiment Name: At_Roots__P Parameter: Organism Value: A. thaliana
  misc_feature: MA Experiment 20000185 PARAMETER Experiment Name: At_Roots__P Parameter: Tissue Value: Roots vs. Whole Plant
  misc_feature: MA Experiment ID: 20000234 Result: Down-regulated in Transcription
  misc_feature: MA Experiment 20000234 PARAMETER Experiment Name: At_Siliques_P Parameter: Age (day) Value: 21
  misc_feature: MA Experiment 20000234 PARAMETER Experiment Name: At_Siliques_P Parameter: Organism Value: A. thaliana
  misc_feature: MA Experiment 20000234 PARAMETER Experiment Name: At_Siliques_P Parameter: Plant Line Value: WS
  misc_feature: MA Experiment 20000234 PARAMETER Experiment Name: At_Siliques_P Parameter: Tissue Value: Less Than 5mm Siliques vs. Whole Plant
  misc_feature: MA Experiment ID: 20000265 Result: Down-regulated in Transcription
  misc_feature: MA Experiment 20000265 PARAMETER Experiment Name: At_Open_Flower_P Parameter: Age (day) Value: 21
  misc_feature: MA Experiment 20000265 PARAMETER Experiment Name: At_Open_Flower_P Parameter: Plant Line Value: WS
  misc_feature: MA Experiment 20000265 PARAMETER Experiment Name: At_Open_Flower_P Parameter: Tissue Value: Closed Flower vs. Whole Plant
  misc_feature: MA Experiment ID: 20000439 Result: Up-regulated in Transcription
  misc_feature: MA Experiment 20000439 PARAMETER Experiment Name: At_Roots__P Parameter: Age (day) Value: 14 vs. 21
  misc_feature: MA Experiment 20000439 PARAMETER Experiment Name: At_Roots__P Parameter: Organism Value: A. thaliana
  misc_feature: MA Experiment 20000439 PARAMETER Experiment Name: At_Roots__P Parameter: Tissue Value: Roots vs. Whole Plant
  misc_feature: MA Experiment ID: 20000445 Result: Up-regulated in Transcription
  misc_feature: MA Experiment 20000445 PARAMETER Experiment Name: At_100uM_NAA__P Parameter: Age (day) Value: 14
  misc_feature: MA Experiment 20000445 PARAMETER Experiment Name: At_100uM_NAA__P Parameter: Organism Value: A. thaliana
  misc_feature: MA Experiment 20000445 PARAMETER Experiment Name: At_100uM_NAA__P Parameter: Plant Line Value: WS
  misc_feature: MA Experiment 20000445 PARAMETER Experiment Name: At_100uM_NAA__P Parameter: Timepoint (hr) Value: 6
  misc_feature: MA Experiment 20000445 PARAMETER Experiment Name: At_100uM_NAA__P Parameter: Tissue Value: Aerial
  misc_feature: MA Experiment 20000445 PARAMETER Experiment Name: At_100uM_NAA__P Parameter: Treatment Value: 100uM NAA vs. No Treatment
  misc_feature: MA Experiment ID: 20000527 Result: Down-regulated in Transcription
  misc_feature: MA Experiment 20000527 PARAMETER Experiment Name: At_10percent_PEG_P Parameter: Age (day) Value: 20
  misc_feature: MA Experiment 20000527 PARAMETER Experiment Name: At_10percent_PEG_P Parameter: Organism Value: A. thaliana
  misc_feature: MA Experiment 20000527 PARAMETER Experiment Name: At_10percent_PEG_P Parameter: Plant Line Value: WS
  misc_feature: MA Experiment 20000527 PARAMETER Experiment Name: At_10percent_PEG_P Parameter: Timepoint (day) Value: 20
  misc_feature: MA Experiment 20000527 PARAMETER Experiment Name: At_10percent_PEG_P Parameter: Tissue Value: Whole Plant
  misc_feature: MA Experiment 20000527 PARAMETER Experiment Name: At_10percent_PEG_P Parameter: Treatment Value: 10percent PEG vs. No Treatment
  misc_feature: MA Experiment ID: 20000573 Result: Down-regulated in Transcription
  misc_feature: MA Experiment 20000573 PARAMETER Experiment Name: At_100uM_ABA_Mutants__P Parameter: Organism Value: A. thaliana
  misc_feature: MA Experiment 20000573 PARAMETER Experiment Name: At_100uM_ABA_Mutants__P Parameter: Plant Line Value: CS22 vs. Ler wt
  misc_feature: MA Experiment 20000573 PARAMETER Experiment Name: At_100uM_ABA_Mutants__P Parameter: Timepoint (hr) Value: N/A
  misc_feature: MA Experiment 20000573 PARAMETER Experiment Name: At_100uM_ABA_Mutants__P Parameter: Tissue Value: Whole Plant
  misc_feature: MA Experiment 20000573 PARAMETER Experiment Name: At_100uM_ABA_Mutants__P Parameter: Treatment Value: None
  misc_feature: MA Experiment ID: 20000574 Result: Down-regulated in Transcription
  misc_feature: MA Experiment 20000574 PARAMETER Experiment Name: At_100uM_ABA_Mutants__P Parameter: Organism Value: A. thaliana
  misc_feature: MA Experiment 20000574 PARAMETER Experiment Name: At_100uM_ABA_Mutants__P Parameter: Plant Line Value: CS23 vs. Ler wt
  misc_feature: MA Experiment 20000574 PARAMETER Experiment Name: At_100uM_ABA_Mutants__P Parameter: Timepoint (hr) Value: N/A
  misc_feature: MA Experiment 20000574 PARAMETER Experiment Name: At_100uM_ABA_Mutants__P Parameter: Tissue Value: Whole Plant
  misc_feature: MA Experiment 20000574 PARAMETER Experiment Name: At_100uM_ABA_Mutants__P Parameter: Treatment Value: None
  misc_feature: MA Experiment ID: 20000794 Result: Down-regulated in Transcription
  misc_feature: MA Experiment 20000794 PARAMETER Experiment Name: At_Petals_P Parameter: Age (day) Value: 23-25 days
  misc_feature: MA Experiment 20000794 PARAMETER Experiment Name: At_Petals_P Parameter: Plant Line Value: WS
  misc_feature: MA Experiment 20000794 PARAMETER Experiment Name: At_Petals_P Parameter: Tissue Value: Petals vs. Whole plant
  misc_feature: MA Experiment ID: 20001248 Result: Up-regulated in Transcription
  misc_feature: MA Experiment 20001248 PARAMETER Experiment Name: At_Far-red-induction_P Parameter: Age (day) Value: 7
  misc_feature: MA Experiment 20001248 PARAMETER Experiment Name: At_Far-red-induction_P Parameter: Light Value: Far-red vs. White
  misc_feature: MA Experiment 20001248 PARAMETER Experiment Name: At_Far-red-induction_P Parameter: Organism Value: A. thaliana
  misc_feature: MA Experiment 20001248 PARAMETER Experiment Name: At_Far-red-induction_P Parameter: Plant Line Value: Columbia
  misc_feature: MA Experiment 20001248 PARAMETER Experiment Name: At_Far-red-induction_P Parameter: Timepoint (hr) Value: 4
  misc_feature: MA Experiment 20001248 PARAMETER Experiment Name: At_Far-red-induction_P Parameter: Tissue Value: Whole Plant
  misc_feature: MA Experiment ID: 20001450 Result: Up-regulated in Transcription
  misc_feature: MA Experiment 20001450 PARAMETER Experiment Name: At_Far-red-induction_P Parameter: Age (day) Value: 7
  misc_feature: MA Experiment 20001450 PARAMETER Experiment Name: At_Far-red-induction_P Parameter: Light Value: Far-red vs. White
  misc_feature: MA Experiment 20001450 PARAMETER Experiment Name: At_Far-red-induction_P Parameter: Organism Value: A. thaliana
  misc_feature: MA Experiment 20001450 PARAMETER Experiment Name: At_Far-red-induction_P Parameter: Plant Line Value: Columbia
  misc_feature: MA Experiment 20001450 PARAMETER Experiment Name: At_Far-red-induction_P Parameter: Timepoint (hr) Value: 8
  misc_feature: MA Experiment 20001450 PARAMETER Experiment Name: At_Far-red-induction_P Parameter: Tissue Value: Whole Plant
  misc_feature: MA Experiment ID: 20001770 Result: Up-regulated in Transcription
  misc_feature: MA Experiment 20001770 PARAMETER Experiment Name: At_Far-red-enriched-adult_P Parameter: Age (day) Value: 28
  misc_feature: MA Experiment 20001770 PARAMETER Experiment Name: At_Far-red-enriched-adult_P Parameter: Light Value: Far-red enriched vs. White
  misc_feature: MA Experiment 20001770 PARAMETER Experiment Name: At_Far-red-enriched-adult_P Parameter: Organism Value: A. thaliana
  misc_feature: MA Experiment 20001770 PARAMETER Experiment Name: At_Far-red-enriched-adult_P Parameter: Plant Line Value: Columbia
  misc_feature: MA Experiment 20001770 PARAMETER Experiment Name: At_Far-red-enriched-adult_P Parameter: Timepoint (hr) Value: 8
  misc_feature: MA Experiment 20001770 PARAMETER Experiment Name: At_Far-red-enriched-adult_P Parameter: Tissue Value: Aerial
  misc_feature: MA Experiment ID: 20001771 Result: Up-regulated in Transcription
  misc_feature: MA Experiment 20001771 PARAMETER Experiment Name: At_Far-red-enriched-adult_P Parameter: Age (day) Value: 28
  misc_feature: MA Experiment 20001771 PARAMETER Experiment Name: At_Far-red-enriched-adult_P Parameter: Light Value: Far-red enriched vs. White
  misc_feature: MA Experiment 20001771 PARAMETER Experiment Name: At_Far-red-enriched-adult_P Parameter: Organism Value: A. thaliana
  misc_feature: MA Experiment 20001771 PARAMETER Experiment Name: At_Far-red-enriched-adult_P Parameter: Plant Line Value: Columbia
  misc_feature: MA Experiment 20001771 PARAMETER Experiment Name: At_Far-red-enriched-adult_P Parameter: Timepoint (hr) Value: 16
  misc_feature: MA Experiment 20001771 PARAMETER Experiment Name: At_Far-red-enriched-adult_P Parameter: Tissue Value: Aerial
  misc_feature: MA Experiment ID: 20001904 Result: Up-regulated in Transcription
  misc_feature: MA Experiment 20001904 PARAMETER Experiment Name: At_Drought_Reproduction_P Parameter: Age (day) Value: 37
  misc_feature: MA Experiment 20001904 PARAMETER Experiment Name: At_Drought_Reproduction_P Parameter: Organism Value: A. thaliana
  misc_feature: MA Experiment 20001904 PARAMETER Experiment Name: At_Drought_Reproduction_P Parameter: Plant Line Value: WS
  misc_feature: MA Experiment 20001904 PARAMETER Experiment Name: At_Drought_Reproduction_P Parameter: Timepoint (day) Value: 7
  misc_feature: MA Experiment 20001904 PARAMETER Experiment Name: At_Drought_Reproduction_P Parameter: Tissue Value: Rosettes
  misc_feature: MA Experiment 20001904 PARAMETER Experiment Name: At_Drought_Reproduction_P Parameter: Treatment Value: Drought vs. No Drought
attttagaaaaaataaacaaacaaacaaaccaaaacaccatggagcttaaaaatacaatctttctagtcatacttctatcaataaccattctccaatcttcatctgcaaccccaaaccggtcggaatcagaccagtttattgtgtcttcatgccaaaccacccaatatccatcactatgcgtgcacacactctctgcttacgccaccaagatccgccacaacaatgaccaagatctcgcccagactgctctcatcatcagcttggctcgagccaaatccgttactatcttcgtcgccaaactaaccaaagagacaccaagatttaaacgtagggaatatctagcaatcaaagattgcatcgaagtgctaggcaatagcgtggaccggttagctcaatcggttaaggaacttgctcgagctggtcatgctgtggctagtgaggacttcatgtggaaaatgagtaacgttcaaacatgggtcagtgccgctttgacggacgagacaacgtgtctagatggattctcagaacgagccatgggaggcaaagtgaagagactgattcggtataaggtggttcacgtggctcaagtcactagcaatgctcttgctttggttaatcagtttgcagagaagcgaagtgtgaagtttccttaaatggacttaaatgtgaaaattttggcttgtaagtgagagtttgaatctaaacttcaattagttgtgtaaattgttatcttttttttttttgtcggtcggaaagaaaactcaagattgtgtaacaatctttgttgtgtcctgcataatattgtattttaagataatgatatatagtcaccttttttgggtgtaaattatgg

SEQ ID NO: 38086 - protein, 217 aa, Arabidopsis thaliana
  peptide (1)..(217): Ceres Seq. ID no. 12330076
  misc_feature (15)..(211): Homolog of NCBI NO: 15234982 NR Description: putative protein
  misc_feature (19)..(211): Homolog of NCBI NO: 7488727 NR Description: 21K protein precursor - alfalfa
  misc_feature (19)..(210): Homolog of NCBI NO: 21618088 NR Description: ripening-related protein-like [Arabidopsis
  misc_feature (19)..(210): Homolog of NCBI NO: 15241799 NR Description: ripening-related protein - like
  misc_feature (14)..(211): Homolog of NCBI NO: 112717 NR Description: 21 KD PROTEIN PRECURSOR (1.2 PROTEIN)
  misc_feature (22)..(211): Homolog of NCBI NO: 7406663 NR Description: putative ripening-related protein [Vitis vinifera]
  misc_feature (20)..(211): Homolog of NCBI NO: 21555297 NR Description: unknown [Arabidopsis thaliana]
  misc_feature (20)..(211): Homolog of NCBI NO: 15234547 NR Description: putative protein
  misc_feature (14)..(217): Homolog of NCBI NO: 18407657 NR Description: expressed protein
  misc_feature (14)..(217): Homolog of NCBI NO: 21618013 NR Description: putative ripening-related protein [Arabidopsis
ILEKINKQTNQNTMELKNTIFLVILLSITILQSSSATPNRSESDQFIVSSCQTTQYPSLCVHTLSAYATKIRHNNDQDLAQTALIISLARAKSVTIFVAKLTKETPRFKRREYLAIKDCIEVLGNSVDRLAQSVKELARAGHAVASEDFMWKMSNVQTWVSAALTDETTCLDGFSERAMGGKVKRLIRYKVVHVAQVTSNALALVNQFAEKRSVKFP

SEQ ID NO: 38087 - protein, 204 aa, Arabidopsis thaliana
  peptide (1)..(204): Ceres Seq. ID no. 12330077
  misc_feature (2)..(198): Homolog of NCBI NO: 15234982 NR Description: putative protein
  misc_feature (6)..(198): Homolog of NCBI NO: 7488727 NR Description: 21K protein precursor - alfalfa
  misc_feature (6)..(197): Homolog of NCBI NO: 21618088 NR Description: ripening-related protein-like [Arabidopsis
  misc_feature (6)..(197): Homolog of NCBI NO: 15241799 NR Description: ripening-related protein - like
  misc_feature (1)..(198): Homolog of NCBI NO: 112717 NR Description: 21 KD PROTEIN PRECURSOR (1.2 PROTEIN)
  misc_feature (9)..(198): Homolog of NCBI NO: 7406663 NR Description: putative ripening-related protein [Vitis vinifera]
  misc_feature (7)..(198): Homolog of NCBI NO: 21555297 NR Description: unknown [Arabidopsis thaliana]
  misc_feature (7)..(198): Homolog of NCBI NO: 15234547 NR Description: putative protein
  misc_feature (1)..(204): Homolog of NCBI NO: 18407657 NR Description: expressed protein
  misc_feature (1)..(204): Homolog of NCBI NO: 21618013 NR Description: putative ripening-related protein [Arabidopsis
MELKNTIFLVILLSITILQSSSATPNRSESDQFIVSSCQTTQYPSLCVHTLSAYATKIRHNNDQDLAQTALIISLARAKSVTIFVAKLTKETPRFKRREYLAIKDCIEVLGNSVDRLAQSVKELARAGHAVASEDFMWKMSNVQTWVSAALTDETTCLDGFSERAMGGKVKRLIRYKVVHVAQVTSNALALVNQFAEKRSVKFP

SEQ ID NO: 38088 - DNA, 829 bp, Arabidopsis thaliana
  misc_feature (1)..(829): Ceres Seq. ID no. 12660820
  misc_feature: MA Experiment ID: 20000179 Result: Up-regulated in Transcription
  misc_feature: MA Experiment 20000179 PARAMETER Experiment Name: At_Germinating_Seeds_P Parameter: Age (hr) Value: 6 vs. 0
  misc_feature: MA Experiment 20000179 PARAMETER Experiment Name: At_Germinating_Seeds_P Parameter: Tissue Value: Germinating Seeds
  misc_feature: MA Experiment ID: 20000180 Result: Up-regulated in Transcription
  misc_feature: MA Experiment 20000180 PARAMETER Experiment Name: At_Germinating_Seeds_P Parameter: Age (hr) Value: 24 vs. 0
  misc_feature: MA Experiment 20000180 PARAMETER Experiment Name: At_Germinating_Seeds_P Parameter: Tissue Value: Germinating Seeds
  misc_feature: MA Experiment ID: 20000224 Result: Down-regulated in Transcription
aagcaactactctctctctctctctttcttctgccatcgccaaaaacttgtcttttgcttcttatttggtctcagctctgatcttttgattcaacggctcccggagacgacggaagcaatgcagttcttcggtggatctgagattagtccgtcgccgccagttccgacggcgagtggaaacaacgcgcacatgatgtacgttttcaatcgtaacggtgtatgtcttctctacaaagaatggaatcggcctcttcatacacttaatcctcagcaagatcacaagctcatgtttggtcttctcttctctctcaaatctctcaccgctaagatggatccagtcaatgcggataaaggaaatcttggggttccacagttgccaggacaaggttgctctttccatagtttccgtacgaatacttacaagctaagtttcatggagactccctctggtattaagattatcttagtaactcatccaaagaccggagatttacgcgaatccttgaagtacatctacagtttatacgttgaatatgtcgtaaaaaatcctatatacagcccaggatctccaatcaagtcggagttgttcaacactgcacttgaccagtacgtaaggagcatctcttagtgtgtgcattacagatttgtccattggaacttctctccttcaacagaactatcgtctgaacaatctctgaaaagaagagagaattgtagtagagagatttatcttgagttcgactgttttctctgcaaatctatgtttcgtttaccctttttattaactccactgtattggcttgctatcaatgatgttcatggtttactc

SEQ ID NO: 38089 - protein, 208 aa, Arabidopsis thaliana
  peptide (1)..(208): Ceres Seq. ID no. 12660821
  misc_feature (62)..(207): Pfam Name: Sybindin-like family Pfam Description: Sybindin-like family
  misc_feature (63)..(206): Homolog of NCBI NO: 19113462 NR Description: hypothetical protein [Schizosaccharomyces pombe]
  misc_feature (132)..(208): Homolog of NCBI NO: 19115000 NR Description: conserved hypothetical protein
  misc_feature (92)..(207): Homolog of NCBI NO: 40740926 NR Description: hypothetical protein AN8828.2 [Aspergillus
  misc_feature (63)..(208): Homolog of NCBI NO: 19114985 NR Description: hypothetical protein [Schizosaccharomyces pombe]
  misc_feature (88)..(207): Homolog of NCBI NO: 28828451 NR Description: similar to Homo sapiens (Human). MUM2 protein
  misc_feature (65)..(205): Homolog of NCBI NO: 24651330 NR Description: CG1359-PA [Drosophila melanogaster]
  misc_feature (63)..(207): Homolog of NCBI NO: 10864021 NR Description: MUM2 protein [Homo sapiens]
  misc_feature (63)..(207): Homolog of NCBI NO: 20881775 NR Description: similar to MUM2 protein [Homo sapiens] [Mus
  misc_feature (47)..(207): Homolog of NCBI NO: 34914656 NR Description: P0504D03.19 [Oryza sativa (japonica
  misc_feature (40)..(208): Homolog of NCBI NO: 15223752 NR Description: unknown protein; protein id: At1g51160.1
SNYSLSLSFFCHRQKLVFCFLFGLSSDLLIQRLPETTEAMQFFGGSEISPSPPVPTASGNNAHMMYVFNRNGVCLLYKEWNRPLHTLNPQQDHKLMFGLLFSLKSLTAKMDPVNADKGNLGVPQLPGQGCSFHSFRTNTYKLSFMETPSGIKIILVTHPKTGDLRESLKYIYSLYVEYVVKNPIYSPGSPIKSELFNTALDQYVRSIS

SEQ ID NO: 38090 - protein, 169 aa, Arabidopsis thaliana; identical to SEQ ID NO: 24678
  peptide (1)..(169): Ceres Seq. ID no. 12660822
  misc_feature (23)..(168): Pfam Name: Sybindin-like family Pfam Description: Sybindin-like family
  misc_feature (24)..(167): Homolog of NCBI NO: 19113462 NR Description: hypothetical protein [Schizosaccharomyces pombe]
  misc_feature (93)..(169): Homolog of NCBI NO: 19115000 NR Description: conserved hypothetical protein
  misc_feature (53)..(168): Homolog of NCBI NO: 40740926 NR Description: hypothetical protein AN8828.2 [Aspergillus
  misc_feature (24)..(169): Homolog of NCBI NO: 19114985 NR Description: hypothetical protein [Schizosaccharomyces pombe]
  misc_feature (49)..(168): Homolog of NCBI NO: 28828451 NR Description: similar to Homo sapiens (Human). MUM2 protein
  misc_feature (26)..(166): Homolog of NCBI NO: 24651330 NR Description: CG1359-PA [Drosophila melanogaster]
  misc_feature (24)..(168): Homolog of NCBI NO: 10864021 NR Description: MUM2 protein [Homo sapiens]
  misc_feature (24)..(168): Homolog of NCBI NO: 20881775 NR Description: similar to MUM2 protein [Homo sapiens] [Mus
  misc_feature (8)..(168): Homolog of NCBI NO: 34914656 NR Description: P0504D03.19 [Oryza sativa (japonica
  misc_feature (1)..(169): Homolog of NCBI NO: 15223752 NR Description: unknown protein; protein id: At1g51160.1

SEQ ID NO: 38091 - protein, 145 aa, Arabidopsis thaliana; identical to SEQ ID NO: 24679
  peptide (1)..(145): Ceres Seq. ID no. 12660823
  misc_feature (1)..(144): Pfam Name: Sybindin-like family Pfam Description: Sybindin-like family
  misc_feature (1)..(143): Homolog of NCBI NO: 19113462 NR Description: hypothetical protein [Schizosaccharomyces pombe]
  misc_feature (69)..(145): Homolog of NCBI NO: 19115000 NR Description: conserved hypothetical protein
  misc_feature (29)..(144): Homolog of NCBI NO: 40740926 NR Description: hypothetical protein AN8828.2 [Aspergillus
  misc_feature (1)..(145): Homolog of NCBI NO: 19114985 NR Description: hypothetical protein [Schizosaccharomyces pombe]
  misc_feature (25)..(144): Homolog of NCBI NO: 28828451 NR Description: similar to Homo sapiens (Human). MUM2 protein
  misc_feature (2)..(142): Homolog of NCBI NO: 24651330 NR Description: CG1359-PA [Drosophila melanogaster]
  misc_feature (1)..(144): Homolog of NCBI NO: 10864021 NR Description: MUM2 protein [Homo sapiens]
  misc_feature (1)..(144): Homolog of NCBI NO: 20881775 NR Description: similar to MUM2 protein [Homo sapiens] [Mus
  misc_feature (1)..(144): Homolog of NCBI NO: 34914656 NR Description: P0504D03.19 [Oryza sativa (japonica
  misc_feature (1)..(145): Homolog of NCBI NO: 15223752 NR Description: unknown protein; protein id: At1g51160.1

SEQ ID NO: 38092 - DNA, 1347 bp, Arabidopsis thaliana
  misc_feature (1)..(1347): Ceres Seq. ID no. 12371273
  misc_feature: MA Experiment ID: 108434 Result: Down-regulated in Transcription
  misc_feature: MA Experiment 108434 PARAMETER Experiment Name: At_Root_Tips_cDNA_P Parameter: Tissue Value: Root Tips
  misc_feature: MA Experiment ID: 108461 Result: Down-regulated in Transcription
  misc_feature: MA Experiment 108461 PARAMETER Experiment Name: At_Germinating_Seeds_cDNA_P Parameter: Age (day) Value: 1 vs. 0
  misc_feature: MA Experiment 108461 PARAMETER Experiment Name: At_Germinating_Seeds_cDNA_P Parameter: Tissue Value: Germinating Seeds
  misc_feature: MA Experiment ID: 108462 Result: Down-regulated in Transcription
  misc_feature: MA Experiment 108462 PARAMETER Experiment Name: At_Germinating_Seeds_cDNA_P Parameter: Age (day) Value: 2 vs. 0
  misc_feature: MA Experiment 108462 PARAMETER Experiment Name: At_Germinating_Seeds_cDNA_P Parameter: Tissue Value: Germinating Seeds
  misc_feature: MA Experiment ID: 108464 Result: Down-regulated in Transcription
  misc_feature: MA Experiment 108464 PARAMETER Experiment Name: At_Germinating_Seeds_cDNA_P Parameter: Age (day) Value: 4 vs. 0
  misc_feature: MA Experiment 108464 PARAMETER Experiment Name: At_Germinating_Seeds_cDNA_P Parameter: Tissue Value: Germinating Seeds
  misc_feature: MA Experiment ID: 108501 Result: Up-regulated in Transcription
  misc_feature: MA Experiment 108501 PARAMETER Experiment Name: At_ap2_floral_buds_cDNA_P Parameter: Plant Line Value: ap2 (Ler.)
  misc_feature: MA Experiment 108501 PARAMETER Experiment Name: At_ap2_floral_buds_cDNA_P Parameter: Tissue Value: Closed Flower
  misc_feature: MA Experiment ID: 108573 Result: Up-regulated in Transcription
  misc_feature: MA Experiment 108573 PARAMETER Experiment Name: At_Drought_cDNA_P Parameter: Timepoint (hr) Value: 6
  misc_feature: MA Experiment 108573 PARAMETER Experiment Name: At_Drought_cDNA_P Parameter: Tissue Value: Aerial
  misc_feature: MA Experiment 108573 PARAMETER Experiment Name: At_Drought_cDNA_P Parameter: Treatment Value: Drought vs. No Drought
  misc_feature: MA Experiment ID: 108594 Result: Down-regulated in Transcription
  misc_feature: MA Experiment 108594 PARAMETER Experiment Name: At_Ler-rhl_Root_cDNA_P Parameter: Plant Line Value: null
  misc_feature: MA Experiment ID: 108595 Result: Down-regulated in Transcription
  misc_feature: MA Experiment 108595 PARAMETER Experiment Name: At_Ler-pi_Ovule_cDNA_P Parameter: Plant Line Value: null
  misc_feature: MA Experiment ID: 20000087 Result: Down-regulated in Transcription
  misc_feature: MA Experiment 20000087 PARAMETER Experiment Name: At_100uM_ABA_Mutants_cDNA_P Parameter: Plant Line Value: WS
  misc_feature: MA Experiment 20000087 PARAMETER Experiment Name: At_100uM_ABA_Mutants_cDNA_P Parameter: Timepoint (hr) Value: 6
  misc_feature: MA Experiment 20000087 PARAMETER Experiment Name: At_100uM_ABA_Mutants_cDNA_P Parameter: Tissue Value: Aerial
  misc_feature: MA Experiment 20000087 PARAMETER Experiment Name: At_100uM_ABA_Mutants_cDNA_P Parameter: Treatment Value: 100uM ABA vs. No Treatment
  misc_feature: MA Experiment ID: 20000180 Result: Down-regulated in Transcription
  misc_feature: MA Experiment 20000180 PARAMETER Experiment Name: At_Germinating_Seeds_P Parameter: Age (hr) Value: 24 vs. 0
  misc_feature: MA Experiment 20000180 PARAMETER Experiment Name: At_Germinating_Seeds_P Parameter: Tissue Value: Germinating Seeds
  misc_feature: MA Experiment ID: 20000184 Result: Down-regulated in Transcription
  misc_feature: MA Experiment 20000184 PARAMETER Experiment Name: At_Shoots__P Parameter: Age (day) Value: 7
  misc_feature: MA Experiment 20000184 PARAMETER Experiment Name: At_Shoots__P Parameter: Tissue Value: Shoots vs. Whole Plant
  misc_feature: MA Experiment ID: 20000264 Result: Down-regulated in Transcription
  misc_feature: MA Experiment 20000264 PARAMETER Experiment Name: At_Open_Flower_P Parameter: Age (day) Value: 21
  misc_feature: MA Experiment 20000264 PARAMETER Experiment Name: At_Open_Flower_P Parameter: Plant Line Value: WS
  misc_feature: MA Experiment 20000264 PARAMETER Experiment Name: At_Open_Flower_P Parameter: Tissue Value: Open Flower vs. Whole Plant
  misc_feature: MA Experiment ID: 20000265 Result: Down-regulated in Transcription
  misc_feature: MA Experiment 20000265 PARAMETER Experiment Name: At_Open_Flower_P Parameter: Age (day) Value: 21
  misc_feature: MA Experiment 20000265 PARAMETER Experiment Name: At_Open_Flower_P Parameter: Plant Line Value: WS
  misc_feature: MA Experiment 20000265 PARAMETER Experiment Name: At_Open_Flower_P Parameter: Tissue Value: Closed Flower vs. Whole Plant
  misc_feature: MA Experiment ID: 20000437 Result: Up-regulated in Transcription
  misc_feature: MA Experiment 20000437 PARAMETER Experiment Name: At_Drought_P Parameter: Age (day) Value: 8
  misc_feature: MA Experiment 20000437 PARAMETER Experiment Name: At_Drought_P Parameter: Organism Value: A. thaliana
  misc_feature: MA Experiment 20000437 PARAMETER Experiment Name: At_Drought_P Parameter: Plant Line Value: WS
  misc_feature: MA Experiment 20000437 PARAMETER Experiment Name: At_Drought_P Parameter: Timepoint (hr) Value: 24
  misc_feature: MA Experiment 20000437 PARAMETER Experiment Name: At_Drought_P Parameter: Tissue Value: Whole Plant
  misc_feature: MA Experiment 20000437 PARAMETER Experiment Name: At_Drought_P Parameter: Treatment Value: Drought vs. No Drought
  misc_feature: MA Experiment ID: 20000438 Result: Down-regulated in Transcription
  misc_feature: MA Experiment 20000438 PARAMETER Experiment Name: At_Shoots__P Parameter: Age (day) Value: 14
  misc_feature: MA Experiment 20000438 PARAMETER Experiment Name: At_Shoots__P Parameter: Tissue Value: Shoots vs. Whole Plant
  misc_feature: MA Experiment ID: 20001451 Result: Down-regulated in Transcription
  misc_feature: MA Experiment 20001451 PARAMETER Experiment Name: At_Far-red-induction_P Parameter: Age (day) Value: 7
  misc_feature: MA Experiment 20001451 PARAMETER Experiment Name: At_Far-red-induction_P Parameter: Light Value: Far-red vs. White
  misc_feature: MA Experiment 20001451 PARAMETER Experiment Name: At_Far-red-induction_P Parameter: Organism Value: A. thaliana
  misc_feature: MA Experiment 20001451 PARAMETER Experiment Name: At_Far-red-induction_P Parameter: Plant Line Value: Columbia
  misc_feature: MA Experiment 20001451 PARAMETER Experiment Name: At_Far-red-induction_P Parameter: Timepoint (hr) Value: 24
  misc_feature: MA Experiment 20001451 PARAMETER Experiment Name: At_Far-red-induction_P Parameter: Tissue Value: Whole Plant
  misc_feature: MA Experiment ID: 20001555 Result: Up-regulated in Transcription
  misc_feature: MA Experiment 20001555 PARAMETER Experiment Name: At_Drought_Soil_Dry_P Parameter: Age (day) Value: 24
  misc_feature: MA Experiment 20001555 PARAMETER Experiment Name: At_Drought_Soil_Dry_P Parameter: Organism Value: A. thaliana
  misc_feature: MA Experiment 20001555 PARAMETER Experiment Name: At_Drought_Soil_Dry_P Parameter: Plant Line Value: WS
  misc_feature: MA Experiment 20001555 PARAMETER Experiment Name: At_Drought_Soil_Dry_P Parameter: Post Timepoint (hr) Value: None
  misc_feature: MA Experiment 20001555 PARAMETER Experiment Name: At_Drought_Soil_Dry_P Parameter: Post-Treatment Value: None
  misc_feature: MA Experiment 20001555 PARAMETER Experiment Name: At_Drought_Soil_Dry_P Parameter: Timepoint (day) Value: 10
  misc_feature: MA Experiment 20001555 PARAMETER Experiment Name: At_Drought_Soil_Dry_P Parameter: Treatment Value: Drought vs. No Drought
  misc_feature: MA Experiment ID: 20001911 Result: Up-regulated in Transcription
  misc_feature: MA Experiment 20001911 PARAMETER Experiment Name: At_Drought_Reproduction_P Parameter: Age (day) Value: 40
  misc_feature: MA Experiment 20001911 PARAMETER Experiment Name: At_Drought_Reproduction_P Parameter: Organism Value: A. thaliana
  misc_feature: MA Experiment 20001911 PARAMETER Experiment Name: At_Drought_Reproduction_P Parameter: Plant Line Value: WS
  misc_feature: MA Experiment 20001911 PARAMETER Experiment Name: At_Drought_Reproduction_P Parameter: Timepoint (day) Value: 10
  misc_feature: MA Experiment 20001911 PARAMETER Experiment Name: At_Drought_Reproduction_P Parameter: Tissue Value: Flowers
  misc_feature: MA Experiment 20001911 PARAMETER Experiment Name: At_Drought_Reproduction_P Parameter: Treatment Value: Drought vs. No Drought
atcagataaacgaatggctaacgactacgtttccactgttctgcttcttcttagcctccttatcttcttgagtcagcgtactgattctgcctctatcgtcaagtctcttcctggttttgatggccctcttccctttgaactcgaaaccgggtatattggtgttggtgaggaagaggaagtgcagttgttttactactttatcaagtctgagaggaatccacaagaagatcctcttctactctggttaagtggaggacctggttgctcttctatctctggtcttctttacgagaatgggcctgtgaatgtgaagattgaggtttacaatggaactcttccttccttggtctctactacatattcatggactaaggtttcgagtataatatatttggatcagcctgttggaactggcttctcctactcaagaactaaacttgttaacaaacccagtgattcaggagaagccaagagaatccacgagtttcttcacaagtggctaggcaagcatcaagagttttcctccaaccctttctatgtcggtggggattcttattgtggtatggtcattccggcactcgttcaagaaatctcaaaaggaaactatgtatgctgcaaacctccaataaatcttcagggctatattcttggaaacccatcaacagaaaatgaagttgatattaattatcgcattccatatgctcatggaatggcactgatctctgatgaactctatgagtcaatgaagagaatctgcaaaggaaaatatgaaaatgttgatccacgtaacacaaaatgcttgaaactcgttggagaatatcagaagtgcactaaaagaataaacaaagcacttataataacgccagagtgtgtagacacatctcctgattgctatatgtatcggtatttgttaactacctactgggccaatgatgagaatgtgcaaagagctcttcatgtcaataaggggagtataggggaatgggtacgttgttattttgagataccttacaatcatgacattaaaagcagtgtaccgtaccacatgaataacagcatcgatggatatgcatctctcatcttcagtggtgatcacgacatggaagtaccttaccttggaactcaagcttggattaggtctcttaattattctctcattgatgactggagaccttggatgataggagatcaaatcgctggatacacgaggacctatgccaataagatggcatttgctactatcaaaggaggaggacacacaccagagtataaaccagaggagagttatatcatgttccaaaggtggatcagtggtcagcctttgtaacttgaagccaaagcaattcc

SEQ ID NO: 38093 - protein, 441 aa, Arabidopsis thaliana
  peptide (1)..(441): Ceres Seq. ID no. 12371274
  misc_feature (37)..(438): Pfam Name: Serine carboxypeptidase Pfam Description: Serine carboxypeptidase
  misc_feature (12)..(441): Homolog of NCBI NO: 15227769 NR Description: putative serine carboxypeptidase II
  misc_feature (11)..(441): Homolog of NCBI NO: 15227765 NR Description: putative serine carboxypeptidase I; protein id:
  misc_feature (5)..(441): Homolog of NCBI NO: 15219435 NR Description: putative serine carboxypeptidase; protein id:
  misc_feature (5)..(441): Homolog of NCBI NO: 15219427 NR Description: putative serine carboxypeptidase; protein id:
  misc_feature (5)..(441): Homolog of NCBI NO: 8777303 NR Description: serine carboxypeptidase [Arabidopsis thaliana]
  misc_feature (5)..(441): Homolog of NCBI NO: 15219429 NR Description: putative serine carboxypeptidase; protein id:
  misc_feature (5)..(441): Homolog of NCBI NO: 15219431 NR Description: putative serine carboxypeptidase; protein id:
  misc_feature (5)..(441): Homolog of NCBI NO: 22327401 NR Description: serine carboxypeptidase
  misc_feature (5)..(441): Homolog of NCBI NO: 15219433 NR Description: putative serine carboxypeptidase; protein id:
  misc_feature (5)..(441): Homolog of NCBI NO: 15228300 NR Description: putative glucose acyltransferase; protein id:
SDKRMANDYVSTVLLLLSLLIFLSQRTDSASIVKSLPGFDGPLPFELETGYIGVGEEEEVQLFYYFIKSERNPQEDPLLLWLSGGPGCSSISGLLYENGPVNVKIEVYNGTLPSLVSTTYSWTKVSSIIYLDQPVGTGFSYSRTKLVNKPSDSGEAKRIHEFLHKWLGKHQEFSSNPFYVGGDSYCGMVIPALVQEISKGNYVCCKPPINLQGYILGNPSTENEVDINYRIPYAHGMALISDELYESMKRICKGKYENVDPRNTKCLKLVGEYQKCTKRINKALIITPECVDTSPDCYMYRYLLTTYWANDENVQRALHVNKGSIGEWVRCYFEIPYNHDIKSSVPYHMNNSIDGYASLIFSGDHDMEVPYLGTQAWIRSLNYSLIDDWRPWMIGDQIAGYTRTYANKMAFATIKGGGHTPEYKPEESYIMFQRWISGQPL

SEQ ID NO: 38094 - protein, 437 aa, Arabidopsis thaliana
  peptide (1)..(437): Ceres Seq. ID no. 12371275
  misc_feature (33)..(434): Pfam Name: Serine carboxypeptidase Pfam Description: Serine carboxypeptidase
  misc_feature (8)..(437): Homolog of NCBI NO: 15227769 NR Description: putative serine carboxypeptidase II
  misc_feature (7)..(437): Homolog of NCBI NO: 15227765 NR Description: putative serine carboxypeptidase I; protein id:
  misc_feature (1)..(437): Homolog of NCBI NO: 15219435 NR Description: putative serine carboxypeptidase; protein id:
  misc_feature (1)..(437): Homolog of NCBI NO: 15219427 NR Description: putative serine carboxypeptidase; protein id:
  misc_feature (1)..(437): Homolog of NCBI NO: 8777303 NR Description: serine carboxypeptidase [Arabidopsis thaliana]
  misc_feature (1)..(437): Homolog of NCBI NO: 15219429 NR Description: putative serine carboxypeptidase; protein id:
  misc_feature (1)..(437): Homolog of NCBI NO: 15219431 NR Description: putative serine carboxypeptidase; protein id:
  misc_feature (1)..(437): Homolog of NCBI NO: 22327401 NR Description: serine carboxypeptidase
  misc_feature (1)..(437): Homolog of NCBI NO: 15219433 NR Description: putative serine carboxypeptidase; protein id:
  misc_feature (1)..(437): Homolog of NCBI NO: 15228300 NR Description: putative glucose acyltransferase; protein id:
MANDYVSTVLLLLSLLIFLSQRTDSASIVKSLPGFDGPLPFELETGYIGVGEEEEVQLFYYFIKSERNPQEDPLLLWLSGGPGCSSISGLLYENGPVNVKIEVYNGTLPSLVSTTYSWTKVSSIIYLDQPVGTGFSYSRTKLVNKPSDSGEAKRIHEFLHKWLGKHQEFSSNPFYVGGDSYCGMVIPALVQEISKGNYVCCKPPINLQGYILGNPSTENEVDINYRIPYAHGMALISDELYESMKRICKGKYENVDPRNTKCLKLVGEYQKCTKRINKALIITPECVDTSPDCYMYRYLLTTYWANDENVQRALHVNKGSIGEWVRCYFEIPYNHDIKSSVPYHMNNSIDGYASLIFSGDHDMEVPYLGTQAWIRSLNYSLIDDWRPWMIGDQIAGYTRTYANKMAFATIKGGGHTPEYKPEESYIMFQRWISGQPL

SEQ ID NO: 38095 - protein, 254 aa, Arabidopsis thaliana
  peptide (1)..(254): Ceres Seq. ID no. 12371276
  misc_feature (1)..(251): Pfam Name: Serine carboxypeptidase Pfam Description: Serine carboxypeptidase
  misc_feature (1)..(254): Homolog of NCBI NO: 15227769 NR Description: putative serine carboxypeptidase II
  misc_feature (1)..(254): Homolog of NCBI NO: 15227765 NR Description: putative serine carboxypeptidase I; protein id:
  misc_feature (1)..(254): Homolog of NCBI NO: 15219435 NR Description: putative serine carboxypeptidase; protein id:
  misc_feature (1)..(254): Homolog of NCBI NO: 15219427 NR Description: putative serine carboxypeptidase; protein id:
  misc_feature (1)..(254): Homolog of NCBI NO: 8777303 NR Description: serine carboxypeptidase [Arabidopsis thaliana]
  misc_feature (1)..(254): Homolog of NCBI NO: 15219429 NR Description: putative serine carboxypeptidase; protein id:
  misc_feature (1)..(254): Homolog of NCBI NO: 15219431 NR Description: putative serine carboxypeptidase; protein id:
  misc_feature (1)..(254): Homolog of NCBI NO: 22327401 NR Description: serine carboxypeptidase
  misc_feature (1)..(254): Homolog of NCBI NO: 15219433 NR Description: putative serine carboxypeptidase; protein id:
  misc_feature (1)..(254): Homolog of NCBI NO: 15228300 NR Description: putative glucose acyltransferase; protein id:
MVIPALVQEISKGNYVCCKPPINLQGYILGNPSTENEVDINYRIPYAHGMALISDELYESMKRICKGKYENVDPRNTKCLKLVGEYQKCTKRINKALIITPECVDTSPDCYMYRYLLTTYWANDENVQRALHVNKGSIGEWVRCYFEIPYNHDIKSSVPYHMNNSIDGYASLIFSGDHDMEVPYLGTQAWIRSLNYSLIDDWRPWMIGDQIAGYTRTYANKMAFATIKGGGHTPEYKPEESYIMFQRWISGQPL

SEQ ID NO: 38096 - DNA, 1539 bp, Arabidopsis thaliana
  misc_feature (1)..(1539): Ceres Seq. ID no. 13494002
  misc_feature: MA Experiment ID: 108594 Result: Down-regulated in Transcription
  misc_feature: MA Experiment 108594 PARAMETER Experiment Name: At_Ler-rhl_Root_cDNA_P Parameter: Plant Line Value: null
  misc_feature: MA Experiment ID: 20000171 Result: Up-regulated in Transcription
  misc_feature: MA Experiment 20000171 PARAMETER Experiment Name: At_42deg_Heat_P Parameter: Age (day) Value: 14
  misc_feature: MA Experiment 20000171 PARAMETER Experiment Name: At_42deg_Heat_P Parameter: Organism Value: A. thaliana
  misc_feature: MA Experiment 20000171 PARAMETER Experiment Name: At_42deg_Heat_P Parameter: Plant Line Value: WS
  misc_feature: MA Experiment 20000171 PARAMETER Experiment Name: At_42deg_Heat_P Parameter: Temperature (deg C) Value: 42 vs. 22
  misc_feature: MA Experiment 20000171 PARAMETER Experiment Name: At_42deg_Heat_P Parameter: Timepoint (hr) Value: 1
  misc_feature: MA Experiment 20000171 PARAMETER Experiment Name: At_42deg_Heat_P Parameter: Tissue Value: Aerial
  misc_feature: MA Experiment ID: 20000180 Result: Up-regulated in Transcription
  misc_feature: MA Experiment 20000180 PARAMETER Experiment Name: At_Germinating_Seeds_P Parameter: Age (hr) Value: 24 vs. 0
  misc_feature: MA Experiment 20000180 PARAMETER Experiment Name: At_Germinating_Seeds_P Parameter: Tissue Value: Germinating Seeds
  misc_feature: MA Experiment ID: 20000184 Result: Up-regulated in Transcription
  misc_feature: MA Experiment 20000184 PARAMETER Experiment Name: At_Shoots__P Parameter: Age (day) Value: 7
  misc_feature: MA Experiment 20000184 PARAMETER Experiment Name: At_Shoots__P Parameter: Tissue Value: Shoots vs. Whole Plant
  misc_feature: MA Experiment ID: 20000267 Result: Up-regulated in Transcription
  misc_feature: MA Experiment 20000267 PARAMETER Experiment Name: At_Drought_P Parameter: Age (day) Value: 7
  misc_feature: MA Experiment 20000267 PARAMETER Experiment Name: At_Drought_P Parameter: Organism Value: A. thaliana
  misc_feature: MA Experiment 20000267 PARAMETER Experiment Name: At_Drought_P Parameter: Plant Line Value: WS
  misc_feature: MA Experiment 20000267 PARAMETER Experiment Name: At_Drought_P Parameter: Timepoint (hr) Value: 6
  misc_feature: MA Experiment 20000267 PARAMETER Experiment Name: At_Drought_P Parameter: Tissue Value: Whole Plant
  misc_feature: MA Experiment 20000267 PARAMETER Experiment Name: At_Drought_P Parameter: Treatment Value: Drought vs. No Drought
  misc_feature: MA Experiment ID: 20000268 Result: Up-regulated in Transcription
  misc_feature: MA Experiment 20000268 PARAMETER Experiment Name: At_100mM_NaCl__P Parameter: Age (day) Value: 14
  misc_feature: MA Experiment 20000268 PARAMETER Experiment Name: At_100mM_NaCl__P Parameter: Organism Value: A. thaliana
  misc_feature: MA Experiment 20000268 PARAMETER Experiment Name: At_100mM_NaCl__P Parameter: Plant Line Value: WS
  misc_feature: MA Experiment 20000268 PARAMETER Experiment Name: At_100mM_NaCl__P Parameter: Timepoint (hr) Value: 6
  misc_feature: MA Experiment 20000268 PARAMETER Experiment Name: At_100mM_NaCl__P Parameter: Tissue Value: Whole Plant
  misc_feature: MA Experiment 20000268 PARAMETER Experiment Name: At_100mM_NaCl__P Parameter: Treatment Value: 100mM NaCl vs. No Treatment
  misc_feature: MA Experiment ID: 20000286 Result: Up-regulated in Transcription
  misc_feature: MA Experiment 20000286 PARAMETER Experiment Name: At_Open_Flower_P Parameter: Age (day) Value: 21
  misc_feature: MA Experiment 20000286 PARAMETER Experiment Name: At_Open_Flower_P Parameter: Plant Line Value: WS
  misc_feature: MA Experiment 20000286 PARAMETER Experiment Name: At_Open_Flower_P Parameter: Tissue Value: Half Open vs. Whole Plant
  misc_feature: MA Experiment ID: 20000436 Result: Up-regulated in Transcription
  misc_feature: MA Experiment 20000436 PARAMETER Experiment Name: At_Drought_P Parameter: Age (day) Value: 7
  misc_feature: MA Experiment 20000436 PARAMETER Experiment Name: At_Drought_P Parameter: Organism Value: A. thaliana
  misc_feature: MA Experiment 20000436 PARAMETER Experiment Name: At_Drought_P Parameter: Plant Line Value: WS
  misc_feature: MA Experiment 20000436 PARAMETER Experiment Name: At_Drought_P Parameter: Timepoint (hr) Value: 12
  misc_feature: MA Experiment 20000436 PARAMETER Experiment Name: At_Drought_P Parameter: Tissue Value: Whole Plant
  misc_feature: MA Experiment 20000436 PARAMETER Experiment Name: At_Drought_P Parameter: Treatment Value: Drought vs. No Drought
  misc_feature: MA Experiment ID: 20000437 Result: Up-regulated in Transcription
  misc_feature: MA Experiment 20000437 PARAMETER Experiment Name: At_Drought_P Parameter: Age (day) Value: 8
  misc_feature: MA Experiment 20000437 PARAMETER Experiment Name: At_Drought_P Parameter: Organism Value: A. thaliana
  misc_feature: MA Experiment 20000437 PARAMETER Experiment Name: At_Drought_P Parameter: Plant Line Value: WS
  misc_feature: MA Experiment 20000437 PARAMETER Experiment Name: At_Drought_P Parameter: Timepoint (hr) Value: 24
  misc_feature: MA Experiment 20000437 PARAMETER Experiment Name: At_Drought_P Parameter: Tissue Value: Whole Plant
  misc_feature: MA Experiment 20000437 PARAMETER Experiment Name: At_Drought_P Parameter: Treatment Value: Drought vs. No Drought
  misc_feature: MA Experiment ID: 20000439 Result: Up-regulated in Transcription
  misc_feature: MA Experiment 20000439 PARAMETER Experiment Name: At_Roots__P Parameter: Age (day) Value: 14 vs. 21
  misc_feature: MA Experiment 20000439 PARAMETER Experiment Name: At_Roots__P Parameter: Organism Value: A. thaliana
  misc_feature: MA Experiment 20000439 PARAMETER Experiment Name: At_Roots__P Parameter: Tissue Value: Roots vs. Whole Plant
  misc_feature: MA Experiment ID: 20000451 Result: Up-regulated in Transcription
  misc_feature: MA Experiment 20000451 PARAMETER Experiment Name: At_CS6879_Shoots-Roots_P Parameter: Age (day) Value: 14
  misc_feature: MA Experiment 20000451 PARAMETER Experiment Name: At_CS6879_Shoots-Roots_P Parameter: Organism Value: A. thaliana
  misc_feature: MA Experiment 20000451 PARAMETER Experiment Name: At_CS6879_Shoots-Roots_P Parameter: Plant Line Value: CS6879 vs. WS
  misc_feature: MA Experiment 20000451 PARAMETER Experiment Name: At_CS6879_Shoots-Roots_P Parameter: Tissue Value: Roots
atcatcaaagtgaaaatgacaaacttcaaagacaacgatggagatggaaccaaactccacgtggtaatgtttccatggttagcctttggtcacatggttccatacttggagctctctaaactcatagctcaaaagggtcacaaagtctctttcatttccactccacgtaacatcgaccgtctcctcccacggttaccggaaaatctctcctccgtcattaacttcgtcaagctatcacttcccgtcggcgacaacaaactcccggaagacggtgaagctaccacagacgtccctttcgaactcataccttacttaaaaatcgcttacgacgggttaaaagttccggtgacggagtttcttgaatcttcgaaacccgattgggttcttcaagatttcgcggggttttggcttcctccaatctctcgtcgtctcggaatcaaaaccggattctttagcgctttcaacggcgcgacgctcggtattcttaaaccgccggggttcgaagagtaccgtacttcgccggcggattttatgaagccgcctaagtgggttccgtttgaaacttcggtagctttcaagttatttgaatgcaggttcattttcaaaggatttatggcggaaaccaccgaagggaatgttcccgacatccaccgtgtcggcggcgtaattgacggctgtgacgtcatcttcgtacggagctgttacgagtatgaagcggagtggttaggacttacacaagaacttcaccggaaaccggttataccggtcggagttttgcctccaaaaccggacgaaaagtttgaagataccgacacgtggctgtctgttaaaaaatggttggactcacggaaaagtaagtccattgtctacgtagcttttggttcagaagctaaaccgagtcaaacggagctaaatgagatcgctctcggtttagagctttctggtttacctttcttttgggtgttaaagactcgtcgtggtccgtgggataccgaaccggtcgagcttccggaaggattcgaagagcgtacagcggatagagggatggtgtggagaggttgggttgagcaattgcgtacattgagccatgactcgatcggtttggttctgactcatcccggttggggaacgataattgaagctatccggtttgctaaaccgatggcaatgctggtttttgtgtatgaccaaggattgaatgcgagagtcattgaagagaagaaaattgggtatatgatccctcgagacgagacagaaggtttctttactaaagaaagtgttgcgaattcgctaagattggtaatggtggaagaagaaggaaaggtttatagagagaatgtgaaggagatgaaaggagtgtttggagatatggatagacaagatcgttatgtggattcattcttggaatatcttgttactaatcgttaactttgagtcttgatccaatggtcggttaattgagtgaagttgatcaagtgttgcaaggatgatcattgtataatgttatgatattttggaatggtcaagttttcttgaggc

SEQ ID NO: 38097 - protein, 475 aa, Arabidopsis thaliana
  peptide (1)..(475): Ceres Seq. ID no. 13494003
  misc_feature (122)..(471): Homolog of NCBI NO: 34393978 NR Description: putative UDP-glucosyltransferase
  misc_feature (19)..(475): Homolog of NCBI NO: 34393985 NR Description: putative UDP-glucosyltransferase
  misc_feature (11)..(471): Homolog of NCBI NO: 34908562 NR Description: putative anthocyanidine rhamnosyl-transferase
  misc_feature (19)..(471): Homolog of NCBI NO: 15240534 NR Description: UDP-glycosyltransferase family [Arabidopsis
  misc_feature (18)..(471): Homolog of NCBI NO: 26452040 NR Description: putative anthocyanidin-3-glucoside
  misc_feature (18)..(471): Homolog of NCBI NO: 15238503 NR Description: UDP-glycosyltransferase family [Arabidopsis
  misc_feature (15)..(474): Homolog of NCBI NO: 21435782 NR Description: UDP-glucosyltransferase [Stevia rebaudiana]
  misc_feature (15)..(471): Homolog of NCBI NO: 20149064 NR Description: putative anthocyanidine rhamnosyl-transferase
  misc_feature (6)..(475): Homolog of NCBI NO: 18400022 NR Description: glycosyltransferase family [Arabidopsis thaliana]
  misc_feature (6)..(475): Homolog of NCBI NO: 15450577 NR Description: At2g22590/T9I22.3 [Arabidopsis thaliana]
IIKVKMTNFKDNDGDGTKLHVVMFPWLAFGHMVPYLELSKLIAQKGHKVSFISTPRNIDRLLPRLPENLSSVINFVKLSLPVGDNKLPEDGEATTDVPFELIPYLKIAYDGLKVPVTEFLESSKPDWVLQDFAGFWLPPISRRLGIKTGFFSAFNGATLGILKPPGFEEYRTSPADFMKPPKWVPFETSVAFKLFECRFIFKGFMAETTEGNVPDIHRVGGVIDGCDVIFVRSCYEYEAEWLGLTQELHRKPVIPVGVLPPKPDEKFEDTDTWLSVKKWLDSRKSKSIVYVAFGSEAKPSQTELNEIALGLELSGLPFFWVLKTRRGPWDTEPVELPEGFEERTADRGMVWRGWVEQLRTLSHDSIGLVLTHPGWGTIIEAIRFAKPMAMLVFVYDQGLNARVIEEKKIGYMIPRDETEGFFTKESVANSLRLVMVEEEGKVYRENVKEMKGVFGDMDRQDRYVDSFLEYLVTNR

SEQ ID NO: 38098 - protein, 470 aa, Arabidopsis thaliana
  peptide (1)..(470): Ceres Seq. ID no. 13494004
  misc_feature (117)..(466): Homolog of NCBI NO: 34393978 NR Description: putative UDP-glucosyltransferase
  misc_feature (14)..(470): Homolog of NCBI NO: 34393985 NR Description: putative UDP-glucosyltransferase
  misc_feature (6)..(466): Homolog of NCBI NO: 34908562 NR Description: putative anthocyanidine rhamnosyl-transferase
  misc_feature (14)..(466): Homolog of NCBI NO: 15240534 NR Description: UDP-glycosyltransferase family [Arabidopsis
  misc_feature (13)..(466): Homolog of NCBI NO: 26452040 NR Description: putative anthocyanidin-3-glucoside
  misc_feature (13)..(466): Homolog of NCBI NO: 15238503 NR Description: UDP-glycosyltransferase family [Arabidopsis
  misc_feature (10)..(469): Homolog of NCBI NO: 21435782 NR Description: UDP-glucosyltransferase [Stevia rebaudiana]
  misc_feature (10)..(466): Homolog of NCBI NO: 20149064 NR Description: putative anthocyanidine rhamnosyl-transferase
  misc_feature (1)..(470): Homolog of NCBI NO: 18400022 NR Description: glycosyltransferase family [Arabidopsis thaliana]
  misc_feature (1)..(470): Homolog of NCBI NO: 15450577 NR Description: At2g22590/T9I22.3 [Arabidopsis thaliana]
MTNFKDNDGDGTKLHVVMFPWLAFGHMVPYLELSKLIAQKGHKVSFISTPRNIDRLLPRLPENLSSVINFVKLSLPVGDNKLPEDGEATTDVPFELIPYLKIAYDGLKVPVTEFLESSKPDWVLQDFAGFWLPPISRRLGIKTGFFSAFNGATLGILKPPGFEEYRTSPADFMKPPKWVPFETSVAFKLFECRFIFKGFMAETTEGNVPDIHRVGGVIDGCDVIFVRSCYEYEAEWLGLTQELHRKPVIPVGVLPPKPDEKFEDTDTWLSVKKWLDSRKSKSIVYVAFGSEAKPSQTELNEIALGLELSGLPFFWVLKTRRGPWDTEPVELPEGFEERTADRGMVWRGWVEQLRTLSHDSIGLVLTHPGWGTIIEAIRFAKPMAMLVFVYDQGLNARVIEEKKIGYMIPRDETEGFFTKESVANSLRLVMVEEEGKVYRENVKEMKGVFGDMDRQDRYVDSFLEYLVTNR

SEQ ID NO: 38099 - protein, 453 aa, Arabidopsis thaliana
  peptide (1)..(453): Ceres Seq. ID no. 13494005
  misc_feature (100)..(449): Homolog of NCBI NO: 34393978 NR Description: putative UDP-glucosyltransferase
  misc_feature (1)..(453): Homolog of NCBI NO: 34393985 NR Description: putative UDP-glucosyltransferase
  misc_feature (1)..(449): Homolog of NCBI NO: 34908562 NR Description: putative anthocyanidine rhamnosyl-transferase
  misc_feature (1)..(449): Homolog of NCBI NO: 15240534 NR Description: UDP-glycosyltransferase family [Arabidopsis
  misc_feature (1)..(449): Homolog of NCBI NO: 26452040 NR Description: putative anthocyanidin-3-glucoside
  misc_feature (1)..(449): Homolog of NCBI NO: 15238503 NR Description: UDP-glycosyltransferase family [Arabidopsis
  misc_feature (1)..(452): Homolog of NCBI NO: 21435782 NR Description: UDP-glucosyltransferase [Stevia rebaudiana]
  misc_feature (1)..(449): Homolog of NCBI NO: 20149064 NR Description: putative anthocyanidine rhamnosyl-transferase
  misc_feature (1)..(453): Homolog of NCBI NO: 18400022 NR Description: glycosyltransferase family [Arabidopsis thaliana]
  misc_feature (1)..(453): Homolog of NCBI NO: 15450577 NR Description: At2g22590/T9I22.3 [Arabidopsis thaliana]
MFPWLAFGHMVPYLELSKLIAQKGHKVSFISTPRNIDRLLPRLPENLSSVINFVKLSLPVGDNKLPEDGEATTDVPFELIPYLKIAYDGLKVPVTEFLESSKPDWVLQDFAGFWLPPISRRLGIKTGFFSAFNGATLGILKPPGFEEYRTSPADFMKPPKWVPFETSVAFKLFECRFIFKGFMAETTEGNVPDIHRVGGVIDGCDVIFVRSCYEYEAEWLGLTQELHRKPVIPVGVLPPKPDEKFEDTDTWLSVKKWLDSRKSKSIVYVAFGSEAKPSQTELNEIALGLELSGLPFFWVLKTRRGPWDTEPVELPEGFEERTADRGMVWRGWVEQLRTLSHDSIGLVLTHPGWGTIIEAIRFAKPMAMLVFVYDQGLNARVIEEKKIGYMIPRDETEGFFTKESVANSLRLVMVEEEGKVYRENVKEMKGVFGDMDRQDRYVDSFLEYLVTNR

SEQ ID NO: 38100 - DNA, 1188 bp, Arabidopsis thaliana
  misc_feature (1)..(1188): Ceres Seq. ID no. 13488410
  misc_feature: MA Experiment ID: 108434 Result: Up-regulated in Transcription
  misc_feature: MA Experiment 108434 PARAMETER Experiment Name: At_Root_Tips_cDNA_P Parameter: Tissue Value: Root Tips
  misc_feature: MA Experiment ID: 108461 Result: Up-regulated in Transcription
  misc_feature: MA Experiment 108461 PARAMETER Experiment Name: At_Germinating_Seeds_cDNA_P Parameter: Age (day) Value: 1 vs. 0
  misc_feature: MA Experiment 108461 PARAMETER Experiment Name: At_Germinating_Seeds_cDNA_P Parameter: Tissue Value: Germinating Seeds
  misc_feature: MA Experiment ID: 20000180 Result: Up-regulated in Transcription
  misc_feature: MA Experiment 20000180 PARAMETER Experiment Name: At_Germinating_Seeds_P Parameter: Age (hr) Value: 24 vs. 0
  misc_feature: MA Experiment 20000180 PARAMETER Experiment Name: At_Germinating_Seeds_P Parameter: Tissue Value: Germinating Seeds
  misc_feature: MA Experiment ID: 20000224 Result: Down-regulated in Transcription
aaatgatcattttaatttttcatgttactctctccttcttcttcacttgttctctttctcatcgcctcttgattcacgcgaacgagaaagcgacgatcgtaaccaccggcgctgaccaaaaagtaatcgattctcttcccgagctgatctctcagcttcaggtgtcttgaatctgaatctgtggctatatttggtgctcggtggtgagcaggaagggagggggatattgtcagggttttaatgtacgtcagatgaatagagcaactaatgttactggcagtagaaggagggggtttattctcagcgtccgcgtctgggtatagtaagggattgacccttcttttctctggtgataaagacgtagataggcccatgagagttgtcccgtggaatcactaccaggtggttgaccaagagcctgaggctgaccctgttcttcagctggattctattaagaaccgagtttcccgcggttgcgctgcttccttcagttgttttggtggcgcttccgcgggacttgagaccccttctcctcttaaagttgaacctgtgcagcagcagcatcgtgaaatatcatcaccagagtctgttgttgttgtttctgaaaagggtaaagaccaaataagtgaagctgataatggcagcagcaaagaagctttcaaactctcgttgaggagtagcttgaagaggccctctgttgcggaatcacgctctctagaagatataaaagaatacgagacgttgagtgtggatggtagcgatctcactggtgacatggcaaggcggaaagttcagtggcctgatgcttgtggtagtgaactcactcaagttagagaatttgagccgagtgagatgggattatcagatgaagaatgggaggtaggacgacaaagaacatgttcgtgtgtgatcatgtaaattcagaaatcatcggtatcactctttactcatgtcttgtgtgcattgctcatatatttaaagtgtatctgttattacaaaagttctcttcaaggttttggcttgtacattattccctttgttttgagtggcaacttgttccgggtttctgttttctaaaaacgataagacaacatccaaatcgatgcaaagtggaagagagtggcaataactcttgttcttgtaacgctctcaaccacattacgtacgtgtacaacaaaactagaatgc

SEQ ID NO: 38101 - protein, 216 aa, Arabidopsis thaliana
  peptide (1)..(216): Ceres Seq. ID no. 13488411
  misc_feature (112)..(216): Homolog of NCBI NO: 30692973 NR Description: expressed protein [Arabidopsis thaliana]
  misc_feature (1)..(157): Homolog of NCBI NO: 25334118 NR Description: F12G12.17 protein - Arabidopsis thaliana
  misc_feature (1)..(157): Homolog of NCBI NO: 10092447 NR Description: unknown protein; 15226-14726 [Arabidopsis
  misc_feature (1)..(165): Homolog of NCBI NO: 30692973 NR Description: expressed protein [Arabidopsis thaliana]
  misc_feature (1)..(215): Homolog of NCBI NO: 34912224 NR Description: P0415C01.14 [Oryza sativa (japonica
  misc_feature (1)..(193): Homolog of NCBI NO: 2505872 NR Description: hypothetical protein [Arabidopsis thaliana]
  misc_feature (6)..(193): Homolog of NCBI NO: 7452500 NR Description: hypothetical protein T22J18.4 - Arabidopsis
  misc_feature (1)..(216): Homolog of NCBI NO: 18395162 NR Description: expressed protein [Arabidopsis thaliana]
MLLAVEGGGLFSASASGYSKGLTLLFSGDKDVDRPMRVVPWNHYQVVDQEPEADPVLQLDSIKNRVSRGCAASFSCFGGASAGLETPSPLKVEPVQQQHREISSPESVVVVSEKGKDQISEADNGSSKEAFKLSLRSSLKRPSVAESRSLEDIKEYETLSVDGSDLTGDMARRKVQWPDACGSELTQVREFEPSEMGLSDEEWEVGRQRTCSCVIM

SEQ ID NO: 38102 - protein, 181 aa, Arabidopsis thaliana
  peptide (1)..(181): Ceres Seq. ID no. 13488412
  misc_feature (77)..(181): Homolog of NCBI NO: 30692973 NR Description: expressed protein [Arabidopsis thaliana]
  misc_feature (1)..(122): Homolog of NCBI NO: 25334118 NR Description: F12G12.17 protein - Arabidopsis thaliana
  misc_feature (1)..(122): Homolog of NCBI NO: 10092447 NR Description: unknown protein; 15226-14726 [Arabidopsis
  misc_feature (1)..(130): Homolog of NCBI NO: 30692973 NR Description: expressed protein [Arabidopsis thaliana]
  misc_feature (1)..(180): Homolog of NCBI NO: 34912224 NR Description: P0415C01.14 [Oryza sativa (japonica
  misc_feature (1)..(158): Homolog of NCBI NO: 2505872 NR Description: hypothetical protein [Arabidopsis thaliana]
  misc_feature (1)..(158): Homolog of NCBI NO: 7452500 NR Description: hypothetical protein T22J18.4 - Arabidopsis
  misc_feature (1)..(181): Homolog of NCBI NO: 18395162 NR Description: expressed protein [Arabidopsis thaliana]
MRVVPWNHYQVVDQEPEADPVLQLDSIKNRVSRGCAASFSCFGGASAGLETPSPLKVEPVQQQHREISSPESVVVVSEKGKDQISEADNGSSKEAFKLSLRSSLKRPSVAESRSLEDIKEYETLSVDGSDLTGDMARRKVQWPDACGSELTQVREFEPSEMGLSDEEWEVGRQRTCSCVIM

SEQ ID NO: 38103 - DNA, 959 bp, Arabidopsis thaliana
  misc_feature (1)..(959): Ceres Seq. ID no. 13591405
  misc_feature: MA Experiment ID: 108434 Result: Up-regulated in Transcription
  misc_feature: MA Experiment 108434 PARAMETER Experiment Name: At_Root_Tips_cDNA_P Parameter: Tissue Value: Root Tips
  misc_feature: MA Experiment ID: 108461 Result: Up-regulated in Transcription
  misc_feature: MA Experiment 108461 PARAMETER Experiment Name: At_Germinating_Seeds_cDNA_P Parameter: Age (day) Value: 1 vs. 0
  misc_feature: MA Experiment 108461 PARAMETER Experiment Name: At_Germinating_Seeds_cDNA_P Parameter: Tissue Value: Germinating Seeds
  misc_feature: MA Experiment ID: 108463 Result: Up-regulated in Transcription
  misc_feature: MA Experiment 108463 PARAMETER Experiment Name: At_Germinating_Seeds_cDNA_P Parameter: Age (day) Value: 3 vs. 0
  misc_feature: MA Experiment 108463 PARAMETER Experiment Name: At_Germinating_Seeds_cDNA_P Parameter: Tissue Value: Germinating Seeds
  misc_feature: MA Experiment ID: 108464 Result: Up-regulated in Transcription
  misc_feature: MA Experiment 108464 PARAMETER Experiment Name: At_Germinating_Seeds_cDNA_P Parameter: Age (day) Value: 4 vs. 0
  misc_feature: MA Experiment 108464 PARAMETER Experiment Name: At_Germinating_Seeds_cDNA_P Parameter: Tissue Value: Germinating Seeds
  misc_feature: MA Experiment ID: 108473 Result: Down-regulated in Transcription
  misc_feature: MA Experiment 108473 PARAMETER Experiment Name: At_Drought_Flowers_cDNA_P Parameter: Timepoint (hr) Value: 7 d
  misc_feature: MA Experiment 108473 PARAMETER Experiment Name: At_Drought_Flowers_cDNA_P Parameter: Tissue Value: Flower
  misc_feature: MA Experiment 108473 PARAMETER Experiment Name: At_Drought_Flowers_cDNA_P Parameter: Treatment Value: Drought vs. No Drought
  misc_feature: MA Experiment ID: 108474 Result: Down-regulated in Transcription
  misc_feature: MA Experiment 108474 PARAMETER Experiment Name: At_Drought_Flowers_cDNA_P Parameter: Timepoint (hr) Value: null
  misc_feature: MA Experiment 108474 PARAMETER Experiment Name: At_Drought_Flowers_cDNA_P Parameter: Treatment Value: Drought vs. No Drought
  misc_feature: MA Experiment ID: 108561 Result: Down-regulated in Transcription
  misc_feature: MA Experiment 108561 PARAMETER Experiment Name: At_100uM_ABA_cDNA_P Parameter: Timepoint (hr) Value: 6
  misc_feature: MA Experiment 108561 PARAMETER Experiment Name: At_100uM_ABA_cDNA_P Parameter: Tissue Value: Aerial
  misc_feature: MA Experiment 108561 PARAMETER Experiment Name: At_100uM_ABA_cDNA_P Parameter: Treatment Value: 100uM ABA vs. No Treatment
  misc_feature: MA Experiment ID: 108574 Result: Up-regulated in Transcription
  misc_feature: MA Experiment 108574 PARAMETER Experiment Name: At_Wounding__cDNA_P Parameter: Timepoint (hr) Value: 1
  misc_feature: MA Experiment 108574 PARAMETER Experiment Name: At_Wounding__cDNA_P Parameter: Tissue Value: Aerial
  misc_feature: MA Experiment 108574 PARAMETER Experiment Name: At_Wounding__cDNA_P Parameter: Treatment Value: Wounding vs. No Wounding
  misc_feature: MA Experiment ID: 108577 Result: Down-regulated in Transcription
  misc_feature: MA Experiment 108577 PARAMETER Experiment Name: At_42deg_Heat_cDNA_P Parameter: Temperature (deg C) Value: 42 vs. 22
  misc_feature: MA Experiment 108577 PARAMETER Experiment Name: At_42deg_Heat_cDNA_P Parameter: Timepoint (hr) Value: 6
  misc_feature: MA Experiment 108577 PARAMETER Experiment Name: At_42deg_Heat_cDNA_P Parameter: Tissue Value: Aerial
  misc_feature: MA Experiment ID: 108579 Result: Up-regulated in Transcription
  misc_feature: MA Experiment 108579 PARAMETER Experiment Name: At_4deg_Cold_cDNA_P Parameter: Temperature (deg C) Value: 4 vs. 22
  misc_feature: MA Experiment 108579 PARAMETER Experiment Name: At_4deg_Cold_cDNA_P Parameter: Timepoint (hr) Value: 6
  misc_feature: MA Experiment 108579 PARAMETER Experiment Name: At_4deg_Cold_cDNA_P Parameter: Tissue Value: Aerial
  misc_feature: MA Experiment ID: 108595 Result: Down-regulated in Transcription
  misc_feature: MA Experiment 108595 PARAMETER Experiment Name: At_Ler-pi_Ovule_cDNA_P Parameter: Plant Line Value: null
  misc_feature: MA Experiment ID: 20000069 Result: Down-regulated in Transcription
  misc_feature: MA Experiment 20000069 PARAMETER Experiment Name: At_100uM_ABA_Mutants_cDNA_P Parameter: Plant Line Value: CS23
  misc_feature: MA Experiment 20000069 PARAMETER Experiment Name: At_100uM_ABA_Mutants_cDNA_P Parameter: Timepoint (hr) Value: 6
  misc_feature: MA Experiment 20000069 PARAMETER Experiment Name: At_100uM_ABA_Mutants_cDNA_P Parameter: Tissue Value: Aerial
  misc_feature: MA Experiment 20000069 PARAMETER Experiment Name: At_100uM_ABA_Mutants_cDNA_P Parameter: Treatment Value: 100uM ABA vs. No Treatment
  misc_feature: MA Experiment ID: 20000070 Result: Down-regulated in Transcription
  misc_feature: MA Experiment 20000070 PARAMETER Experiment Name: At_100uM_ABA_Mutants_cDNA_P Parameter: Plant Line Value: CS24
  misc_feature: MA Experiment 20000070 PARAMETER Experiment Name: At_100uM_ABA_Mutants_cDNA_P Parameter: Timepoint (hr) Value: 6
  misc_feature: MA Experiment 20000070 PARAMETER Experiment Name: At_100uM_ABA_Mutants_cDNA_P Parameter: Tissue Value: Aerial
  misc_feature: MA Experiment 20000070 PARAMETER Experiment Name: At_100uM_ABA_Mutants_cDNA_P Parameter: Treatment Value: 100uM ABA vs. No Treatment
  misc_feature: MA Experiment ID: 20000087 Result: Down-regulated in Transcription
  misc_feature: MA Experiment 20000087 PARAMETER Experiment Name: At_100uM_ABA_Mutants_cDNA_P Parameter: Plant Line Value: WS
  misc_feature: MA Experiment 20000087 PARAMETER Experiment Name: At_100uM_ABA_Mutants_cDNA_P Parameter: Timepoint (hr) Value: 6
  misc_feature: MA Experiment 20000087 PARAMETER Experiment Name: At_100uM_ABA_Mutants_cDNA_P Parameter: Tissue Value: Aerial
  misc_feature: MA Experiment 20000087 PARAMETER Experiment Name: At_100uM_ABA_Mutants_cDNA_P Parameter: Treatment Value: 100uM ABA vs. No Treatment
  misc_feature: MA Experiment ID: 20000180 Result: Up-regulated in Transcription
  misc_feature: MA Experiment 20000180 PARAMETER Experiment Name: At_Germinating_Seeds_P Parameter: Age (hr) Value: 24 vs. 0
  misc_feature: MA Experiment 20000180 PARAMETER Experiment Name: At_Germinating_Seeds_P Parameter: Tissue Value: Germinating Seeds
  misc_feature: MA Experiment ID: 20000185 Result: Down-regulated in Transcription
  misc_feature: MA Experiment 20000185 PARAMETER Experiment Name: At_Roots__P Parameter: Age (day) Value: 7 vs. 21
  misc_feature: MA Experiment 20000185 PARAMETER Experiment Name: At_Roots__P Parameter: Organism Value: A. thaliana
  misc_feature: MA Experiment 20000185 PARAMETER Experiment Name: At_Roots__P Parameter: Tissue Value: Roots vs. Whole Plant
  misc_feature: MA Experiment ID: 20000439 Result: Down-regulated in Transcription
  misc_feature: MA Experiment 20000439 PARAMETER Experiment Name: At_Roots__P Parameter: Age (day) Value: 14 vs. 21
  misc_feature: MA Experiment 20000439 PARAMETER Experiment Name: At_Roots__P Parameter: Organism Value: A. thaliana
  misc_feature: MA Experiment 20000439 PARAMETER Experiment Name: At_Roots__P Parameter: Tissue Value: Roots vs. Whole Plant
  misc_feature: MA Experiment ID: 20000444 Result: Up-regulated in Transcription
  misc_feature: MA Experiment 20000444 PARAMETER Experiment Name: At_100uM_NAA__P Parameter: Age (day) Value: 14
  misc_feature: MA Experiment 20000444 PARAMETER Experiment Name: At_100uM_NAA__P Parameter: Organism Value: A. thaliana
  misc_feature: MA Experiment 20000444 PARAMETER Experiment Name: At_100uM_NAA__P Parameter: Plant Line Value: WS
  misc_feature: MA Experiment 20000444 PARAMETER Experiment Name: At_100uM_NAA__P Parameter: Timepoint (hr) Value: 1
  misc_feature: MA Experiment 20000444 PARAMETER Experiment Name: At_100uM_NAA__P Parameter: Tissue Value: Aerial
  misc_feature: MA Experiment 20000444 PARAMETER Experiment Name: At_100uM_NAA__P Parameter: Treatment Value: 100uM NAA vs. No Treatment
  misc_feature: MA Experiment ID: 20000445 Result: Up-regulated in Transcription
  misc_feature: MA Experiment 20000445 PARAMETER Experiment Name: At_100uM_NAA__P Parameter: Age (day) Value: 14
  misc_feature: MA Experiment 20000445 PARAMETER Experiment Name: At_100uM_NAA__P Parameter: Organism Value: A. thaliana
  misc_feature: MA Experiment 20000445 PARAMETER Experiment Name: At_100uM_NAA__P Parameter: Plant Line Value: WS
  misc_feature: MA Experiment 20000445 PARAMETER Experiment Name: At_100uM_NAA__P Parameter: Timepoint (hr) Value: 6
  misc_feature: MA Experiment 20000445 PARAMETER Experiment Name: At_100uM_NAA__P Parameter: Tissue Value: Aerial
  misc_feature: MA Experiment 20000445 PARAMETER Experiment Name: At_100uM_NAA__P Parameter: Treatment Value: 100uM NAA vs. No Treatment
  misc_feature: MA Experiment ID: 20000453 Result: Down-regulated in Transcription
  misc_feature: MA Experiment 20000453 PARAMETER Experiment Name: At_100uM_ABA_P Parameter: Age (day) Value: 15
  misc_feature: MA Experiment 20000453 PARAMETER Experiment Name: At_100uM_ABA_P Parameter: Organism Value: A. thaliana
  misc_feature: MA Experiment 20000453 PARAMETER Experiment Name: At_100uM_ABA_P Parameter: Plant Line Value: WS
  misc_feature: MA Experiment 20000453 PARAMETER Experiment Name: At_100uM_ABA_P Parameter: Timepoint (hr) Value: 24
  misc_feature: MA Experiment 20000453 PARAMETER Experiment Name: At_100uM_ABA_P Parameter: Tissue Value: Aerial
  misc_feature: MA Experiment 20000453 PARAMETER Experiment Name: At_100uM_ABA_P Parameter: Treatment Value: 100uM ABA vs. No Treatment
  misc_feature: MA Experiment ID: 20000495 Result: Down-regulated in Transcription
  misc_feature: MA Experiment 20000495 PARAMETER Experiment Name: At_Guard_Cells_P Parameter: Harvest Date Value: 8/2/2002
  misc_feature: MA Experiment 20000495 PARAMETER Experiment Name: At_Guard_Cells_P Parameter: Organism Value: A. thaliana
  misc_feature: MA Experiment 20000495 PARAMETER Experiment Name: At_Guard_Cells_P Parameter: Tissue Value: Guard Cells vs. Leaves
  misc_feature: MA Experiment ID: 20000496 Result: Down-regulated in Transcription
  misc_feature: MA Experiment 20000496 PARAMETER Experiment Name: At_Guard_Cells_P Parameter: Harvest Date Value: 7/19/2002
  misc_feature: MA Experiment 20000496 PARAMETER Experiment Name: At_Guard_Cells_P Parameter: Organism Value: Canola
  misc_feature: MA Experiment 20000496 PARAMETER Experiment Name: At_Guard_Cells_P Parameter: Tissue Value: Guard Cells vs. Leaves
  misc_feature: MA Experiment ID: 20000606 Result: Up-regulated in Transcription
  misc_feature: MA Experiment 20000606 PARAMETER Experiment Name: At_CS8548_Mutant_P Parameter: Age (day) Value: 14
  misc_feature: MA Experiment 20000606 PARAMETER Experiment Name: At_CS8548_Mutant_P Parameter: Plant Line Value: CS8548 vs. wt
  misc_feature: MA Experiment 20000606 PARAMETER Experiment Name: At_CS8548_Mutant_P Parameter: Tissue Value: Whole Plant
  misc_feature: MA Experiment ID: 20001248 Result: Up-regulated in Transcription
  misc_feature: MA Experiment 20001248 PARAMETER Experiment Name: At_Far-red-induction_P Parameter: Age (day) Value: 7
  misc_feature: MA Experiment 20001248 PARAMETER Experiment Name: At_Far-red-induction_P Parameter: Light Value: Far-red vs. White
  misc_feature: MA Experiment 20001248 PARAMETER Experiment Name: At_Far-red-induction_P Parameter: Organism Value: A. thaliana
  misc_feature: MA Experiment 20001248 PARAMETER Experiment Name: At_Far-red-induction_P Parameter: Plant Line Value: Columbia
  misc_feature: MA Experiment 20001248 PARAMETER Experiment Name: At_Far-red-induction_P Parameter: Timepoint (hr) Value: 4
  misc_feature: MA Experiment 20001248 PARAMETER Experiment Name: At_Far-red-induction_P Parameter: Tissue Value: Whole Plant
  misc_feature: MA Experiment ID: 20001450 Result: Up-regulated in Transcription
  misc_feature: MA Experiment 20001450 PARAMETER Experiment Name: At_Far-red-induction_P Parameter: Age (day) Value: 7
  misc_feature: MA Experiment 20001450 PARAMETER Experiment Name: At_Far-red-induction_P Parameter: Light Value: Far-red vs. White
  misc_feature: MA Experiment 20001450 PARAMETER Experiment Name: At_Far-red-induction_P Parameter: Organism Value: A. thaliana
  misc_feature: MA Experiment 20001450 PARAMETER Experiment Name: At_Far-red-induction_P Parameter: Plant Line Value: Columbia
  misc_feature: MA Experiment 20001450 PARAMETER Experiment Name: At_Far-red-induction_P Parameter: Timepoint (hr) Value: 8
  misc_feature: MA Experiment 20001450 PARAMETER Experiment Name: At_Far-red-induction_P Parameter: Tissue Value: Whole Plant
  misc_feature: MA Experiment ID: 20001554 Result: Down-regulated in Transcription
  misc_feature: MA Experiment 20001554 PARAMETER Experiment Name: At_Drought_Soil_Dry_P Parameter: Age (day) Value: 21
  misc_feature: MA Experiment 20001554 PARAMETER Experiment Name: At_Drought_Soil_Dry_P Parameter: Organism Value: A. thaliana
  misc_feature: MA Experiment 20001554 PARAMETER Experiment Name: At_Drought_Soil_Dry_P Parameter: Plant Line Value: WS
  misc_feature: MA Experiment 20001554 PARAMETER Experiment Name: At_Drought_Soil_Dry_P Parameter: Post Timepoint (hr) Value: None
  misc_feature: MA Experiment 20001554 PARAMETER Experiment Name: At_Drought_Soil_Dry_P Parameter: Post-Treatment Value: None
  misc_feature: MA Experiment 20001554 PARAMETER Experiment Name: At_Drought_Soil_Dry_P Parameter: Timepoint (day) Value: 7
  misc_feature: MA Experiment 20001554 PARAMETER Experiment Name: At_Drought_Soil_Dry_P Parameter: Treatment Value: Drought vs. No Drought
  misc_feature: MA Experiment ID: 20001555 Result: Down-regulated in Transcription
  misc_feature: MA Experiment 20001555 PARAMETER Experiment Name: At_Drought_Soil_Dry_P Parameter: Age (day) Value: 24
  misc_feature: MA Experiment 20001555 PARAMETER Experiment Name: At_Drought_Soil_Dry_P Parameter: Organism Value: A. thaliana
  misc_feature: MA Experiment 20001555 PARAMETER Experiment Name: At_Drought_Soil_Dry_P Parameter: Plant Line Value: WS
  misc_feature: MA Experiment 20001555 PARAMETER Experiment Name: At_Drought_Soil_Dry_P Parameter: Post Timepoint (hr) Value: None
  misc_feature: MA Experiment 20001555 PARAMETER Experiment Name: At_Drought_Soil_Dry_P Parameter: Post-Treatment Value: None
  misc_feature: MA Experiment 20001555 PARAMETER Experiment Name: At_Drought_Soil_Dry_P Parameter: Timepoint (day) Value: 10
  misc_feature: MA Experiment 20001555 PARAMETER Experiment Name: At_Drought_Soil_Dry_P Parameter: Treatment Value: Drought vs. No Drought
  misc_feature: MA Experiment ID: 20001556 Result: Down-regulated in Transcription
  misc_feature: MA Experiment 20001556 PARAMETER Experiment Name: At_Drought_Soil_Dry_P Parameter: Age (day) Value: 26
  misc_feature: MA Experiment 20001556 PARAMETER Experiment Name: At_Drought_Soil_Dry_P Parameter: Organism Value: A. thaliana
  misc_feature: MA Experiment 20001556 PARAMETER Experiment Name: At_Drought_Soil_Dry_P Parameter: Plant Line Value: WS
  misc_feature: MA Experiment 20001556 PARAMETER Experiment Name: At_Drought_Soil_Dry_P Parameter: Post Timepoint (hr) Value: None
  misc_feature: MA Experiment 20001556 PARAMETER Experiment Name: At_Drought_Soil_Dry_P Parameter: Post-Treatment Value: None
  misc_feature: MA Experiment 20001556 PARAMETER Experiment Name: At_Drought_Soil_Dry_P Parameter: Timepoint (day) Value: 12
  misc_feature: MA Experiment 20001556 PARAMETER Experiment Name: At_Drought_Soil_Dry_P Parameter: Treatment Value: Drought vs. No Drought
  misc_feature: MA Experiment ID: 20001558 Result: Down-regulated in Transcription
  misc_feature: MA Experiment 20001558 PARAMETER Experiment Name: At_Drought_Soil_Dry_P Parameter: Age (day) Value: 27
  misc_feature: MA Experiment 20001558 PARAMETER Experiment Name: At_Drought_Soil_Dry_P Parameter: Organism Value: A. thaliana
  misc_feature: MA Experiment 20001558 PARAMETER Experiment Name: At_Drought_Soil_Dry_P Parameter: Plant Line Value: WS
  misc_feature: MA Experiment 20001558 PARAMETER Experiment Name: At_Drought_Soil_Dry_P Parameter: Post Timepoint (hr) Value: 6
  misc_feature: MA Experiment 20001558 PARAMETER Experiment Name: At_Drought_Soil_Dry_P Parameter: Post-Treatment Value: Re-Water vs. No Drought
  misc_feature: MA Experiment 20001558 PARAMETER Experiment Name: At_Drought_Soil_Dry_P Parameter: Timepoint (day) Value: 13
  misc_feature: MA Experiment 20001558 PARAMETER Experiment Name: At_Drought_Soil_Dry_P Parameter: Treatment Value: Drought vs. No Drought
  misc_feature: MA Experiment ID: 20001768 Result: Up-regulated in Transcription
  misc_feature: MA Experiment 20001768 PARAMETER Experiment Name: At_Far-red-enriched-adult_P Parameter: Age (day) Value: 28
  misc_feature: MA Experiment 20001768 PARAMETER Experiment Name: At_Far-red-enriched-adult_P Parameter: Light Value: Far-red enriched vs. White
  misc_feature: MA Experiment 20001768 PARAMETER Experiment Name: At_Far-red-enriched-adult_P Parameter: Organism Value: A. thaliana
  misc_feature: MA Experiment 20001768 PARAMETER Experiment Name: At_Far-red-enriched-adult_P Parameter: Plant Line Value: Columbia
  misc_feature: MA Experiment 20001768 PARAMETER Experiment Name: At_Far-red-enriched-adult_P Parameter: Timepoint (hr) Value: 1
  misc_feature: MA Experiment 20001768 PARAMETER Experiment Name: At_Far-red-enriched-adult_P Parameter: Tissue Value: Aerial
  misc_feature: MA Experiment ID: 20001772 Result: Up-regulated in Transcription
  misc_feature: MA Experiment 20001772 PARAMETER Experiment Name: At_Far-red-enriched-adult_P Parameter: Age (day) Value: 29
  misc_feature: MA Experiment 20001772 PARAMETER Experiment Name: At_Far-red-enriched-adult_P Parameter: Light Value: Far-red enriched vs. White
  misc_feature: MA Experiment 20001772 PARAMETER Experiment Name: At_Far-red-enriched-adult_P Parameter: Organism Value: A. thaliana
  misc_feature: MA Experiment 20001772 PARAMETER Experiment Name: At_Far-red-enriched-adult_P Parameter: Plant Line Value: Columbia
  misc_feature: MA Experiment 20001772 PARAMETER Experiment Name: At_Far-red-enriched-adult_P Parameter: Timepoint (hr) Value: 24
  misc_feature: MA Experiment 20001772 PARAMETER Experiment Name: At_Far-red-enriched-adult_P Parameter: Tissue Value: Aerial
  misc_feature: MA Experiment ID: 20001773 Result: Up-regulated in Transcription
  misc_feature: MA Experiment 20001773 PARAMETER Experiment Name: At_Far-red-enriched-adult_P Parameter: Age (day) Value: 30
  misc_feature: MA Experiment 20001773 PARAMETER Experiment Name: At_Far-red-enriched-adult_P Parameter: Light Value: Far-red enriched vs. White
  misc_feature: MA Experiment 20001773 PARAMETER Experiment Name: At_Far-red-enriched-adult_P Parameter: Organism Value: A. thaliana
  misc_feature: MA Experiment 20001773 PARAMETER Experiment Name: At_Far-red-enriched-adult_P Parameter: Plant Line Value: Columbia
  misc_feature: MA Experiment 20001773 PARAMETER Experiment Name: At_Far-red-enriched-adult_P Parameter: Timepoint (hr) Value: 48
  misc_feature: MA Experiment 20001773 PARAMETER Experiment Name: At_Far-red-enriched-adult_P Parameter: Tissue Value: Aerial
  misc_feature: MA Experiment ID: 20001904 Result: Down-regulated in Transcription
  misc_feature: MA Experiment 20001904 PARAMETER Experiment Name: At_Drought_Reproduction_P Parameter: Age (day) Value: 37
  misc_feature: MA Experiment 20001904 PARAMETER Experiment Name: At_Drought_Reproduction_P Parameter: Organism Value: A. thaliana
  misc_feature: MA Experiment 20001904 PARAMETER Experiment Name: At_Drought_Reproduction_P Parameter: Plant Line Value: WS
  misc_feature: MA Experiment 20001904 PARAMETER Experiment Name: At_Drought_Reproduction_P Parameter: Timepoint (day) Value: 7
  misc_feature: MA Experiment 20001904 PARAMETER Experiment Name: At_Drought_Reproduction_P Parameter: Tissue Value: Rosettes
  misc_feature: MA Experiment 20001904 PARAMETER Experiment Name: At_Drought_Reproduction_P Parameter: Treatment Value: Drought vs. No Drought
  misc_feature: MA Experiment ID: 20001905 Result: Down-regulated in Transcription
  misc_feature: MA Experiment 20001905 PARAMETER Experiment Name: At_Drought_Reproduction_P Parameter: Age (day) Value: 40
  misc_feature: MA Experiment 20001905 PARAMETER Experiment Name: At_Drought_Reproduction_P Parameter: Organism Value: A. thaliana
  misc_feature: MA Experiment 20001905 PARAMETER Experiment Name: At_Drought_Reproduction_P Parameter: Plant Line Value: WS
  misc_feature: MA Experiment 20001905 PARAMETER Experiment Name: At_Drought_Reproduction_P Parameter: Timepoint (day) Value: 10
  misc_feature: MA Experiment 20001905 PARAMETER Experiment Name: At_Drought_Reproduction_P Parameter: Tissue Value: Rosettes
  misc_feature: MA Experiment 20001905 PARAMETER Experiment Name: At_Drought_Reproduction_P Parameter: Treatment Value: Drought vs. No Drought
  misc_feature: MA Experiment ID: 20001906 Result: Down-regulated in Transcription
  misc_feature: MA Experiment 20001906 PARAMETER Experiment Name: At_Drought_Reproduction_P Parameter: Age (day) Value: 35
  misc_feature: MA Experiment 20001906 PARAMETER Experiment Name: At_Drought_Reproduction_P Parameter: Organism Value: A. thaliana
  misc_feature: MA Experiment 20001906 PARAMETER Experiment Name: At_Drought_Reproduction_P Parameter: Plant Line Value: WS
  misc_feature: MA Experiment 20001906 PARAMETER Experiment Name: At_Drought_Reproduction_P Parameter: Timepoint (day) Value: 5
  misc_feature: MA Experiment 20001906 PARAMETER Experiment Name: At_Drought_Reproduction_P Parameter: Tissue Value: Siliques
  misc_feature: MA Experiment 20001906 PARAMETER Experiment Name: At_Drought_Reproduction_P Parameter: Treatment Value: Drought vs. No Drought
  misc_feature: MA Experiment ID: 20001907 Result: Down-regulated in Transcription
  misc_feature: MA Experiment 20001907 PARAMETER Experiment Name: At_Drought_Reproduction_P Parameter: Age (day) Value: 37
  misc_feature: MA Experiment 20001907 PARAMETER Experiment Name: At_Drought_Reproduction_P Parameter: Organism Value: A. thaliana
  misc_feature: MA Experiment 20001907 PARAMETER Experiment Name: At_Drought_Reproduction_P Parameter: Plant Line Value: WS
  misc_feature: MA Experiment 20001907 PARAMETER Experiment Name: At_Drought_Reproduction_P Parameter: Timepoint (day) Value: 7
  misc_feature: MA Experiment 20001907 PARAMETER Experiment Name: At_Drought_Reproduction_P Parameter: Tissue Value: Siliques
  misc_feature: MA Experiment 20001907 PARAMETER Experiment Name: At_Drought_Reproduction_P Parameter: Treatment Value: Drought vs. No Drought
  misc_feature: MA Experiment ID: 20001910 Result: Down-regulated in Transcription
  misc_feature: MA Experiment 20001910 PARAMETER Experiment Name: At_Drought_Reproduction_P Parameter: Age (day) Value: 37
  misc_feature: MA Experiment 20001910 PARAMETER Experiment Name: At_Drought_Reproduction_P Parameter: Organism Value: A. thaliana
  misc_feature: MA Experiment 20001910 PARAMETER Experiment Name: At_Drought_Reproduction_P Parameter: Plant Line Value: WS
  misc_feature: MA Experiment 20001910 PARAMETER Experiment Name: At_Drought_Reproduction_P Parameter: Timepoint (day) Value: 7
  misc_feature: MA Experiment 20001910 PARAMETER Experiment Name: At_Drought_Reproduction_P Parameter: Tissue Value: Flowers
  misc_feature: MA Experiment 20001910 PARAMETER Experiment Name: At_Drought_Reproduction_P Parameter: Treatment Value: Drought vs. No Drought
  misc_feature: MA Experiment ID: 20001911 Result: Down-regulated in Transcription
  misc_feature: MA Experiment 20001911 PARAMETER Experiment Name: At_Drought_Reproduction_P Parameter: Age (day) Value: 40
  misc_feature: MA Experiment 20001911 PARAMETER Experiment Name: At_Drought_Reproduction_P Parameter: Organism Value: A. thaliana
  misc_feature: MA Experiment 20001911 PARAMETER Experiment Name: At_Drought_Reproduction_P Parameter: Plant Line Value: WS
  misc_feature: MA Experiment 20001911 PARAMETER Experiment Name: At_Drought_Reproduction_P Parameter: Timepoint (day) Value: 10
  misc_feature: MA Experiment 20001911 PARAMETER Experiment Name: At_Drought_Reproduction_P Parameter: Tissue Value: Flowers
  misc_feature: MA Experiment 20001911 PARAMETER Experiment Name: At_Drought_Reproduction_P Parameter: Treatment Value: Drought vs. No Drought
  misc_feature: Phenotype: ROSETTE LEAVES Curled-Curled 1
  misc_feature: Phenotype: CAULINE LEAVES Curled-Curled 5
  misc_feature: Phenotype: WHOLE PLANT Color-Dark Green
  misc_feature: Phenotype: INFLORESCENCE Flowering Time-Late Flowering
  misc_feature: Phenotype: INFLORESCENCE Height-Short
  misc_feature: Phenotype: INFLORESCENCE Strength-Strong
  misc_feature: Phenotype: INFLORESCENCE Other
  misc_feature: Phenotype: ROSETTE LEAVES Other
  misc_feature: Phenotype: WHOLE PLANT Color-Dark Green
  misc_feature: Phenotype: INFLORESCENCE Flowering Time-Late Flowering
  misc_feature: Phenotype: INFLORESCENCE Height-Short
  misc_feature: Phenotype: INFLORESCENCE Height-Short
  misc_feature: Phenotype: INFLORESCENCE Strength-Strong
  misc_feature: Phenotype: INFLORESCENCE Other
  misc_feature: Phenotype: ROSETTE LEAVES Curled-Curled 5
  misc_feature: Phenotype: WHOLE PLANT Size-Small
gtaggagaagaaagttctcatttcataattgtatcaaattgtgagaggaaaaaaagaagttcaagaaatggagaaggaaggactcgggcttgagataacggagctgagattggggcttccggggagagatgtggcagagaagatgatgaagaagagagctttcacggagatgaatatgacgtcgtcgggtagtaatagtgatcaatgtgaaagcggcgtcgtttcatctggtggtgacgctgagaaggttaatgattcgccggcggcgaaaagccaggtggtggggtggccaccggtttgttcttaccggaagaaaaacagctgtaaggaagcttcgaccacgaaagtggggttagggtatgtgaaagtgagcatggatggtgtgccttatttgaggaagatggatcttggttcgagccaaggctatgatgatctagcctttgctcttgataagctcttcggtttccgtggcatcggtgtggccttgaaagatggtgacaactgcgaatacgttaccatatacgaagacaaagatggagactggatgctcgccggtgatgtaccttgggggatgtttctagagtcatgcaagaggttgagaataatgaaaagatcggatgctaccgggtttgggctgcagcctagaggagtagacgagtgatgatgacttgaacaagaagcaaggagctggttcattaatttaatcttaaacttgatcatcaagatcctttagaacatttttcctattcatgttatataaatatatatgttatagtatattattttgcaacaaaatttcatgttatggttttgcataattatcttcagaaagacagctatatatatatacactacttgtttcttgagtgttgagttaaaacattaatctgtttcaaaatttattgttatttcggatctatatatgtgtgtagaaacatatgtaataagtatccattatt

SEQ ID NO: 38104 - protein, 197 aa, Arabidopsis thaliana
  peptide (1)..(197): Ceres Seq. ID no. 13591406
  misc_feature (6)..(191): Pfam Name: AUX/IAA family Pfam Description: AUX/IAA family
  misc_feature (6)..(191): Pfam Name: AUX/IAA family Pfam Description: AUX/IAA family
  misc_feature (46)..(194): Homolog of NCBI NO: 1352058 NR Description: AUXIN-INDUCED PROTEIN IAA6
  misc_feature (43)..(194): Homolog of NCBI NO: 11131101 NR Description: Auxin-induced protein 22C (Indole-3-acetic acid
  misc_feature (1)..(194): Homolog of NCBI NO: 416640 NR Description: Auxin-induced protein 22A (Indole-3-acetic acid
  misc_feature (1)..(191): Homolog of NCBI NO: 1363486 NR Description: auxin-induced protein IAA6 - Arabidopsis thaliana
  misc_feature (1)..(191): Homolog of NCBI NO: 21553490 NR Description: putative IAA6 protein [Arabidopsis thaliana]
  misc_feature (46)..(194): Homolog of NCBI NO: 1352058 NR Description: AUXIN-INDUCED PROTEIN IAA6
  misc_feature (1)..(194): Homolog of NCBI NO: 416640 NR Description: Auxin-induced protein 22A (Indole-3-acetic acid
  misc_feature (1)..(191): Homolog of NCBI NO: 21553490 NR Description: putative IAA6 protein [Arabidopsis thaliana]
  misc_feature (1)..(197): Homolog of NCBI NO: 15232612 NR Description: auxin-responsive protein IAA19 (Indoleacetic
  misc_feature (1)..(197): Homolog of NCBI NO: 21618019 NR Description: early auxin-induced protein IAA19 [Arabidopsis
  misc_feature (53)..(197): Homolog of NCBI NO: 2618727 NR Description: IAA19 [Arabidopsis thaliana]
  misc_feature (1)..(194): Homolog of NCBI NO: 114733 NR Description: AUXIN-INDUCED PROTEIN AUX22
  misc_feature (1)..(191): Homolog of NCBI NO: 15219101 NR Description: auxin-responsive protein IAA6 (Indoleacetic
  misc_feature (1)..(191): Homolog of NCBI NO: 1363486 NR Description: auxin-induced protein IAA6 - Arabidopsis thaliana
  misc_feature (43)..(194): Homolog of NCBI NO: 11131101 NR Description: Auxin-induced protein 22C (Indole-3-acetic acid
  misc_feature (1)..(191): Homolog of NCBI NO: 15219101 NR Description: auxin-responsive protein IAA6 (Indoleacetic
  misc_feature (1)..(194): Homolog of NCBI NO: 114733 NR Description: AUXIN-INDUCED PROTEIN AUX22
  misc_feature (53)..(197): Homolog of NCBI NO: 2618727 NR Description: IAA19 [Arabidopsis thaliana]
  misc_feature (1)..(197): Homolog of NCBI NO: 21618019 NR Description: early auxin-induced protein IAA19 [Arabidopsis
  misc_feature (1)..(197): Homolog of NCBI NO: 15232612 NR Description: auxin-responsive protein IAA19 (Indoleacetic
MEKEGLGLEITELRLGLPGRDVAEKMMKKRAFTEMNMTSSGSNSDQCESGVVSSGGDAEKVNDSPAAKSQVVGWPPVCSYRKKNSCKEASTTKVGLGYVKVSMDGVPYLRKMDLGSSQGYDDLAFALDKLFGFRGIGVALKDGDNCEYVTIYEDKDGDWMLAGDVPWGMFLESCKRLRIMKRSDATGFGLQPRGVDE

SEQ ID NO: 38105 - protein, 172 aa, Arabidopsis thaliana
  peptide (1)..(172): Ceres Seq. ID no. 13591407
  misc_feature (1)..(166): Pfam Name: AUX/IAA family Pfam Description: AUX/IAA family
  misc_feature (1)..(166): Pfam Name: AUX/IAA family Pfam Description: AUX/IAA family
  misc_feature (21)..(169): Homolog of NCBI NO: 1352058 NR Description: AUXIN-INDUCED PROTEIN IAA6
  misc_feature (18)..(169): Homolog of NCBI NO: 11131101 NR Description: Auxin-induced protein 22C (Indole-3-acetic acid
  misc_feature (1)..(169): Homolog of NCBI NO: 416640 NR Description: Auxin-induced protein 22A (Indole-3-acetic acid
  misc_feature (1)..(166): Homolog of NCBI NO: 1363486 NR Description: auxin-induced protein IAA6 - Arabidopsis thaliana
  misc_feature (1)..(166): Homolog of NCBI NO: 21553490 NR Description: putative IAA6 protein [Arabidopsis thaliana]
  misc_feature (21)..(169): Homolog of NCBI NO: 1352058 NR Description: AUXIN-INDUCED PROTEIN IAA6
  misc_feature (1)..(169): Homolog of NCBI NO: 416640 NR Description: Auxin-induced protein 22A (Indole-3-acetic acid
  misc_feature (1)..(166): Homolog of NCBI NO: 21553490 NR Description: putative IAA6 protein [Arabidopsis thaliana]
  misc_feature (1)..(172): Homolog of NCBI NO: 15232612 NR Description: auxin-responsive protein IAA19 (Indoleacetic
  misc_feature (1)..(172): Homolog of NCBI NO: 21618019 NR Description: early auxin-induced protein IAA19 [Arabidopsis
  misc_feature (28)..(172): Homolog of NCBI NO: 2618727 NR Description: IAA19 [Arabidopsis thaliana]
  misc_feature (1)..(169): Homolog of NCBI NO: 114733 NR Description: AUXIN-INDUCED PROTEIN AUX22
  misc_feature (1)..(166): Homolog of NCBI NO: 15219101 NR Description: auxin-responsive protein IAA6 (Indoleacetic
  misc_feature (1)..(166): Homolog of NCBI NO: 1363486 NR Description: auxin-induced protein IAA6 - Arabidopsis thaliana
  misc_feature (18)..(169): Homolog of NCBI NO: 11131101 NR Description: Auxin-induced protein 22C (Indole-3-acetic acid
  misc_feature (1)..(166): Homolog of NCBI NO: 15219101 NR Description: auxin-responsive protein IAA6 (Indoleacetic
  misc_feature (1)..(169): Homolog of NCBI NO: 114733 NR Description: AUXIN-INDUCED PROTEIN AUX22
  misc_feature (28)..(172): Homolog of NCBI NO: 2618727 NR Description: IAA19 [Arabidopsis thaliana]
  misc_feature (1)..(172): Homolog of NCBI NO: 21618019 NR Description: early auxin-induced protein IAA19 [Arabidopsis
  misc_feature (1)..(172): Homolog of NCBI NO: 15232612 NR Description: auxin-responsive protein IAA19 (Indoleacetic
MMKKRAFTEMNMTSSGSNSDQCESGVVSSGGDAEKVNDSPAAKSQVVGWPPVCSYRKKNSCKEASTTKVGLGYVKVSMDGVPYLRKMDLGSSQGYDDLAFALDKLFGFRGIGVALKDGDNCEYVTIYEDKDGDWMLAGDVPWGMFLESCKRLRIMKRSDATGFGLQPRGVDE

SEQ ID NO: 38106 - protein, 171 aa, Arabidopsis thaliana
  peptide (1)..(171): Ceres Seq. ID no. 13591408
  misc_feature (1)..(165): Pfam Name: AUX/IAA family Pfam Description: AUX/IAA family
  misc_feature (1)..(165): Pfam Name: AUX/IAA family Pfam Description: AUX/IAA family
  misc_feature (20)..(168): Homolog of NCBI NO: 1352058 NR Description: AUXIN-INDUCED PROTEIN IAA6
  misc_feature (17)..(168): Homolog of NCBI NO: 11131101 NR Description: Auxin-induced protein 22C (Indole-3-acetic acid
  misc_feature (1)..(168): Homolog of NCBI NO: 416640 NR Description: Auxin-induced protein 22A (Indole-3-acetic acid
  misc_feature (1)..(165): Homolog of NCBI NO: 1363486 NR Description: auxin-induced protein IAA6 - Arabidopsis thaliana
  misc_feature (1)..(165): Homolog of NCBI NO: 21553490 NR Description: putative IAA6 protein [Arabidopsis thaliana]
  misc_feature (20)..(168): Homolog of NCBI NO: 1352058 NR Description: AUXIN-INDUCED PROTEIN IAA6
  misc_feature (1)..(168): Homolog of NCBI NO: 416640 NR Description: Auxin-induced protein 22A (Indole-3-acetic acid
  misc_feature (1)..(165): Homolog of NCBI NO: 21553490 NR Description: putative IAA6 protein [Arabidopsis thaliana]
  misc_feature (1)..(171): Homolog of NCBI NO: 15232612 NR Description: auxin-responsive protein IAA19 (Indoleacetic
  misc_feature (1)..(171): Homolog of NCBI NO: 21618019 NR Description: early auxin-induced protein IAA19 [Arabidopsis
  misc_feature (27)..(171): Homolog of NCBI NO: 2618727 NR Description: IAA19 [Arabidopsis thaliana]
  misc_feature (1)..(168): Homolog of NCBI NO: 114733 NR Description: AUXIN-INDUCED PROTEIN AUX22
  misc_feature (1)..(165): Homolog of NCBI NO: 15219101 NR Description: auxin-responsive protein IAA6 (Indoleacetic
  misc_feature (1)..(165): Homolog of NCBI NO: 1363486 NR Description: auxin-induced protein IAA6 - Arabidopsis thaliana
  misc_feature (17)..(168): Homolog of NCBI NO: 11131101 NR Description: Auxin-induced protein 22C (Indole-3-acetic acid
  misc_feature (1)..(165): Homolog of NCBI NO: 15219101 NR Description: auxin-responsive protein IAA6 (Indoleacetic
  misc_feature (1)..(168): Homolog of NCBI NO: 114733 NR Description: AUXIN-INDUCED PROTEIN AUX22
  misc_feature (27)..(171): Homolog of NCBI NO: 2618727 NR Description: IAA19 [Arabidopsis thaliana]
  misc_feature (1)..(171): Homolog of NCBI NO: 21618019 NR Description: early auxin-induced protein IAA19 [Arabidopsis
  misc_feature (1)..(171): Homolog of NCBI NO: 15232612 NR Description: auxin-responsive protein IAA19 (Indoleacetic
MKKRAFTEMNMTSSGSNSDQCESGVVSSGGDAEKVNDSPAAKSQVVGWPPVCSYRKKNSCKEASTTKVGLGYVKVSMDGVPYLRKMDLGSSQGYDDLAFALDKLFGFRGIGVALKDGDNCEYVTIYEDKDGDWMLAGDVPWGMFLESCKRLRIMKRSDATGFGLQPRGVDE

SEQ ID NO: 38107 - DNA, 1103 bp, Arabidopsis thaliana
  misc_feature (1)..(1103): Ceres Seq. ID no. 12328785
  misc_feature: MA Experiment ID: 108434 Result: Up-regulated in Transcription
  misc_feature: MA Experiment 108434 PARAMETER Experiment Name: At_Root_Tips_cDNA_P Parameter: Tissue Value: Root Tips
  misc_feature: MA Experiment ID: 108595 Result: Down-regulated in Transcription
  misc_feature: MA Experiment 108595 PARAMETER Experiment Name: At_Ler-pi_Ovule_cDNA_P Parameter: Plant Line Value: null
attcgaacaattaccgacacacaaaaagtttgaagagaaaaacaaaaaatgttgtcgagattgttcaaggcaggtgaaaaggttttgtcgaatctcgttagcaagaaagacatttacatggcgtcgaggaatcaggagaaatctcccaaagtgcaagagctttacgacctctgcaaagagactttcactggcaaagctccttctcctgcttccatggctatccaaaagctatgctctgtgttggactcagttagtcctgcagatgttgggcttgaagaggtatctcaagacgatgatcgaggctatggagtttctggggttagccgtttcaatagagtaggacgatgggcacaaccgataacattcttagacattcatgaatgtgatacttttacaatgtgtattttctgcttcccaacgtcttcagtgatcccattgcatgatcatccagagatggctgtgtttagtaaaatcctctatggatcacttcatgttaaagcttacgattgggtcgaacctccatgtattatcacacaagataaaggcgtccccggttctcttccaaggttggcgaaattggtgagtgacaaagttataacgcctcagtctgagataccggcgttgtacccaaagactggaggcaatctccattgcttcactgcgttgactccatgtgctgtgctcgacattctctcacctccttacaaagaaagtgttggcaggagttgcagttactacatggactatccgttttccactttcgcattggagaacggaatgaagaaggtggatgaaggaaaggaagacgaatacgcatggcttgtacagattgacacgcccgatgatcttcacatgcgtcccggatcatatactggtccaactatcagagtctagatatttgtggtttgttttgtagcaaagtagagcaactcttgtaacattccaagataagtttctggagaagatatcaatacgatttcagattaaagatgaactctttgtttagtccatgtccacttctcagttctcacacgcattcaagcaaatgaaactgcggaaaactacaaatagatcggcaatgagaaatgttaagatttcatttc

SEQ ID NO: 38108 - protein, 281 aa, Arabidopsis thaliana
  peptide (1)..(281): Ceres Seq. ID no. 12328786
  misc_feature (25)..(279): Homolog of NCBI NO: 34906308 NR Description: unnamed protein product [Oryza sativa (japonica
  misc_feature (35)..(280): Homolog of NCBI NO: 15242505 NR Description: putative protein
  misc_feature (35)..(280): Homolog of NCBI NO: 10176982 NR Description: contains similarity to unknown
  misc_feature (36)..(280): Homolog of NCBI NO: 18406030 NR Description: expressed protein
  misc_feature (36)..(280): Homolog of NCBI NO: 21536850 NR Description: unknown [Arabidopsis thaliana]
  misc_feature (36)..(280): Homolog of NCBI NO: 25370572 NR Description: hypothetical protein At2g42670 [imported] -
  misc_feature (56)..(281): Homolog of NCBI NO: 15451150 NR Description: Unknown protein [Arabidopsis thaliana]
  misc_feature (24)..(281): Homolog of NCBI NO: 21618020 NR Description: unknown [Arabidopsis thaliana]
  misc_feature (1)..(281): Homolog of NCBI NO: 25402861 NR Description: protein F15H18.4 [imported] - Arabidopsis
  misc_feature (1)..(281): Homolog of NCBI NO: 18394617 NR Description: expressed protein
MLSRLFKAGEKVLSNLVSKKDIYMASRNQEKSPKVQELYDLCKETFTGKAPSPASMAIQKLCSVLDSVSPADVGLEEVSQDDDRGYGVSGVSRFNRVGRWAQPITFLDIHECDTFTMCIFCFPTSSVIPLHDHPEMAVFSKILYGSLHVKAYDWVEPPCIITQDKGVPGSLPRLAKLVSDKVITPQSEIPALYPKTGGNLHCFTALTPCAVLDILSPPYKESVGRSCSYYMDYPFSTFALENGMKKVDEGKEDEYAWLVQIDTPDDLHMRPGSYTGPTIRV

SEQ ID NO: 38109 - protein, 258 aa, Arabidopsis thaliana
  peptide (1)..(258): Ceres Seq. ID no. 12328787
  misc_feature (2)..(256): Homolog of NCBI NO: 34906308 NR Description: unnamed protein product [Oryza sativa (japonica
  misc_feature (12)..(257): Homolog of NCBI NO: 15242505 NR Description: putative protein
  misc_feature (12)..(257): Homolog of NCBI NO: 10176982 NR Description: contains similarity to unknown
  misc_feature (13)..(257): Homolog of NCBI NO: 18406030 NR Description: expressed protein
  misc_feature (13)..(257): Homolog of NCBI NO: 21536850 NR Description: unknown [Arabidopsis thaliana]
  misc_feature (13)..(257): Homolog of NCBI NO: 25370572 NR Description: hypothetical protein At2g42670 [imported] -
  misc_feature (33)..(258): Homolog of NCBI NO: 15451150 NR Description: Unknown protein [Arabidopsis thaliana]
  misc_feature (1)..(258): Homolog of NCBI NO: 21618020 NR Description: unknown [Arabidopsis thaliana]
  misc_feature (1)..(258): Homolog of NCBI NO: 25402861 NR Description: protein F15H18.4 [imported] - Arabidopsis
  misc_feature (1)..(258): Homolog of NCBI NO: 18394617 NR Description: expressed protein
MASRNQEKSPKVQELYDLCKETFTGKAPSPASMAIQKLCSVLDSVSPADVGLEEVSQDDDRGYGVSGVSRFNRVGRWAQPITFLDIHECDTFTMCIFCFPTSSVIPLHDHPEMAVFSKILYGSLHVKAYDWVEPPCIITQDKGVPGSLPRLAKLVSDKVITPQSEIPALYPKTGGNLHCFTALTPCAVLDILSPPYKESVGRSCSYYMDYPFSTFALENGMKKVDEGKEDEYAWLVQIDTPDDLHMRPGSYTGPTIRV

SEQ ID NO: 38110 - protein, 226 aa, Arabidopsis thaliana
  peptide (1)..(226): Ceres Seq. ID no. 12328788
  misc_feature (1)..(224): Homolog of NCBI NO: 34906308 NR Description: unnamed protein product [Oryza sativa (japonica
  misc_feature (1)..(225): Homolog of NCBI NO: 15242505 NR Description: putative protein
  misc_feature (1)..(225): Homolog of NCBI NO: 10176982 NR Description: contains similarity to unknown
  misc_feature (1)..(225): Homolog of NCBI NO: 18406030 NR Description: expressed protein
  misc_feature (1)..(225): Homolog of NCBI NO: 21536850 NR Description: unknown [Arabidopsis thaliana]
  misc_feature (1)..(225): Homolog of NCBI NO: 25370572 NR Description: hypothetical protein At2g42670 [imported] -
  misc_feature (1)..(226): Homolog of NCBI NO: 15451150 NR Description: Unknown protein [Arabidopsis thaliana]
  misc_feature (1)..(226): Homolog of NCBI NO: 21618020 NR Description: unknown [Arabidopsis thaliana]
  misc_feature (1)..(226): Homolog of NCBI NO: 25402861 NR Description: protein F15H18.4 [imported] - Arabidopsis
  misc_feature (1)..(226): Homolog of NCBI NO: 18394617 NR Description: expressed protein
MAIQKLCSVLDSVSPADVGLEEVSQDDDRGYGVSGVSRFNRVGRWAQPITFLDIHECDTFTMCIFCFPTSSVIPLHDHPEMAVFSKILYGSLHVKAYDWVEPPCIITQDKGVPGSLPRLAKLVSDKVITPQSEIPALYPKTGGNLHCFTALTPCAVLDILSPPYKESVGRSCSYYMDYPFSTFALENGMKKVDEGKEDEYAWLVQIDTPDDLHMRPGSYTGPTIRV

SEQ ID NO: 38111 - DNA, 1278 bp, Arabidopsis thaliana
  misc_feature (1)..(1278): Ceres Seq. ID no. 12482452
  misc_feature: MA Experiment ID: 108461 Result: Up-regulated in Transcription
  misc_feature: MA Experiment 108461 PARAMETER Experiment Name: At_Germinating_Seeds_cDNA_P Parameter: Age (day) Value: 1 vs. 0
  misc_feature: MA Experiment 108461 PARAMETER Experiment Name: At_Germinating_Seeds_cDNA_P Parameter: Tissue Value: Germinating Seeds
  misc_feature: MA Experiment ID: 20000071 Result: Down-regulated in Transcription
  misc_feature: MA Experiment 20000071 PARAMETER Experiment Name: At_100uM_ABA_Mutants_cDNA_P Parameter: Plant Line Value: CS8104
  misc_feature: MA Experiment 20000071 PARAMETER Experiment Name: At_100uM_ABA_Mutants_cDNA_P Parameter: Timepoint (hr) Value: 6
  misc_feature: MA Experiment 20000071 PARAMETER Experiment Name: At_100uM_ABA_Mutants_cDNA_P Parameter: Tissue Value: Aerial
  misc_feature: MA Experiment 20000071 PARAMETER Experiment Name: At_100uM_ABA_Mutants_cDNA_P Parameter: Treatment Value: 100uM ABA vs. No Treatment
  misc_feature: MA Experiment ID: 20000089 Result: Down-regulated in Transcription
  misc_feature: MA Experiment ID: 20000090 Result: Down-regulated in Transcription
  misc_feature: MA Experiment ID: 20000117 Result: Down-regulated in Transcription
  misc_feature: MA Experiment 20000117 PARAMETER Experiment Name: At_100uM_ABA_Mutants_cDNA_P Parameter: Plant Line Value: Columbia
  misc_feature: MA Experiment 20000117 PARAMETER Experiment Name: At_100uM_ABA_Mutants_cDNA_P Parameter: Timepoint (hr) Value: 6
  misc_feature: MA Experiment 20000117 PARAMETER Experiment Name: At_100uM_ABA_Mutants_cDNA_P Parameter: Tissue Value: Aerial
  misc_feature: MA Experiment 20000117 PARAMETER Experiment Name: At_100uM_ABA_Mutants_cDNA_P Parameter: Treatment Value: 100uM ABA vs. No Treatment
  misc_feature: MA Experiment ID: 20001248 Result: Down-regulated in Transcription
  misc_feature: MA Experiment 20001248 PARAMETER Experiment Name: At_Far-red-induction_P Parameter: Age (day) Value: 7
  misc_feature: MA Experiment 20001248 PARAMETER Experiment Name: At_Far-red-induction_P Parameter: Light Value: Far-red vs. White
  misc_feature: MA Experiment 20001248 PARAMETER Experiment Name: At_Far-red-induction_P Parameter: Organism Value: A. thaliana
  misc_feature: MA Experiment 20001248 PARAMETER Experiment Name: At_Far-red-induction_P Parameter: Plant Line Value: Columbia
  misc_feature: MA Experiment 20001248 PARAMETER Experiment Name: At_Far-red-induction_P Parameter: Timepoint (hr) Value: 4
  misc_feature: MA Experiment 20001248 PARAMETER Experiment Name: At_Far-red-induction_P Parameter: Tissue Value: Whole Plant
aataaaatttggtttaaaattccaaaattctctcaaatctttaatatatattttccaataacaaaagatatatatctcctcaaattttctagggaatacagtatttgtgtgtttgagacagatttttgcagattctctcgttctgcattctctgttcttcttctgatgtatccatcaatcgaagacgatgatgatcttctcgctgctctttgttttgatcaaagcaatggagtagaagatccttatggatatatgcaaacaaatgaagataacatatttcaggattttgggtcttgtggtgtgaatctgatgcagccacaacaagaacaatttgattcttttaatggaaatcttgagcaagtttgtagtagctttagaggaggaaacaatggagttgtttatagtagtagcattggatcagcacaattggatttggctgcatcgtttagtggagttttgcagcaagagacacatcaagtctgtggctttagaggacaaaacgacgattctgcagtgcctcatttgcagcagcaacaaggacaggtgtttagtggtgtagtggaaatcaattcttcgtcatctgttggagctgttaaggaagagtttgaggaagaatgttcggggaagaggagacgaactggatcatgtagcaagccaggaaccaaagcctgtcgcgagaaactaagaagggaaaagctaaatgacaagttcatggacttgagctctgttttagagcctggcaggactccaaagacggataaatcagctatactcgacgatgcaatccgggttgtgaatcagcttagaggtgaagctcatgagcttcaagaaaccaaccaaaagcttctagaagagatcaagagtctaaaggcggataaaaacgagctacgagaggaaaagctggtgttgaaggcggagaaggagaagatggagcaacagttaaaatctatggtggttccatcaccaggtttcatgccctcccagcatccagcagctttccattcccataagatggcggtggcttacccttacggctactatcctccaaacatgccaatgtggtcacccttacctcctgctgaccgtgatacgtctcgtgatctcaaaaatcttcctcctgttgcttaatcttcttcatgttgattcatcattgatcattgttatcaatcccttaggaatttttgttccttcagatgattctttaatcagtagttttgcagtaaccatttggagattagagaattttatgatttgaataaaatgtcagtttcctggtgg

SEQ ID NO: 38112 - protein, 375 aa, Arabidopsis thaliana
  peptide (1)..(375): Ceres Seq. ID no. 12482453
  misc_feature (218)..(269): Pfam Name: Helix-loop-helix DNA-binding domain Pfam Description: Helix-loop-helix DNA-binding domain
  misc_feature (217)..(355): Homolog of NCBI NO: 15230975 NR Description: bHLH protein
  misc_feature (189)..(375): Homolog of NCBI NO: 38636768 NR Description: helix-loop-helix-like protein
  misc_feature (189)..(375): Homolog of NCBI NO: 29367409 NR Description: helix-loop-helix-like protein
  misc_feature (203)..(375): Homolog of NCBI NO: 15223710 NR Description: bHLH protein
  misc_feature (187)..(375): Homolog of NCBI NO: 21592325 NR Description: bHLH transcription factor, putative [Arabidopsis
  misc_feature (187)..(375): Homolog of NCBI NO: 15239706 NR Description: bHLH protein
  misc_feature (137)..(375): Homolog of NCBI NO: 30682847 NR Description: bHLH protein [Arabidopsis thaliana]
  misc_feature (137)..(375): Homolog of NCBI NO: 18414212 NR Description: bHLH protein
  misc_feature (85)..(375): Homolog of NCBI NO: 20127030 NR Description: putative bHLH transcription factor [Arabidopsis
  misc_feature (56)..(375): Homolog of NCBI NO: 22331274 NR Description: bHLH protein
NKIWFKIPKFSQIFNIYFPITKDIYLLKFSREYSICVFETDFCRFSRSAFSVLLLMYPSIEDDDDLLAALCFDQSNGVEDPYGYMQTNEDNIFQDFGSCGVNLMQPQQEQFDSFNGNLEQVCSSFRGGNNGVVYSSSIGSAQLDLAASFSGVLQQETHQVCGFRGQNDDSAVPHLQQQQGQVFSGVVEINSSSSVGAVKEEFEEECSGKRRRTGSCSKPGTKACREKLRREKLNDKFMDLSSVLEPGRTPKTDKSAILDDAIRVVNQLRGEAHELQETNQKLLEEIKSLKADKNELREEKLVLKAEKEKMEQQLKSMVVPSPGFMPSQHPAAFHSHKMAVAYPYGYYPPNMPMWSPLPPADRDTSRDLKNLPPVA

SEQ ID NO: 38113 - protein, 320 aa, Arabidopsis thaliana
  peptide (1)..(320): Ceres Seq. ID no. 12482454
  misc_feature (163)..(214): Pfam Name: Helix-loop-helix DNA-binding domain Pfam Description: Helix-loop-helix DNA-binding domain
  misc_feature (162)..(300): Homolog of NCBI NO: 15230975 NR Description: bHLH protein
  misc_feature (134)..(320): Homolog of NCBI NO: 38636768 NR Description: helix-loop-helix-like protein
  misc_feature (134)..(320): Homolog of NCBI NO: 29367409 NR Description: helix-loop-helix-like protein
  misc_feature (148)..(320): Homolog of NCBI NO: 15223710 NR Description: bHLH protein
  misc_feature (132)..(320): Homolog of NCBI NO: 21592325 NR Description: bHLH transcription factor, putative [Arabidopsis
  misc_feature (132)..(320): Homolog of NCBI NO: 15239706 NR Description: bHLH protein
  misc_feature (82)..(320): Homolog of NCBI NO: 30682847 NR Description: bHLH protein [Arabidopsis thaliana]
  misc_feature (82)..(320): Homolog of NCBI NO: 18414212 NR Description: bHLH protein
  misc_feature (30)..(320): Homolog of NCBI NO: 20127030 NR Description: putative bHLH transcription factor [Arabidopsis
  misc_feature (1)..(320): Homolog of NCBI NO: 22331274 NR Description: bHLH protein
MYPSIEDDDDLLAALCFDQSNGVEDPYGYMQTNEDNIFQDFGSCGVNLMQPQQEQFDSFNGNLEQVCSSFRGGNNGVVYSSSIGSAQLDLAASFSGVLQQETHQVCGFRGQNDDSAVPHLQQQQGQVFSGVVEINSSSSVGAVKEEFEEECSGKRRRTGSCSKPGTKACREKLRREKLNDKFMDLSSVLEPGRTPKTDKSAILDDAIRVVNQLRGEAHELQETNQKLLEEIKSLKADKNELREEKLVLKAEKEKMEQQLKSMVVPSPGFMPSQHPAAFHSHKMAVAYPYGYYPPNMPMWSPLPPADRDTSRDLKNLPPVA

SEQ ID NO: 38114 - protein, 291 aa, Arabidopsis thaliana
  peptide (1)..(291): Ceres Seq. ID no. 12482455
  misc_feature (134)..(185): Pfam Name: Helix-loop-helix DNA-binding domain Pfam Description: Helix-loop-helix DNA-binding domain
  misc_feature (133)..(271): Homolog of NCBI NO: 15230975 NR Description: bHLH protein
  misc_feature (105)..(291): Homolog of NCBI NO: 38636768 NR Description: helix-loop-helix-like protein
  misc_feature (105)..(291): Homolog of NCBI NO: 29367409 NR Description: helix-loop-helix-like protein
  misc_feature (119)..(291): Homolog of NCBI NO: 15223710 NR Description: bHLH protein
  misc_feature (103)..(291): Homolog of NCBI NO: 21592325 NR Description: bHLH transcription factor, putative [Arabidopsis
  misc_feature (103)..(291): Homolog of NCBI NO: 15239706 NR Description: bHLH protein
  misc_feature (53)..(291): Homolog of NCBI NO: 30682847 NR Description: bHLH protein [Arabidopsis thaliana]
  misc_feature (53)..(291): Homolog of NCBI NO: 18414212 NR Description: bHLH protein
  misc_feature (1)..(291): Homolog of NCBI NO: 20127030 NR Description: putative bHLH transcription factor [Arabidopsis
  misc_feature (1)..(291): Homolog of NCBI NO: 22331274 NR Description: bHLH protein
MQTNEDNIFQDFGSCGVNLMQPQQEQFDSFNGNLEQVCSSFRGGNNGVVYSSSIGSAQLDLAASFSGVLQQETHQVCGFRGQNDDSAVPHLQQQQGQVFSGVVEINSSSSVGAVKEEFEEECSGKRRRTGSCSKPGTKACREKLRREKLNDKFMDLSSVLEPGRTPKTDKSAILDDAIRVVNQLRGEAHELQETNQKLLEEIKSLKADKNELREEKLVLKAEKEKMEQQLKSMVVPSPGFMPSQHPAAFHSHKMAVAYPYGYYPPNMPMWSPLPPADRDTSRDLKNLPPVA

SEQ ID NO: 38115 - DNA, 1273 bp, Arabidopsis thaliana
  misc_feature (1)..(1273): Ceres Seq. ID no. 12326735
  misc_feature: MA Experiment ID: 108434 Result: Down-regulated in Transcription
  misc_feature: MA Experiment 108434 PARAMETER Experiment Name: At_Root_Tips_cDNA_P Parameter: Tissue Value: Root Tips
  misc_feature: MA Experiment ID: 108489 Result: Up-regulated in Transcription
  misc_feature: MA Experiment ID: 108605 Result: Up-regulated in Transcription
  misc_feature: MA Experiment 108605 PARAMETER Experiment Name: At_100uM_ABA_cDNA_P Parameter: Timepoint (hr) Value: 6
  misc_feature: MA Experiment 108605 PARAMETER Experiment Name: At_100uM_ABA_cDNA_P Parameter: Tissue Value: Aerial
  misc_feature: MA Experiment 108605 PARAMETER Experiment Name: At_100uM_ABA_cDNA_P Parameter: Treatment Value: 100uM ABA vs. No Treatment
  misc_feature: MA Experiment ID: 108607 Result: Up-regulated in Transcription
  misc_feature: MA Experiment 108607 PARAMETER Experiment Name: At_100uM_ABA_cDNA_P Parameter: Timepoint (hr) Value: 4
  misc_feature: MA Experiment 108607 PARAMETER Experiment Name: At_100uM_ABA_cDNA_P Parameter: Tissue Value: Aerial
  misc_feature: MA Experiment 108607 PARAMETER Experiment Name: At_100uM_ABA_cDNA_P Parameter: Treatment Value: 100uM ABA vs. No Treatment
  misc_feature: MA Experiment ID: 20000070 Result: Up-regulated in Transcription
  misc_feature: MA Experiment 20000070 PARAMETER Experiment Name: At_100uM_ABA_Mutants_cDNA_P Parameter: Plant Line Value: CS24
  misc_feature: MA Experiment 20000070 PARAMETER Experiment Name: At_100uM_ABA_Mutants_cDNA_P Parameter: Timepoint (hr) Value: 6
  misc_feature: MA Experiment 20000070 PARAMETER Experiment Name: At_100uM_ABA_Mutants_cDNA_P Parameter: Tissue Value: Aerial
  misc_feature: MA Experiment 20000070 PARAMETER Experiment Name: At_100uM_ABA_Mutants_cDNA_P Parameter: Treatment Value: 100uM ABA vs. No Treatment
  misc_feature: MA Experiment ID: 20000072 Result: Up-regulated in Transcription
  misc_feature: MA Experiment 20000072 PARAMETER Experiment Name: At_100uM_ABA_Mutants_cDNA_P Parameter: Plant Line Value: CS8105
  misc_feature: MA Experiment 20000072 PARAMETER Experiment Name: At_100uM_ABA_Mutants_cDNA_P Parameter: Timepoint (hr) Value: 6
  misc_feature: MA Experiment 20000072 PARAMETER Experiment Name: At_100uM_ABA_Mutants_cDNA_P Parameter: Tissue Value: Aerial
  misc_feature: MA Experiment 20000072 PARAMETER Experiment Name: At_100uM_ABA_Mutants_cDNA_P Parameter: Treatment Value: 100uM ABA vs. No Treatment
  misc_feature: MA Experiment ID: 20000087 Result: Up-regulated in Transcription
  misc_feature: MA Experiment 20000087 PARAMETER Experiment Name: At_100uM_ABA_Mutants_cDNA_P Parameter: Plant Line Value: WS
  misc_feature: MA Experiment 20000087 PARAMETER Experiment Name: At_100uM_ABA_Mutants_cDNA_P Parameter: Timepoint (hr) Value: 6
  misc_feature: MA Experiment 20000087 PARAMETER Experiment Name: At_100uM_ABA_Mutants_cDNA_P Parameter: Tissue Value: Aerial
  misc_feature: MA Experiment 20000087 PARAMETER Experiment Name: At_100uM_ABA_Mutants_cDNA_P Parameter: Treatment Value: 100uM ABA vs. No Treatment
  misc_feature: MA Experiment ID: 20000090 Result: Up-regulated in Transcription
  misc_feature: MA Experiment ID: 20000117 Result: Up-regulated in Transcription
  misc_feature: MA Experiment 20000117 PARAMETER Experiment Name: At_100uM_ABA_Mutants_cDNA_P Parameter: Plant Line Value: Columbia
  misc_feature: MA Experiment 20000117 PARAMETER Experiment Name: At_100uM_ABA_Mutants_cDNA_P Parameter: Timepoint (hr) Value: 6
  misc_feature: MA Experiment 20000117 PARAMETER Experiment Name: At_100uM_ABA_Mutants_cDNA_P Parameter: Tissue Value: Aerial
  misc_feature: MA Experiment 20000117 PARAMETER Experiment Name: At_100uM_ABA_Mutants_cDNA_P Parameter: Treatment Value: 100uM ABA vs. No Treatment
  misc_feature: MA Experiment ID: 20000169 Result: Up-regulated in Transcription
  misc_feature: MA Experiment 20000169 PARAMETER Experiment Name: At_100uM_ABA_P Parameter: Age (day) Value: 14
  misc_feature: MA Experiment 20000169 PARAMETER Experiment Name: At_100uM_ABA_P Parameter: Organism Value: A. thaliana
  misc_feature: MA Experiment 20000169 PARAMETER Experiment Name: At_100uM_ABA_P Parameter: Plant Line Value: WS
  misc_feature: MA Experiment 20000169 PARAMETER Experiment Name: At_100uM_ABA_P Parameter: Timepoint (hr) Value: 6
  misc_feature: MA Experiment 20000169 PARAMETER Experiment Name: At_100uM_ABA_P Parameter: Tissue Value: Aerial
  misc_feature: MA Experiment 20000169 PARAMETER Experiment Name: At_100uM_ABA_P Parameter: Treatment Value: 100uM ABA vs. No Treatment
  misc_feature: MA Experiment ID: 20000173 Result: Down-regulated in Transcription
  misc_feature: MA Experiment 20000173 PARAMETER Experiment Name: At_42deg_Heat_P Parameter: Age (day) Value: 14
  misc_feature: MA Experiment 20000173 PARAMETER Experiment Name: At_42deg_Heat_P Parameter: Organism Value: A. thaliana
  misc_feature: MA Experiment 20000173 PARAMETER Experiment Name: At_42deg_Heat_P Parameter: Plant Line Value: WS
  misc_feature: MA Experiment 20000173 PARAMETER Experiment Name: At_42deg_Heat_P Parameter: Temperature (deg C) Value: 42 vs. 22
  misc_feature: MA Experiment 20000173 PARAMETER Experiment Name: At_42deg_Heat_P Parameter: Timepoint (hr) Value: 6
  misc_feature: MA Experiment 20000173 PARAMETER Experiment Name: At_42deg_Heat_P Parameter: Tissue Value: Aerial
  misc_feature: MA Experiment ID: 20000179 Result: Down-regulated in Transcription
  misc_feature: MA Experiment 20000179 PARAMETER Experiment Name: At_Germinating_Seeds_P Parameter: Age (hr) Value: 6 vs. 0
  misc_feature: MA Experiment 20000179 PARAMETER Experiment Name: At_Germinating_Seeds_P Parameter: Tissue Value: Germinating Seeds
  misc_feature: MA Experiment ID: 20000180 Result: Down-regulated in Transcription
  misc_feature: MA Experiment 20000180 PARAMETER Experiment Name: At_Germinating_Seeds_P Parameter: Age (hr) Value: 24 vs. 0
  misc_feature: MA Experiment 20000180 PARAMETER Experiment Name: At_Germinating_Seeds_P Parameter: Tissue Value: Germinating Seeds
  misc_feature: MA Experiment ID: 20000182 Result: Up-regulated in Transcription
  misc_feature: MA Experiment 20000182 PARAMETER Experiment Name: At_2mM_SA_P Parameter: Age (day) Value: 14
  misc_feature: MA Experiment 20000182 PARAMETER Experiment Name: At_2mM_SA_P Parameter: Organism Value: A. thaliana
  misc_feature: MA Experiment 20000182 PARAMETER Experiment Name: At_2mM_SA_P Parameter: Plant Line Value: WS
  misc_feature: MA Experiment 20000182 PARAMETER Experiment Name: At_2mM_SA_P Parameter: Timepoint (hr) Value: 6
  misc_feature: MA Experiment 20000182 PARAMETER Experiment Name: At_2mM_SA_P Parameter: Tissue Value: Aerial
  misc_feature: MA Experiment 20000182 PARAMETER Experiment Name: At_2mM_SA_P Parameter: Treatment Value: 2mM SA vs. No Treatment
  misc_feature: MA Experiment ID: 20000184 Result: Down-regulated in Transcription
  misc_feature: MA Experiment 20000184 PARAMETER Experiment Name: At_Shoots__P Parameter: Age (day) Value: 7
  misc_feature: MA Experiment 20000184 PARAMETER Experiment Name: At_Shoots__P Parameter: Tissue Value: Shoots vs. Whole Plant
  misc_feature: MA Experiment ID: 20000185 Result: Down-regulated in Transcription
  misc_feature: MA Experiment 20000185 PARAMETER Experiment Name: At_Roots__P Parameter: Age (day) Value: 7 vs. 21
  misc_feature: MA Experiment 20000185 PARAMETER Experiment Name: At_Roots__P Parameter: Organism Value: A. thaliana
  misc_feature: MA Experiment 20000185 PARAMETER Experiment Name: At_Roots__P Parameter: Tissue Value: Roots vs. Whole Plant
  misc_feature: MA Experiment ID: 20000211 Result: Up-regulated in Transcription
  misc_feature: MA Experiment 20000211 PARAMETER Experiment Name: At_0.001percent_MeJA__P Parameter: Age (day) Value: 14
  misc_feature: MA Experiment 20000211 PARAMETER Experiment Name: At_0.001percent_MeJA__P Parameter: Organism Value: A. thaliana
  misc_feature: MA Experiment 20000211 PARAMETER Experiment Name: At_0.001percent_MeJA__P Parameter: Plant Line Value: WS
  misc_feature: MA Experiment 20000211 PARAMETER Experiment Name: At_0.001percent_MeJA__P Parameter: Timepoint (hr) Value: 1
  misc_feature: MA Experiment 20000211 PARAMETER Experiment Name: At_0.001percent_MeJA__P Parameter: Tissue Value: Aerial
  misc_feature: MA Experiment 20000211 PARAMETER Experiment Name: At_0.001percent_MeJA__P Parameter: Treatment Value: 0.001percent MeJA vs. No Treatment
  misc_feature: MA Experiment ID: 20000224 Result: Up-regulated in Transcription
  misc_feature: MA Experiment ID: 20000234 Result: Down-regulated in Transcription
  misc_feature: MA Experiment 20000234 PARAMETER Experiment Name: At_Siliques_P Parameter: Age (day) Value: 21
  misc_feature: MA Experiment 20000234 PARAMETER Experiment Name: At_Siliques_P Parameter: Organism Value: A. thaliana
  misc_feature: MA Experiment 20000234 PARAMETER Experiment Name: At_Siliques_P Parameter: Plant Line Value: WS
  misc_feature: MA Experiment 20000234 PARAMETER Experiment Name: At_Siliques_P Parameter: Tissue Value: Less Than 5mm Siliques vs. Whole Plant
  misc_feature: MA Experiment ID: 20000235 Result: Down-regulated in Transcription
  misc_feature: MA Experiment 20000235 PARAMETER Experiment Name: At_Siliques_P Parameter: Age (day) Value: 21
  misc_feature: MA Experiment 20000235 PARAMETER Experiment Name: At_Siliques_P Parameter: Organism Value: A. thaliana
  misc_feature: MA Experiment 20000235 PARAMETER Experiment Name: At_Siliques_P Parameter: Plant Line Value: WS
  misc_feature: MA Experiment 20000235 PARAMETER Experiment Name: At_Siliques_P Parameter: Tissue Value: 5-10mm Siliques vs. Whole Plant
  misc_feature: MA Experiment ID: 20000264 Result: Down-regulated in Transcription
  misc_feature: MA Experiment 20000264 PARAMETER Experiment Name: At_Open_Flower_P Parameter: Age (day) Value: 21
  misc_feature: MA Experiment 20000264 PARAMETER Experiment Name: At_Open_Flower_P Parameter: Plant Line Value: WS
  misc_feature: MA Experiment 20000264 PARAMETER Experiment Name: At_Open_Flower_P Parameter: Tissue Value: Open Flower vs. Whole Plant
  misc_feature: MA Experiment ID: 20000265 Result: Down-regulated in Transcription
  misc_feature: MA Experiment 20000265 PARAMETER Experiment Name: At_Open_Flower_P Parameter: Age (day) Value: 21
  misc_feature: MA Experiment 20000265 PARAMETER Experiment Name: At_Open_Flower_P Parameter: Plant Line Value: WS
  misc_feature: MA Experiment 20000265 PARAMETER Experiment Name: At_Open_Flower_P Parameter: Tissue Value: Closed Flower vs. Whole Plant
  misc_feature: MA Experiment ID: 20000286 Result: Down-regulated in Transcription
  misc_feature: MA Experiment 20000286 PARAMETER Experiment Name: At_Open_Flower_P Parameter: Age (day) Value: 21
  misc_feature: MA Experiment 20000286 PARAMETER Experiment Name: At_Open_Flower_P Parameter: Plant Line Value: WS
  misc_feature: MA Experiment 20000286 PARAMETER Experiment Name: At_Open_Flower_P Parameter: Tissue Value: Half Open vs. Whole Plant
  misc_feature: MA Experiment ID: 20000308 Result: Up-regulated in Transcription
  misc_feature: MA Experiment 20000308 PARAMETER Experiment Name: At_100mM_NaCl__P Parameter: Age (day) Value: 17
  misc_feature: MA Experiment 20000308 PARAMETER Experiment Name: At_100mM_NaCl__P Parameter: Organism Value: A. thaliana
  misc_feature: MA Experiment 20000308 PARAMETER Experiment Name: At_100mM_NaCl__P Parameter: Plant Line Value: WS
  misc_feature: MA Experiment 20000308 PARAMETER Experiment Name: At_100mM_NaCl__P Parameter: Timepoint (hr) Value: 72
  misc_feature: MA Experiment 20000308 PARAMETER Experiment Name: At_100mM_NaCl__P Parameter: Tissue Value: Whole Plant
  misc_feature: MA Experiment 20000308 PARAMETER Experiment Name: At_100mM_NaCl__P Parameter: Treatment Value: 100mM NaCl vs. No Treatment
  misc_feature: MA Experiment ID: 20000438 Result: Down-regulated in Transcription
  misc_feature: MA Experiment 20000438 PARAMETER Experiment Name: At_Shoots__P Parameter: Age (day) Value: 14
  misc_feature: MA Experiment 20000438 PARAMETER Experiment Name: At_Shoots__P Parameter: Tissue Value: Shoots vs. Whole Plant
  misc_feature: MA Experiment ID: 20000439 Result: Down-regulated in Transcription
  misc_feature: MA Experiment 20000439 PARAMETER Experiment Name: At_Roots__P Parameter: Age (day) Value: 14 vs. 21
  misc_feature: MA Experiment 20000439 PARAMETER Experiment Name: At_Roots__P Parameter: Organism Value: A. thaliana
  misc_feature: MA Experiment 20000439 PARAMETER Experiment Name: At_Roots__P Parameter: Tissue Value: Roots vs. Whole Plant
  misc_feature: MA Experiment ID: 20000453 Result: Up-regulated in Transcription
  misc_feature: MA Experiment 20000453 PARAMETER Experiment Name: At_100uM_ABA_P Parameter: Age (day) Value: 15
  misc_feature: MA Experiment 20000453 PARAMETER Experiment Name: At_100uM_ABA_P Parameter: Organism Value: A. thaliana
  misc_feature: MA Experiment 20000453 PARAMETER Experiment Name: At_100uM_ABA_P Parameter: Plant Line Value: WS
  misc_feature: MA Experiment 20000453 PARAMETER Experiment Name: At_100uM_ABA_P Parameter: Timepoint (hr) Value: 24
  misc_feature: MA Experiment 20000453 PARAMETER Experiment Name: At_100uM_ABA_P Parameter: Tissue Value: Aerial
  misc_feature: MA Experiment 20000453 PARAMETER Experiment Name: At_100uM_ABA_P Parameter: Treatment Value: 100uM ABA vs. No Treatment
  misc_feature: MA Experiment ID: 20000527 Result: Down-regulated in Transcription
  misc_feature: MA Experiment 20000527 PARAMETER Experiment Name: At_10percent_PEG_P Parameter: Age (day) Value: 20
  misc_feature: MA Experiment 20000527 PARAMETER Experiment Name: At_10percent_PEG_P Parameter: Organism Value: A. thaliana
  misc_feature: MA Experiment 20000527 PARAMETER Experiment Name: At_10percent_PEG_P Parameter: Plant Line Value: WS
  misc_feature: MA Experiment 20000527 PARAMETER Experiment Name: At_10percent_PEG_P Parameter: Timepoint (day) Value: 20
  misc_feature: MA Experiment 20000527 PARAMETER Experiment Name: At_10percent_PEG_P Parameter: Tissue Value: Whole Plant
  misc_feature: MA Experiment 20000527 PARAMETER Experiment Name: At_10percent_PEG_P Parameter: Treatment Value: 10percent PEG vs. No Treatment
  misc_feature: MA Experiment ID: 20000573 Result: Up-regulated in Transcription
  misc_feature: MA Experiment 20000573 PARAMETER Experiment Name: At_100uM_ABA_Mutants__P Parameter: Organism Value: A. thaliana
  misc_feature: MA Experiment 20000573 PARAMETER Experiment Name: At_100uM_ABA_Mutants__P Parameter: Plant Line Value: CS22 vs. Ler wt
  misc_feature: MA Experiment 20000573 PARAMETER Experiment Name: At_100uM_ABA_Mutants__P Parameter: Timepoint (hr) Value: N/A
  misc_feature: MA Experiment 20000573 PARAMETER Experiment Name: At_100uM_ABA_Mutants__P Parameter: Tissue Value: Whole Plant
  misc_feature: MA Experiment 20000573 PARAMETER Experiment Name: At_100uM_ABA_Mutants__P Parameter: Treatment Value: None
  misc_feature: MA Experiment ID: 20000574 Result: Up-regulated in Transcription
  misc_feature: MA Experiment 20000574 PARAMETER Experiment Name: At_100uM_ABA_Mutants__P Parameter: Organism Value: A. thaliana
  misc_feature: MA Experiment 20000574 PARAMETER Experiment Name: At_100uM_ABA_Mutants__P Parameter: Plant Line Value: CS23 vs. Ler wt
  misc_feature: MA Experiment 20000574 PARAMETER Experiment Name: At_100uM_ABA_Mutants__P Parameter: Timepoint (hr) Value: N/A
  misc_feature: MA Experiment 20000574 PARAMETER Experiment Name: At_100uM_ABA_Mutants__P Parameter: Tissue Value: Whole Plant
  misc_feature: MA Experiment 20000574 PARAMETER Experiment Name: At_100uM_ABA_Mutants__P Parameter: Treatment Value: None
  misc_feature: MA Experiment ID: 20000794 Result: Down-regulated in Transcription
  misc_feature: MA Experiment 20000794 PARAMETER Experiment Name: At_Petals_P Parameter: Age (day) Value: 23-25 days
  misc_feature: MA Experiment 20000794 PARAMETER Experiment Name: At_Petals_P Parameter: Plant Line Value: WS
  misc_feature: MA Experiment 20000794 PARAMETER Experiment Name: At_Petals_P Parameter: Tissue Value: Petals vs. Whole plant
  misc_feature: MA Experiment ID: 20001773 Result: Down-regulated in Transcription
  misc_feature: MA Experiment 20001773 PARAMETER Experiment Name: At_Far-red-enriched-adult_P Parameter: Age (day) Value: 30
  misc_feature: MA Experiment 20001773 PARAMETER Experiment Name: At_Far-red-enriched-adult_P Parameter: Light Value: Far-red enriched vs. White
  misc_feature: MA Experiment 20001773 PARAMETER Experiment Name: At_Far-red-enriched-adult_P Parameter: Organism Value: A. thaliana
  misc_feature: MA Experiment 20001773 PARAMETER Experiment Name: At_Far-red-enriched-adult_P Parameter: Plant Line Value: Columbia
  misc_feature: MA Experiment 20001773 PARAMETER Experiment Name: At_Far-red-enriched-adult_P Parameter: Timepoint (hr) Value: 48
  misc_feature: MA Experiment 20001773 PARAMETER Experiment Name: At_Far-red-enriched-adult_P Parameter: Tissue Value: Aerial
  misc_feature: MA Experiment ID: 20001905 Result: Up-regulated in Transcription
  misc_feature: MA Experiment 20001905 PARAMETER Experiment Name: At_Drought_Reproduction_P Parameter: Age (day) Value: 40
  misc_feature: MA Experiment 20001905 PARAMETER Experiment Name: At_Drought_Reproduction_P Parameter: Organism Value: A. thaliana
  misc_feature: MA Experiment 20001905 PARAMETER Experiment Name: At_Drought_Reproduction_P Parameter: Plant Line Value: WS
  misc_feature: MA Experiment 20001905 PARAMETER Experiment Name: At_Drought_Reproduction_P Parameter: Timepoint (day) Value: 10
  misc_feature: MA Experiment 20001905 PARAMETER Experiment Name: At_Drought_Reproduction_P Parameter: Tissue Value: Rosettes
  misc_feature: MA Experiment 20001905 PARAMETER Experiment Name: At_Drought_Reproduction_P Parameter: Treatment Value: Drought vs. No Drought
  misc_feature: MA Experiment ID: 20001911 Result: Up-regulated in Transcription
  misc_feature: MA Experiment 20001911 PARAMETER Experiment Name: At_Drought_Reproduction_P Parameter: Age (day) Value: 40
  misc_feature: MA Experiment 20001911 PARAMETER Experiment Name: At_Drought_Reproduction_P Parameter: Organism Value: A. thaliana
  misc_feature: MA Experiment 20001911 PARAMETER Experiment Name: At_Drought_Reproduction_P Parameter: Plant Line Value: WS
  misc_feature: MA Experiment 20001911 PARAMETER Experiment Name: At_Drought_Reproduction_P Parameter: Timepoint (day) Value: 10
  misc_feature: MA Experiment 20001911 PARAMETER Experiment Name: At_Drought_Reproduction_P Parameter: Tissue Value: Flowers
  misc_feature: MA Experiment 20001911 PARAMETER Experiment Name: At_Drought_Reproduction_P Parameter: Treatment Value: Drought vs. No Drought
cttagagccttttaaaagtaaccaacgccatgaatatcttccaagactggcctgagcctatagtccgtgtccaatccttatctgaaagcaacctcggagccataccaaatcgctacgtcaagcctctatctcagcgtccaaacataacccctcacaacaaacacaaccctcagaccaccaccatccccatcattgacttaggtcgcctatacacggacgacctaactctacaagccaaaacgcttgatgaaatctcaaaggcttgtagagaattgggatttttccaagtggtgaaccacgggatgagtcctcagctcatggaccaagctaaagcaacatggagagaattctttaatctccccatggaactcaaaaatatgcatgctaattcgccgaaaacttacgagggatatggaagccgactaggcgtagaaaagggtgctattcttgattggagcgactactattatctccattaccagccttcgtctttgaaggattacaccaagtggccttccttgcctcttcattgccgagaaatattggaggattattgcaaggaaatggtgaaactatgcgagaacttgatgaaaatcttatccaaaaacttgggattacaagaagacagacttcaaaatgcatttggtggtaaagaggaatcaggtggatgtttaagggttaattattacccaaaatgccctcaaccggagctgactctcggtatctctccgcactctgatcccggcggtttgaccattctcttgccggacgaacaagtcgccagtcttcaggtccgtggatccgacgacgcttggatcacagtcgaaccagctcctcatgctttcatcgttaacatgggtgaccaaattcagatgctgagcaattcaatatacaaaagcgtagaacacagagtgatcgtgaaccctgaaaatgagaggttgtcattggcatttttctacaacccaaagggcaatgttcctatcgagccattgaaggagctagtgaccgtagattcacctgctctctactcctccaccacatacgatcgttaccgtcaattcattcgtacgcaaggcccacgtagcaaatgtcatattgacgaacttaaatcccctcgatagtgcgtacatttgatttgttaatagtgaactatgcgttcttgttgtataaataatgaacaatgcttctttttatctgttataagtactgtaatatttattgtgtttgttatgtgagcatgtttatattatgttttaggatatgggtttgatgc

SEQ ID NO: 38116 - protein, 363 aa, Arabidopsis thaliana
  peptide (1)..(363): Ceres Seq. ID no. 12326736
  misc_feature (211)..(312): Pfam Name: 2OG-Fe(II) oxygenase superfamily Pfam Description: 2OG-Fe(II) oxygenase superfamily
  misc_feature (15)..(341): Homolog of NCBI NO: 37536444 NR Description: unknown protein [Oryza sativa (japonica
  misc_feature (25)..(341): Homolog of NCBI NO: 38345872 NR Description: OSJNBa0064M23.14 [Oryza sativa (japonica
  misc_feature (7)..(359): Homolog of NCBI NO: 21554535 NR Description: putative anthocyanidin synthase [Arabidopsis
  misc_feature (7)..(359): Homolog of NCBI NO: 15224472 NR Description: putative anthocyanidin synthase
  misc_feature (278)..(360): Homolog of NCBI NO: 34907994 NR Description: leucoanthocyanidin dioxygenase-like protein
  misc_feature (5)..(286): Homolog of NCBI NO: 34907994 NR Description: leucoanthocyanidin dioxygenase-like protein
  misc_feature (6)..(363): Homolog of NCBI NO: 21537324 NR Description: leucoanthocyanidin dioxygenase-like protein
  misc_feature (1)..(363): Homolog of NCBI NO: 15239179 NR Description: leucoanthocyanidin dioxygenase-like protein
  misc_feature (1)..(363): Homolog of NCBI NO: 15229694 NR Description: putative leucoanthocyanidin dioxygenase; protein
  misc_feature (1)..(363): Homolog of NCBI NO: 15228785 NR Description: leucoanthocyanidin dioxygenase -like protein
MNIFQDWPEPIVRVQSLSESNLGAIPNRYVKPLSQRPNITPHNKHNPQTTTIPIIDLGRLYTDDLTLQAKTLDEISKACRELGFFQVVNHGMSPQLMDQAKATWREFFNLPMELKNMHANSPKTYEGYGSRLGVEKGAILDWSDYYYLHYQPSSLKDYTKWPSLPLHCREILEDYCKEMVKLCENLMKILSKNLGLQEDRLQNAFGGKEESGGCLRVNYYPKCPQPELTLGISPHSDPGGLTILLPDEQVASLQVRGSDDAWITVEPAPHAFIVNMGDQIQMLSNSIYKSVEHRVIVNPENERLSLAFFYNPKGNVPIEPLKELVTVDSPALYSSTTYDRYRQFIRTQGPRSKCHIDELKSPR

SEQ ID NO: 38117 - protein, 272 aa, Arabidopsis thaliana
  peptide (1)..(272): Ceres Seq. ID no. 12326737
  misc_feature (120)..(221): Pfam Name: 2OG-Fe(II) oxygenase superfamily Pfam Description: 2OG-Fe(II) oxygenase superfamily
  misc_feature (1)..(250): Homolog of NCBI NO: 37536444 NR Description: unknown protein [Oryza sativa (japonica
  misc_feature (1)..(250): Homolog of NCBI NO: 38345872 NR Description: OSJNBa0064M23.14 [Oryza sativa (japonica
  misc_feature (1)..(268): Homolog of NCBI NO: 21554535 NR Description: putative anthocyanidin synthase [Arabidopsis
  misc_feature (1)..(268): Homolog of NCBI NO: 15224472 NR Description: putative anthocyanidin synthase
  misc_feature (187)..(269): Homolog of NCBI NO: 34907994 NR Description: leucoanthocyanidin dioxygenase-like protein
  misc_feature (1)..(195): Homolog of NCBI NO: 34907994 NR Description: leucoanthocyanidin dioxygenase-like protein
  misc_feature (1)..(272): Homolog of NCBI NO: 21537324 NR Description: leucoanthocyanidin dioxygenase-like protein
  misc_feature (1)..(272): Homolog of NCBI NO: 15239179 NR Description: leucoanthocyanidin dioxygenase-like protein
  misc_feature (1)..(272): Homolog of NCBI NO: 15229694 NR Description: putative leucoanthocyanidin dioxygenase; protein
  misc_feature (1)..(272): Homolog of NCBI NO: 15228785 NR Description: leucoanthocyanidin dioxygenase -like protein
MSPQLMDQAKATWREFFNLPMELKNMHANSPKTYEGYGSRLGVEKGAILDWSDYYYLHYQPSSLKDYTKWPSLPLHCREILEDYCKEMVKLCENLMKILSKNLGLQEDRLQNAFGGKEESGGCLRVNYYPKCPQPELTLGISPHSDPGGLTILLPDEQVASLQVRGSDDAWITVEPAPHAFIVNMGDQIQMLSNSIYKSVEHRVIVNPENERLSLAFFYNPKGNVPIEPLKELVTVDSPALYSSTTYDRYRQFIRTQGPRSKCHIDELKSPR

SEQ ID NO: 38118 - protein, 267 aa, Arabidopsis thaliana
  peptide (1)..(267): Ceres Seq. ID no. 12326738
  misc_feature (115)..(216): Pfam Name: 2OG-Fe(II) oxygenase superfamily Pfam Description: 2OG-Fe(II) oxygenase superfamily
  misc_feature (1)..(245): Homolog of NCBI NO: 37536444 NR Description: unknown protein [Oryza sativa (japonica
  misc_feature (1)..(245): Homolog of NCBI NO: 38345872 NR Description: OSJNBa0064M23.14 [Oryza sativa (japonica
  misc_feature (1)..(263): Homolog of NCBI NO: 21554535 NR Description: putative anthocyanidin synthase [Arabidopsis
  misc_feature (1)..(263): Homolog of NCBI NO: 15224472 NR Description: putative anthocyanidin synthase
  misc_feature (182)..(264): Homolog of NCBI NO: 34907994 NR Description: leucoanthocyanidin dioxygenase-like protein
  misc_feature (1)..(190): Homolog of NCBI NO: 34907994 NR Description: leucoanthocyanidin dioxygenase-like protein
  misc_feature (1)..(267): Homolog of NCBI NO: 21537324 NR Description: leucoanthocyanidin dioxygenase-like protein
  misc_feature (1)..(267): Homolog of NCBI NO: 15239179 NR Description: leucoanthocyanidin dioxygenase-like protein
  misc_feature (1)..(267): Homolog of NCBI NO: 15229694 NR Description: putative leucoanthocyanidin dioxygenase; protein
  misc_feature (1)..(267): Homolog of NCBI NO: 15228785 NR Description: leucoanthocyanidin dioxygenase -like protein
MDQAKATWREFFNLPMELKNMHANSPKTYEGYGSRLGVEKGAILDWSDYYYLHYQPSSLKDYTKWPSLPLHCREILEDYCKEMVKLCENLMKILSKNLGLQEDRLQNAFGGKEESGGCLRVNYYPKCPQPELTLGISPHSDPGGLTILLPDEQVASLQVRGSDDAWITVEPAPHAFIVNMGDQIQMLSNSIYKSVEHRVIVNPENERLSLAFFYNPKGNVPIEPLKELVTVDSPALYSSTTYDRYRQFIRTQGPRSKCHIDELKSPR

SEQ ID NO: 38119 - DNA, 845 bp, Arabidopsis thaliana
  misc_feature (1)..(845): Ceres Seq. ID no. 12579572
  misc_feature: MA Experiment ID: 108434 Result: Up-regulated in Transcription
  misc_feature: MA Experiment 108434 PARAMETER Experiment Name: At_Root_Tips_cDNA_P Parameter: Tissue Value: Root Tips
  misc_feature: MA Experiment ID: 108462 Result: Down-regulated in Transcription
  misc_feature: MA Experiment 108462 PARAMETER Experiment Name: At_Germinating_Seeds_cDNA_P Parameter: Age (day) Value: 2 vs. 0
  misc_feature: MA Experiment 108462 PARAMETER Experiment Name: At_Germinating_Seeds_cDNA_P Parameter: Tissue Value: Germinating Seeds
  misc_feature: MA Experiment ID: 108463 Result: Down-regulated in Transcription
  misc_feature: MA Experiment 108463 PARAMETER Experiment Name: At_Germinating_Seeds_cDNA_P Parameter: Age (day) Value: 3 vs. 0
  misc_feature: MA Experiment 108463 PARAMETER Experiment Name: At_Germinating_Seeds_cDNA_P Parameter: Tissue Value: Germinating Seeds
  misc_feature: MA Experiment ID: 108573 Result: Down-regulated in Transcription
  misc_feature: MA Experiment 108573 PARAMETER Experiment Name: At_Drought_cDNA_P Parameter: Timepoint (hr) Value: 6
  misc_feature: MA Experiment 108573 PARAMETER Experiment Name: At_Drought_cDNA_P Parameter: Tissue Value: Aerial
  misc_feature: MA Experiment 108573 PARAMETER Experiment Name: At_Drought_cDNA_P Parameter: Treatment Value: Drought vs. No Drought
  misc_feature: MA Experiment ID: 20000224 Result: Down-regulated in Transcription
  misc_feature: MA Experiment ID: 20000234 Result: Up-regulated in Transcription
  misc_feature: MA Experiment 20000234 PARAMETER Experiment Name: At_Siliques_P Parameter: Age (day) Value: 21
  misc_feature: MA Experiment 20000234 PARAMETER Experiment Name: At_Siliques_P Parameter: Organism Value: A. thaliana
  misc_feature: MA Experiment 20000234 PARAMETER Experiment Name: At_Siliques_P Parameter: Plant Line Value: WS
  misc_feature: MA Experiment 20000234 PARAMETER Experiment Name: At_Siliques_P Parameter: Tissue Value: Less Than 5mm Siliques vs. Whole Plant
  misc_feature: MA Experiment ID: 20000437 Result: Down-regulated in Transcription
  misc_feature: MA Experiment 20000437 PARAMETER Experiment Name: At_Drought_P Parameter: Age (day) Value: 8
  misc_feature: MA Experiment 20000437 PARAMETER Experiment Name: At_Drought_P Parameter: Organism Value: A. thaliana
  misc_feature: MA Experiment 20000437 PARAMETER Experiment Name: At_Drought_P Parameter: Plant Line Value: WS
  misc_feature: MA Experiment 20000437 PARAMETER Experiment Name: At_Drought_P Parameter: Timepoint (hr) Value: 24
  misc_feature: MA Experiment 20000437 PARAMETER Experiment Name: At_Drought_P Parameter: Tissue Value: Whole Plant
  misc_feature: MA Experiment 20000437 PARAMETER Experiment Name: At_Drought_P Parameter: Treatment Value: Drought vs. No Drought
  misc_feature: MA Experiment ID: 20000794 Result: Down-regulated in Transcription
  misc_feature: MA Experiment 20000794 PARAMETER Experiment Name: At_Petals_P Parameter: Age (day) Value: 23-25 days
  misc_feature: MA Experiment 20000794 PARAMETER Experiment Name: At_Petals_P Parameter: Plant Line Value: WS
  misc_feature: MA Experiment 20000794 PARAMETER Experiment Name: At_Petals_P Parameter: Tissue Value: Petals vs. Whole plant
  misc_feature: MA Experiment ID: 20001451 Result: Down-regulated in Transcription
  misc_feature: MA Experiment 20001451 PARAMETER Experiment Name: At_Far-red-induction_P Parameter: Age (day) Value: 7
  misc_feature: MA Experiment 20001451 PARAMETER Experiment Name: At_Far-red-induction_P Parameter: Light Value: Far-red vs. White
  misc_feature: MA Experiment 20001451 PARAMETER Experiment Name: At_Far-red-induction_P Parameter: Organism Value: A. thaliana
  misc_feature: MA Experiment 20001451 PARAMETER Experiment Name: At_Far-red-induction_P Parameter: Plant Line Value: Columbia
  misc_feature: MA Experiment 20001451 PARAMETER Experiment Name: At_Far-red-induction_P Parameter: Timepoint (hr) Value: 24
  misc_feature: MA Experiment 20001451 PARAMETER Experiment Name: At_Far-red-induction_P Parameter: Tissue Value: Whole Plant
  misc_feature: MA Experiment ID: 20001558 Result: Up-regulated in Transcription
  misc_feature: MA Experiment 20001558 PARAMETER Experiment Name: At_Drought_Soil_Dry_P Parameter: Age (day) Value: 27
  misc_feature: MA Experiment 20001558 PARAMETER Experiment Name: At_Drought_Soil_Dry_P Parameter: Organism Value: A. thaliana
  misc_feature: MA Experiment 20001558 PARAMETER Experiment Name: At_Drought_Soil_Dry_P Parameter: Plant Line Value: WS
  misc_feature: MA Experiment 20001558 PARAMETER Experiment Name: At_Drought_Soil_Dry_P Parameter: Post Timepoint (hr) Value: 6
  misc_feature: MA Experiment 20001558 PARAMETER Experiment Name: At_Drought_Soil_Dry_P Parameter: Post-Treatment Value: Re-Water vs. No Drought
  misc_feature: MA Experiment 20001558 PARAMETER Experiment Name: At_Drought_Soil_Dry_P Parameter: Timepoint (day) Value: 13
  misc_feature: MA Experiment 20001558 PARAMETER Experiment Name: At_Drought_Soil_Dry_P Parameter: Treatment Value: Drought vs. No Drought
  misc_feature: MA Experiment ID: 20001757 Result: Up-regulated in Transcription
  misc_feature: MA Experiment 20001757 PARAMETER Experiment Name: At_50mM_NH4NO3_L-to-H_P Parameter: Timepoint (hr) Value: 6
  misc_feature: MA Experiment 20001757 PARAMETER Experiment Name: At_50mM_NH4NO3_L-to-H_P Parameter: Tissue Value: Leaf
  misc_feature: MA Experiment 20001757 PARAMETER Experiment Name: At_50mM_NH4NO3_L-to-H_P Parameter: Treatment Value: 50mM NH4NO3 vs 100mM Mannitol
acaccttttctccagagttccgacaagaagaagaacgccgagaacaggaagcttatcttcaaaagagccgagcaatactccaaggaatatgccgagaaggagaaggagttgatctcgttgaaacgcgaggccaagcttaagggaggtttctatgttgaccctgaagctaagctcttgttcatcatccgtatccgtggtatcaatgccattgaccctaagactaagaagattctccagctcttgcgtttgagacagattttcaatggtgttttccttaaagtcaacaaggctacgatgaacatgcttcgccgtgttgagccctatgtcacttacggattccctaacttgaagagtgtcaaggaattgatctacaagagaggttacggaaagcttaaccaccagaggatagctttgactgacaactctattgtagagcaggctcttggaaagcatggtatcatttgcactgaggatttgatccacgagattctaacagtaggacctcatttcaaggaagccaacaacttcctttggccattccagcttaaggcaccactaggtggcctcaagaagaagagaaatcactacgtggaaggtggtgatgccggaaaccgtgagaacttcatcaatgagcttatcaggaggatgaattagaatgttatcgttttcaatgtcaaacttctctgcgttttcattatgtgcctcctggattttgatcttctttctcaagttaaaagacattttgaatcttctcttttgttctctttggatcttaatttgtgctttgattactgcaagtgattctacatttctctttaataggattattaagaaactgtttcttc

SEQ ID NO: 38120 - protein, 217 aa, Arabidopsis thaliana
  peptide (1)..(217): Ceres Seq. ID no. 12579573
  misc_feature (57)..(109): Pfam Name: Ribosomal protein L30p/L7e Pfam Description: Ribosomal protein L30p/L7e
  misc_feature (7)..(217): Homolog of NCBI NO: 307388 NR Description: ribosomal protein L7
  misc_feature (9)..(216): Homolog of NCBI NO: 28630259 NR Description: ribosomal protein L7 [Branchiostoma lanceolatum]
  misc_feature (7)..(217): Homolog of NCBI NO: 38346542 NR Description: OSJNBa0035M09.3 [Oryza sativa (japonica
  misc_feature (7)..(217): Homolog of NCBI NO: 38637548 NR Description: putative 60S ribosomal protein L7
  misc_feature (9)..(217): Homolog of NCBI NO: 445613 NR Description: ribosomal protein L7
  misc_feature (9)..(217): Homolog of NCBI NO: 15231288 NR Description: ribosomal protein, putative
  misc_feature (9)..(217): Homolog of NCBI NO: 27311547 NR Description: Unknown protein [Arabidopsis thaliana]
  misc_feature (9)..(217): Homolog of NCBI NO: 30689623 NR Description: 60S ribosomal protein L7 (RPL7C) [Arabidopsis
  misc_feature (9)..(217): Homolog of NCBI NO: 30689617 NR Description: 60S ribosomal protein L7 (RPL7C) [Arabidopsis
  misc_feature (9)..(217): Homolog of NCBI NO: 15226212 NR Description: putative ribosomal protein L7
TPFLQSSDKKKNAENRKLIFKRAEQYSKEYAEKEKELISLKREAKLKGGFYVDPEAKLLFIIRIRGINAIDPKTKKILQLLRLRQIFNGVFLKVNKATMNMLRRVEPYVTYGFPNLKSVKELIYKRGYGKLNHQRIALTDNSIVEQALGKHGIICTEDLIHEILTVGPHFKEANNFLWPFQLKAPLGGLKKKRNHYVEGGDAGNRENFINELIRRMN

SEQ ID NO: 38121 - protein, 119 aa, Arabidopsis thaliana
  peptide (1)..(119): Ceres Seq. ID no. 12579574
  misc_feature (1)..(119): Homolog of NCBI NO: 307388 NR Description: ribosomal protein L7
  misc_feature (1)..(118): Homolog of NCBI NO: 28630259 NR Description: ribosomal protein L7 [Branchiostoma lanceolatum]
  misc_feature (1)..(119): Homolog of NCBI NO: 38346542 NR Description: OSJNBa0035M09.3 [Oryza sativa (japonica
  misc_feature (1)..(119): Homolog of NCBI NO: 38637548 NR Description: putative 60S ribosomal protein L7
  misc_feature (1)..(119): Homolog of NCBI NO: 445613 NR Description: ribosomal protein L7
  misc_feature (1)..(119): Homolog of NCBI NO: 15231288 NR Description: ribosomal protein, putative
  misc_feature (1)..(119): Homolog of NCBI NO: 27311547 NR Description: Unknown protein [Arabidopsis thaliana]
  misc_feature (1)..(119): Homolog of NCBI NO: 30689623 NR Description: 60S ribosomal protein L7 (RPL7C) [Arabidopsis
  misc_feature (1)..(119): Homolog of NCBI NO: 30689617 NR Description: 60S ribosomal protein L7 (RPL7C) [Arabidopsis
  misc_feature (1)..(119): Homolog of NCBI NO: 15226212 NR Description: putative ribosomal protein L7
MNMLRRVEPYVTYGFPNLKSVKELIYKRGYGKLNHQRIALTDNSIVEQALGKHGIICTEDLIHEILTVGPHFKEANNFLWPFQLKAPLGGLKKKRNHYVEGGDAGNRENFINELIRRMN

SEQ ID NO: 38122 - protein, 117 aa, Arabidopsis thaliana
  peptide (1)..(117): Ceres Seq. ID no. 12579575
  misc_feature (1)..(117): Homolog of NCBI NO: 307388 NR Description: ribosomal protein L7
  misc_feature (1)..(116): Homolog of NCBI NO: 28630259 NR Description: ribosomal protein L7 [Branchiostoma lanceolatum]
  misc_feature (1)..(117): Homolog of NCBI NO: 38346542 NR Description: OSJNBa0035M09.3 [Oryza sativa (japonica
  misc_feature (1)..(117): Homolog of NCBI NO: 38637548 NR Description: putative 60S ribosomal protein L7
  misc_feature (1)..(117): Homolog of NCBI NO: 445613 NR Description: ribosomal protein L7
  misc_feature (1)..(117): Homolog of NCBI NO: 15231288 NR Description: ribosomal protein, putative
  misc_feature (1)..(117): Homolog of NCBI NO: 27311547 NR Description: Unknown protein [Arabidopsis thaliana]
  misc_feature (1)..(117): Homolog of NCBI NO: 30689623 NR Description: 60S ribosomal protein L7 (RPL7C) [Arabidopsis
  misc_feature (1)..(117): Homolog of NCBI NO: 30689617 NR Description: 60S ribosomal protein L7 (RPL7C) [Arabidopsis
  misc_feature (1)..(117): Homolog of NCBI NO: 15226212 NR Description: putative ribosomal protein L7
MLRRVEPYVTYGFPNLKSVKELIYKRGYGKLNHQRIALTDNSIVEQALGKHGIICTEDLIHEILTVGPHFKEANNFLWPFQLKAPLGGLKKKRNHYVEGGDAGNRENFINELIRRMN

SEQ ID NO: 38123 - DNA, 836 bp, Arabidopsis thaliana
  misc_feature (1)..(836): Ceres Seq. ID no. 12562066
  misc_feature: MA Experiment ID: 20000794 Result: Down-regulated in Transcription
  misc_feature: MA Experiment 20000794 PARAMETER Experiment Name: At_Petals_P Parameter: Age (day) Value: 23-25 days
  misc_feature: MA Experiment 20000794 PARAMETER Experiment Name: At_Petals_P Parameter: Plant Line Value: WS
  misc_feature: MA Experiment 20000794 PARAMETER Experiment Name: At_Petals_P Parameter: Tissue Value: Petals vs. Whole plant
  misc_feature: MA Experiment ID: 20001558 Result: Up-regulated in Transcription
  misc_feature: MA Experiment 20001558 PARAMETER Experiment Name: At_Drought_Soil_Dry_P Parameter: Age (day) Value: 27
  misc_feature: MA Experiment 20001558 PARAMETER Experiment Name: At_Drought_Soil_Dry_P Parameter: Organism Value: A. thaliana
  misc_feature: MA Experiment 20001558 PARAMETER Experiment Name: At_Drought_Soil_Dry_P Parameter: Plant Line Value: WS
  misc_feature: MA Experiment 20001558 PARAMETER Experiment Name: At_Drought_Soil_Dry_P Parameter: Post Timepoint (hr) Value: 6
  misc_feature: MA Experiment 20001558 PARAMETER Experiment Name: At_Drought_Soil_Dry_P Parameter: Post-Treatment Value: Re-Water vs. No Drought
  misc_feature: MA Experiment 20001558 PARAMETER Experiment Name: At_Drought_Soil_Dry_P Parameter: Timepoint (day) Value: 13
  misc_feature: MA Experiment 20001558 PARAMETER Experiment Name: At_Drought_Soil_Dry_P Parameter: Treatment Value: Drought vs. No Drought
  misc_feature: MA Experiment ID: 20001560 Result: Up-regulated in Transcription
  misc_feature: MA Experiment 20001560 PARAMETER Experiment Name: At_Drought_Soil_Dry_P Parameter: Age (day) Value: 28
  misc_feature: MA Experiment 20001560 PARAMETER Experiment Name: At_Drought_Soil_Dry_P Parameter: Organism Value: A. thaliana
  misc_feature: MA Experiment 20001560 PARAMETER Experiment Name: At_Drought_Soil_Dry_P Parameter: Plant Line Value: WS
  misc_feature: MA Experiment 20001560 PARAMETER Experiment Name: At_Drought_Soil_Dry_P Parameter: Post Timepoint (hr) Value: None
  misc_feature: MA Experiment 20001560 PARAMETER Experiment Name: At_Drought_Soil_Dry_P Parameter: Post-Treatment Value: None
  misc_feature: MA Experiment 20001560 PARAMETER Experiment Name: At_Drought_Soil_Dry_P Parameter: Timepoint (day) Value: 14
  misc_feature: MA Experiment 20001560 PARAMETER Experiment Name: At_Drought_Soil_Dry_P Parameter: Treatment Value: Drought vs. No Drought
  misc_feature: MA Experiment ID: 20001911 Result: Down-regulated in Transcription
  misc_feature: MA Experiment 20001911 PARAMETER Experiment Name: At_Drought_Reproduction_P Parameter: Age (day) Value: 40
  misc_feature: MA Experiment 20001911 PARAMETER Experiment Name: At_Drought_Reproduction_P Parameter: Organism Value: A. thaliana
  misc_feature: MA Experiment 20001911 PARAMETER Experiment Name: At_Drought_Reproduction_P Parameter: Plant Line Value: WS
  misc_feature: MA Experiment 20001911 PARAMETER Experiment Name: At_Drought_Reproduction_P Parameter: Timepoint (day) Value: 10
  misc_feature: MA Experiment 20001911 PARAMETER Experiment Name: At_Drought_Reproduction_P Parameter: Tissue Value: Flowers
  misc_feature: MA Experiment 20001911 PARAMETER Experiment Name: At_Drought_Reproduction_P Parameter: Treatment Value: Drought vs. No Drought
aaaatcagcctcttcgttttctttctcctcctgtctgttgatttaaagacccaaatctgacgcttctctctctctttctggtatctgcgtttgattcggagaagaaaaaaaaaaaaaaggcaaagagagagcttcaatggagttagcttctttccttggtagagctctgtttgtttccgtatttcttctctccgcatggcaagagttcaatgattttggtgaagatggtggccgatcagctaaatctttgaaaccaaaattcaatgcctttgtaaaccatgtgacaactcacactggccagcaattgccaccagtcgatatgaagattcttgttgctgctgctatagccttgaagggtattgggggactattgtttgtctttggcagctcattgggagcttatctcttgcttctgcatcaagccgttgccaccccaattctgtatgatttctacaactacgatgttgacagaaaggaattcggccaactattttcaaaatttacacagagcttggctcttcttggaggactgctcttcttcattggaatgaaaaactcaaggaaacacggtaggcaactcaggaaaaaggctccaaaggcaaaagcaaactgaagaagccatatctttcatcggttttattcggtctgtattttattttcattttggaatccaggatgggtttaaagagtctatctgatgaggccattgaaaggcaaaatctctgcaaatcattttgcttacttcaagaagcttttatgacacttttttgtagaaatatttatggattattgtttcttagagacaccacttcaatgttaatgttccaacttatttc

SEQ ID NO: 38124 - protein, 158 aa, Arabidopsis thaliana; identical to SEQ ID NO: 26093
  peptide (1)..(158): Ceres Seq. ID no. 12562067
  misc_feature (1)..(138): Pfam Name: HR-like lesion-inducing Pfam Description: HR-like lesion-inducing
  misc_feature (1)..(156): Homolog of NCBI NO: 40287494 NR Description: putative lesion-inducing protein [Capsicum annuum]
  misc_feature (1)..(157): Homolog of NCBI NO: 15239873 NR Description: Nicotiana lesion-inducing like
  misc_feature (24)..(157): Homolog of NCBI NO: 37534824 NR Description: putative RNA-binding protein
  misc_feature (1)..(157): Homolog of NCBI NO: 21592798 NR Description: Nicotiana lesion-inducing like [Arabidopsis
  misc_feature (1)..(157): Homolog of NCBI NO: 15219714 NR Description: unknown protein
  misc_feature (1)..(158): Homolog of NCBI NO: 38346190 NR Description: OSJNBa0027O01.6 [Oryza sativa (japonica
  misc_feature (1)..(128): Homolog of NCBI NO: 7489143 NR Description: hypothetical protein (clone ND1) - common tobacco
  misc_feature (1)..(158): Homolog of NCBI NO: 27261473 NR Description: Unknown protein [Oryza sativa (japonica
  misc_feature (1)..(158): Homolog of NCBI NO: 7489144 NR Description: hypothetical protein (clone NF22) - common
  misc_feature (1)..(158): Homolog of NCBI NO: 15236497 NR Description: elicitor like protein

SEQ ID NO: 38125 - protein, 97 aa, Arabidopsis thaliana; identical to SEQ ID NO: 26094
  peptide (1)..(97): Ceres Seq. ID no. 12562068
  misc_feature (1)..(77): Pfam Name: HR-like lesion-inducing Pfam Description: HR-like lesion-inducing
  misc_feature (1)..(95): Homolog of NCBI NO: 40287494 NR Description: putative lesion-inducing protein [Capsicum annuum]
  misc_feature (1)..(96): Homolog of NCBI NO: 15239873 NR Description: Nicotiana lesion-inducing like
  misc_feature (1)..(96): Homolog of NCBI NO: 37534824 NR Description: putative RNA-binding protein
  misc_feature (1)..(96): Homolog of NCBI NO: 21592798 NR Description: Nicotiana lesion-inducing like [Arabidopsis
  misc_feature (1)..(96): Homolog of NCBI NO: 15219714 NR Description: unknown protein
  misc_feature (1)..(97): Homolog of NCBI NO: 38346190 NR Description: OSJNBa0027O01.6 [Oryza sativa (japonica
  misc_feature (1)..(67): Homolog of NCBI NO: 7489143 NR Description: hypothetical protein (clone ND1) - common tobacco
  misc_feature (1)..(97): Homolog of NCBI NO: 27261473 NR Description: Unknown protein [Oryza sativa (japonica
  misc_feature (1)..(97): Homolog of NCBI NO: 7489144 NR Description: hypothetical protein (clone NF22) - common
  misc_feature (1)..(97): Homolog of NCBI NO: 15236497 NR Description: elicitor like protein

SEQ ID NO: 38126 - DNA, 2318 bp, Arabidopsis thaliana
  misc_feature (1)..(2318): Ceres Seq. ID no. 12328608
  misc_feature: MA Experiment ID: 108461 Result: Down-regulated in Transcription
  misc_feature: MA Experiment 108461 PARAMETER Experiment Name: At_Germinating_Seeds_cDNA_P Parameter: Age (day) Value: 1 vs. 0
  misc_feature: MA Experiment 108461 PARAMETER Experiment Name: At_Germinating_Seeds_cDNA_P Parameter: Tissue Value: Germinating Seeds
  misc_feature: MA Experiment ID: 108462 Result: Down-regulated in Transcription
  misc_feature: MA Experiment 108462 PARAMETER Experiment Name: At_Germinating_Seeds_cDNA_P Parameter: Age (day) Value: 2 vs. 0
  misc_feature: MA Experiment 108462 PARAMETER Experiment Name: At_Germinating_Seeds_cDNA_P Parameter: Tissue Value: Germinating Seeds
  misc_feature: MA Experiment ID: 108463 Result: Down-regulated in Transcription
  misc_feature: MA Experiment 108463 PARAMETER Experiment Name: At_Germinating_Seeds_cDNA_P Parameter: Age (day) Value: 3 vs. 0
  misc_feature: MA Experiment 108463 PARAMETER Experiment Name: At_Germinating_Seeds_cDNA_P Parameter: Tissue Value: Germinating Seeds
  misc_feature: MA Experiment ID: 108464 Result: Down-regulated in Transcription
  misc_feature: MA Experiment 108464 PARAMETER Experiment Name: At_Germinating_Seeds_cDNA_P Parameter: Age (day) Value: 4 vs. 0
  misc_feature: MA Experiment 108464 PARAMETER Experiment Name: At_Germinating_Seeds_cDNA_P Parameter: Tissue Value: Germinating Seeds
  misc_feature: MA Experiment ID: 20000180 Result: Down-regulated in Transcription
  misc_feature: MA Experiment 20000180 PARAMETER Experiment Name: At_Germinating_Seeds_P Parameter: Age (hr) Value: 24 vs. 0
  misc_feature: MA Experiment 20000180 PARAMETER Experiment Name: At_Germinating_Seeds_P Parameter: Tissue Value: Germinating Seeds
  misc_feature: MA Experiment ID: 20000224 Result: Up-regulated in Transcription
  misc_feature: MA Experiment ID: 20000574 Result: Up-regulated in Transcription
  misc_feature: MA Experiment 20000574 PARAMETER Experiment Name: At_100uM_ABA_Mutants__P Parameter: Organism Value: A. thaliana
  misc_feature: MA Experiment 20000574 PARAMETER Experiment Name: At_100uM_ABA_Mutants__P Parameter: Plant Line Value: CS23 vs. Ler wt
  misc_feature: MA Experiment 20000574 PARAMETER Experiment Name: At_100uM_ABA_Mutants__P Parameter: Timepoint (hr) Value: N/A
  misc_feature: MA Experiment 20000574 PARAMETER Experiment Name: At_100uM_ABA_Mutants__P Parameter: Tissue Value: Whole Plant
  misc_feature: MA Experiment 20000574 PARAMETER Experiment Name: At_100uM_ABA_Mutants__P Parameter: Treatment Value: None
  misc_feature: MA Experiment ID: 20001458 Result: Up-regulated in Transcription
  misc_feature: MA Experiment 20001458 PARAMETER Experiment Name: At_50mM_NH4NO3_L-to-H_P Parameter: Age (day) Value: Undefined
  misc_feature: MA Experiment 20001458 PARAMETER Experiment Name: At_50mM_NH4NO3_L-to-H_P Parameter: Organism Value: Undefined
  misc_feature: MA Experiment 20001458 PARAMETER Experiment Name: At_50mM_NH4NO3_L-to-H_P Parameter: Plant Line Value: Undefined
  misc_feature: MA Experiment 20001458 PARAMETER Experiment Name: At_50mM_NH4NO3_L-to-H_P Parameter: Timepoint (hr) Value: 2
  misc_feature: MA Experiment 20001458 PARAMETER Experiment Name: At_50mM_NH4NO3_L-to-H_P Parameter: Tissue Value: Siliques
  misc_feature: MA Experiment 20001458 PARAMETER Experiment Name: At_50mM_NH4NO3_L-to-H_P Parameter: Treatment Value: 50mM NH4NO3 vs. 100mM Manitol
  misc_feature: MA Experiment ID: 20001557 Result: Up-regulated in Transcription
  misc_feature: MA Experiment 20001557 PARAMETER Experiment Name: At_Drought_Soil_Dry_P Parameter: Age (day) Value: 27
  misc_feature: MA Experiment 20001557 PARAMETER Experiment Name: At_Drought_Soil_Dry_P Parameter: Organism Value: A. thaliana
  misc_feature: MA Experiment 20001557 PARAMETER Experiment Name: At_Drought_Soil_Dry_P Parameter: Plant Line Value: WS
  misc_feature: MA Experiment 20001557 PARAMETER Experiment Name: At_Drought_Soil_Dry_P Parameter: Post Timepoint (hr) Value: 3
  misc_feature: MA Experiment 20001557 PARAMETER Experiment Name: At_Drought_Soil_Dry_P Parameter: Post-Treatment Value: Re-Water vs. No Drought
  misc_feature: MA Experiment 20001557 PARAMETER Experiment Name: At_Drought_Soil_Dry_P Parameter: Timepoint (day) Value: 13
  misc_feature: MA Experiment 20001557 PARAMETER Experiment Name: At_Drought_Soil_Dry_P Parameter: Treatment Value: Drought vs. No Drought
attttttggcttcaatttttgcgttttctctgcaactcgccgtcaagggtagaagaattaggggttcctgttcttaactgcttgaagatgacgtcttatggagatagactgaagtcgacctccattaatggagttaagttatacaatgtttcttctgctcccaatgttcctacttggcttaatcctaagaagcaacgagctctccgcaaaaaccctcattatatgcaaagagtggagctgattcaggagttgaagtttgagactgccactactagaatcaaagcgactccagacggagagtatctgattgcttcaggcatatatccaccacaggtaaaagtttatgagctaaatcagcttgctttgaagtttgagaggcatttggactcggaaatagttgatttcgagatattggatgatgacttctcaaagcttgccttcttatgtgctgatcgttctattaatttacacgccaaatacgggaaacaccacactttacgaattccaaggatggggagagatatgacatatgattcctggtcttgtgatcttctttgcgctgcttcctcacctgatctatatagaatcaatttggagcagggaagatttctttctcctctcagcactcaatccccagcgcttaatgtcgtttctcgaagcaacctccatggattagttgcttgtggtggtgaggatggtgctgtggaattttttgatatgagaatgaaatcatctgctgctagaattaacgcggtcacacatggtggtgatgctgctgcggaggttactgctatagagtttgatgacagtgaaggtcttcaagtagctgtcgggagtagcgcgggaaaggtattcatatacgacttgcgtacttcaactcccataagagtgaaggatcacatgtacgagagcccaattttgaatattaagtggcaacggactcttaatactcaacaacctaagttgattactaccgacaaacacattgttagaatatgggatccaaacacgggagaaggtatgaccagcattgaaccgactcaaggaggaataaacgacatttgtgtgttccgtggaagcggacttatgcttcttgctttagactctagcctaatcccatcttacttcatacctgaactcggtcctgcccccaaatggtgttctcctcttgaaaatctaacggaagagttggaggaaagtgcacagacaactatttatgataattacaaatttttggcaatggaagatctggagaagttgcagctaactcatttgattggaacagatcttttgaaagcatctatgcatggatattttattaattaccatttgtacaaaaaggctttagcagtgattgaaccttttgcatttgatgattacttagaacgtaggaagcaagagaagttagaagagcagcgtacgcagagaatcacaaaaaagagacggttgccaaaggttaaccgagaccttgcagcaaggcttcatggggacgaatcagaggaggaaaataaaactgccgaggatggggaggccaccaagaaagtgctgaaaaagaagaaacccatacttactgacgagcatttcgtagatggtcggtttggttcgatgttccaaaatccggacttccaaattgataaggactcatatgaatatggtgtcctacaccctgttgcttcttcgaagaagcaaccttctctgttagatgaacactttgaagctgtatcagatgatgacgagaacagtgattctgatgcatcacagccttcagatgacgaggccgacgatggagacgcaactaggccaagcaagaaagcgagaactccgaagttgtatgaagtgaaagatgagcggcatgccgcagcttatcacaaccgcacttcactggctaaagaagatagtcttcctatgggcgagcgtgtcaaggctatagagaaccggcgtggcaactttggaggctcgaaagatatcaaattcggtcctggaggatcacgggagttttctttcaaggcgagagggtcatcaaagtacaaagaagatagagacgatgagtatgaagatgggcaaagaaacaagaggagaggagttcagtctcttggactgaaatcaacaaatattagaggcggtttcagaggtagaggaggtggtggttttagagggagaggaggcggcggttcccggggaaaaggtggccgtggtggtgggcgtggaagaggccggcaatgataaatgtagcttttcaggggctttattagatttgaaaaatgtgtcacctactattgagaatcttgaaacttaattgatcacatatacaattttgg

SEQ ID NO: 38127 - protein, 740 aa, Arabidopsis thaliana
  peptide (1)..(740): Ceres Seq. ID no. 12328609
  misc_feature (37)..(706): Homolog of NCBI NO: 6321584 NR Description: Essential Nucleolar Protein 2; Enp2p
  misc_feature (37)..(646): Homolog of NCBI NO: 17540118 NR Description: Putative nuclear protein, with a coiled coil
  misc_feature (37)..(609): Homolog of NCBI NO: 19075209 NR Description: conserved hypothetical protein.
  misc_feature (37)..(502): Homolog of NCBI NO: 27694778 NR Description: Similar to hypothetical protein FLJ14075 [Xenopus
  misc_feature (706)..(738): Homolog of NCBI NO: 28502998 NR Description: Similar to hypothetical protein FLJ14075 [Danio
  misc_feature (715)..(740): Homolog of NCBI NO: 28502998 NR Description: Similar to hypothetical protein FLJ14075 [Danio
  misc_feature (37)..(597): Homolog of NCBI NO: 28502998 NR Description: Similar to hypothetical protein FLJ14075 [Danio
  misc_feature (37)..(707): Homolog of NCBI NO: 13477303 NR Description: Similar to hypothetical protein FLJ14075 [Homo
  misc_feature (37)..(698): Homolog of NCBI NO: 38049298 NR Description: similar to FLJ14075 protein [Mus musculus]
  misc_feature (37)..(617): Homolog of NCBI NO: 33416707 NR Description: Unknown (protein for MGC:69094) [Xenopus laevis]
IFWLQFLRFLCNSPSRVEELGVPVLNCLKMTSYGDRLKSTSINGVKLYNVSSAPNVPTWLNPKKQRALRKNPHYMQRVELIQELKFETATTRIKATPDGEYLIASGIYPPQVKVYELNQLALKFERHLDSEIVDFEILDDDFSKLAFLCADRSINLHAKYGKHHTLRIPRMGRDMTYDSWSCDLLCAASSPDLYRINLEQGRFLSPLSTQSPALNVVSRSNLHGLVACGGEDGAVEFFDMRMKSSAARINAVTHGGDAAAEVTAIEFDDSEGLQVAVGSSAGKVFIYDLRTSTPIRVKDHMYESPILNIKWQRTLNTQQPKLITTDKHIVRIWDPNTGEGMTSIEPTQGGINDICVFRGSGLMLLALDSSLIPSYFIPELGPAPKWCSPLENLTEELEESAQTTIYDNYKFLAMEDLEKLQLTHLIGTDLLKASMHGYFINYHLYKKALAVIEPFAFDDYLERRKQEKLEEQRTQRITKKRRLPKVNRDLAARLHGDESEEENKTAEDGEATKKVLKKKKPILTDEHFVDGRFGSMFQNPDFQIDKDSYEYGVLHPVASSKKQPSLLDEHFEAVSDDDENSDSDASQPSDDEADDGDATRPSKKARTPKLYEVKDERHAAAYHNRTSLAKEDSLPMGERVKAIENRRGNFGGSKDIKFGPGGSREFSFKARGSSKYKEDRDDEYEDGQRNKRRGVQSLGLKSTNIRGGFRGRGGGGFRGRGGGGSRGKGGRGGGRGRGRQ

SEQ ID NO: 38128 - protein, 711 aa, Arabidopsis thaliana
  peptide (1)..(711): Ceres Seq. ID no. 12328610
  misc_feature (8)..(677): Homolog of NCBI NO: 6321584 NR Description: Essential Nucleolar Protein 2; Enp2p
  misc_feature (8)..(617): Homolog of NCBI NO: 17540118 NR Description: Putative nuclear protein, with a coiled coil
  misc_feature (8)..(580): Homolog of NCBI NO: 19075209 NR Description: conserved hypothetical protein.
  misc_feature (8)..(473): Homolog of NCBI NO: 27694778 NR Description: Similar to hypothetical protein FLJ14075 [Xenopus
  misc_feature (677)..(709): Homolog of NCBI NO: 28502998 NR Description: Similar to hypothetical protein FLJ14075 [Danio
  misc_feature (686)..(711): Homolog of NCBI NO: 28502998 NR Description: Similar to hypothetical protein FLJ14075 [Danio
  misc_feature (8)..(568): Homolog of NCBI NO: 28502998 NR Description: Similar to hypothetical protein FLJ14075 [Danio
  misc_feature (8)..(678): Homolog of NCBI NO: 13477303 NR Description: Similar to hypothetical protein FLJ14075 [Homo
  misc_feature (8)..(669): Homolog of NCBI NO: 38049298 NR Description: similar to FLJ14075 protein [Mus musculus]
  misc_feature (8)..(588): Homolog of NCBI NO: 33416707 NR Description: Unknown (protein for MGC:69094) [Xenopus laevis]
MTSYGDRLKSTSINGVKLYNVSSAPNVPTWLNPKKQRALRKNPHYMQRVELIQELKFETATTRIKATPDGEYLIASGIYPPQVKVYELNQLALKFERHLDSEIVDFEILDDDFSKLAFLCADRSINLHAKYGKHHTLRIPRMGRDMTYDSWSCDLLCAASSPDLYRINLEQGRFLSPLSTQSPALNVVSRSNLHGLVACGGEDGAVEFFDMRMKSSAARINAVTHGGDAAAEVTAIEFDDSEGLQVAVGSSAGKVFIYDLRTSTPIRVKDHMYESPILNIKWQRTLNTQQPKLITTDKHIVRIWDPNTGEGMTSIEPTQGGINDICVFRGSGLMLLALDSSLIPSYFIPELGPAPKWCSPLENLTEELEESAQTTIYDNYKFLAMEDLEKLQLTHLIGTDLLKASMHGYFINYHLYKKALAVIEPFAFDDYLERRKQEKLEEQRTQRITKKRRLPKVNRDLAARLHGDESEEENKTAEDGEATKKVLKKKKPILTDEHFVDGRFGSMFQNPDFQIDKDSYEYGVLHPVASSKKQPSLLDEHFEAVSDDDENSDSDASQPSDDEADDGDATRPSKKARTPKLYEVKDERHAAAYHNRTSLAKEDSLPMGERVKAIENRRGNFGGSKDIKFGPGGSREFSFKARGSSKYKEDRDDEYEDGQRNKRRGVQSLGLKSTNIRGGFRGRGGGGFRGRGGGGSRGKGGRGGGRGRGRQ

SEQ ID NO: 38129 - protein, 666 aa, Arabidopsis thaliana
  peptide (1)..(666): Ceres Seq. ID no. 12328611
  misc_feature (1)..(632): Homolog of NCBI NO: 6321584 NR Description: Essential Nucleolar Protein 2; Enp2p
  misc_feature (1)..(572): Homolog of NCBI NO: 17540118 NR Description: Putative nuclear protein, with a coiled coil
  misc_feature (1)..(535): Homolog of NCBI NO: 19075209 NR Description: conserved hypothetical protein.
  misc_feature (1)..(428): Homolog of NCBI NO: 27694778 NR Description: Similar to hypothetical protein FLJ14075 [Xenopus
  misc_feature (632)..(664): Homolog of NCBI NO: 28502998 NR Description: Similar to hypothetical protein FLJ14075 [Danio
  misc_feature (641)..(666): Homolog of NCBI NO: 28502998 NR Description: Similar to hypothetical protein FLJ14075 [Danio
  misc_feature (1)..(523): Homolog of NCBI NO: 28502998 NR Description: Similar to hypothetical protein FLJ14075 [Danio
  misc_feature (1)..(633): Homolog of NCBI NO: 13477303 NR Description: Similar to hypothetical protein FLJ14075 [Homo
  misc_feature (1)..(624): Homolog of NCBI NO: 38049298 NR Description: similar to FLJ14075 protein [Mus musculus]
  misc_feature (1)..(543): Homolog of NCBI NO: 33416707 NR Description: Unknown (protein for MGC:69094) [Xenopus laevis]
MQRVELIQELKFETATTRIKATPDGEYLIASGIYPPQVKVYELNQLALKFERHLDSEIVDFEILDDDFSKLAFLCADRSINLHAKYGKHHTLRIPRMGRDMTYDSWSCDLLCAASSPDLYRINLEQGRFLSPLSTQSPALNVVSRSNLHGLVACGGEDGAVEFFDMRMKSSAARINAVTHGGDAAAEVTAIEFDDSEGLQVAVGSSAGKVFIYDLRTSTPIRVKDHMYESPILNIKWQRTLNTQQPKLITTDKHIVRIWDPNTGEGMTSIEPTQGGINDICVFRGSGLMLLALDSSLIPSYFIPELGPAPKWCSPLENLTEELEESAQTTIYDNYKFLAMEDLEKLQLTHLIGTDLLKASMHGYFINYHLYKKALAVIEPFAFDDYLERRKQEKLEEQRTQRITKKRRLPKVNRDLAARLHGDESEEENKTAEDGEATKKVLKKKKPILTDEHFVDGRFGSMFQNPDFQIDKDSYEYGVLHPVASSKKQPSLLDEHFEAVSDDDENSDSDASQPSDDEADDGDATRPSKKARTPKLYEVKDERHAAAYHNRTSLAKEDSLPMGERVKAIENRRGNFGGSKDIKFGPGGSREFSFKARGSSKYKEDRDDEYEDGQRNKRRGVQSLGLKSTNIRGGFRGRGGGGFRGRGGGGSRGKGGRGGGRGRGRQ

SEQ ID NO: 38130 - DNA, 1521 bp, Arabidopsis thaliana
  misc_feature (1)..(1521): Ceres Seq. ID no. 13494689
  misc_feature: MA Experiment ID: 20000173 Result: Up-regulated in Transcription
  misc_feature: MA Experiment 20000173 PARAMETER Experiment Name: At_42deg_Heat_P Parameter: Age (day) Value: 14
  misc_feature: MA Experiment 20000173 PARAMETER Experiment Name: At_42deg_Heat_P Parameter: Organism Value: A. thaliana
  misc_feature: MA Experiment 20000173 PARAMETER Experiment Name: At_42deg_Heat_P Parameter: Plant Line Value: WS
  misc_feature: MA Experiment 20000173 PARAMETER Experiment Name: At_42deg_Heat_P Parameter: Temperature (deg C) Value: 42 vs. 22
  misc_feature: MA Experiment 20000173 PARAMETER Experiment Name: At_42deg_Heat_P Parameter: Timepoint (hr) Value: 6
  misc_feature: MA Experiment 20000173 PARAMETER Experiment Name: At_42deg_Heat_P Parameter: Tissue Value: Aerial
  misc_feature: MA Experiment ID: 20000185 Result: Down-regulated in Transcription
  misc_feature: MA Experiment 20000185 PARAMETER Experiment Name: At_Roots__P Parameter: Age (day) Value: 7 vs. 21
  misc_feature: MA Experiment 20000185 PARAMETER Experiment Name: At_Roots__P Parameter: Organism Value: A. thaliana
  misc_feature: MA Experiment 20000185 PARAMETER Experiment Name: At_Roots__P Parameter: Tissue Value: Roots vs. Whole Plant
  misc_feature: MA Experiment ID: 20000234 Result: Down-regulated in Transcription
  misc_feature: MA Experiment 20000234 PARAMETER Experiment Name: At_Siliques_P Parameter: Age (day) Value: 21
  misc_feature: MA Experiment 20000234 PARAMETER Experiment Name: At_Siliques_P Parameter: Organism Value: A. thaliana
  misc_feature: MA Experiment 20000234 PARAMETER Experiment Name: At_Siliques_P Parameter: Plant Line Value: WS
  misc_feature: MA Experiment 20000234 PARAMETER Experiment Name: At_Siliques_P Parameter: Tissue Value: Less Than 5mm Siliques vs. Whole Plant
  misc_feature: MA Experiment ID: 20000265 Result: Down-regulated in Transcription
  misc_feature: MA Experiment 20000265 PARAMETER Experiment Name: At_Open_Flower_P Parameter: Age (day) Value: 21
  misc_feature: MA Experiment 20000265 PARAMETER Experiment Name: At_Open_Flower_P Parameter: Plant Line Value: WS
  misc_feature: MA Experiment 20000265 PARAMETER Experiment Name: At_Open_Flower_P Parameter: Tissue Value: Closed Flower vs. Whole Plant
  misc_feature: MA Experiment ID: 20000437 Result: Up-regulated in Transcription
  misc_feature: MA Experiment 20000437 PARAMETER Experiment Name: At_Drought_P Parameter: Age (day) Value: 8
  misc_feature: MA Experiment 20000437 PARAMETER Experiment Name: At_Drought_P Parameter: Organism Value: A. thaliana
  misc_feature: MA Experiment 20000437 PARAMETER Experiment Name: At_Drought_P Parameter: Plant Line Value: WS
  misc_feature: MA Experiment 20000437 PARAMETER Experiment Name: At_Drought_P Parameter: Timepoint (hr) Value: 24
  misc_feature: MA Experiment 20000437 PARAMETER Experiment Name: At_Drought_P Parameter: Tissue Value: Whole Plant
  misc_feature: MA Experiment 20000437 PARAMETER Experiment Name: At_Drought_P Parameter: Treatment Value: Drought vs. No Drought
  misc_feature: MA Experiment ID: 20000438 Result: Up-regulated in Transcription
  misc_feature: MA Experiment 20000438 PARAMETER Experiment Name: At_Shoots__P Parameter: Age (day) Value: 14
  misc_feature: MA Experiment 20000438 PARAMETER Experiment Name: At_Shoots__P Parameter: Tissue Value: Shoots vs. Whole Plant
  misc_feature: MA Experiment ID: 20000495 Result: Down-regulated in Transcription
  misc_feature: MA Experiment 20000495 PARAMETER Experiment Name: At_Guard_Cells_P Parameter: Harvest Date Value: 8/2/2002
  misc_feature: MA Experiment 20000495 PARAMETER Experiment Name: At_Guard_Cells_P Parameter: Organism Value: A. thaliana
  misc_feature: MA Experiment 20000495 PARAMETER Experiment Name: At_Guard_Cells_P Parameter: Tissue Value: Guard Cells vs. Leaves
  misc_feature: MA Experiment ID: 20000573 Result: Down-regulated in Transcription
  misc_feature: MA Experiment 20000573 PARAMETER Experiment Name: At_100uM_ABA_Mutants__P Parameter: Organism Value: A. thaliana
  misc_feature: MA Experiment 20000573 PARAMETER Experiment Name: At_100uM_ABA_Mutants__P Parameter: Plant Line Value: CS22 vs. Ler wt
  misc_feature: MA Experiment 20000573 PARAMETER Experiment Name: At_100uM_ABA_Mutants__P Parameter: Timepoint (hr) Value: N/A
  misc_feature: MA Experiment 20000573 PARAMETER Experiment Name: At_100uM_ABA_Mutants__P Parameter: Tissue Value: Whole Plant
  misc_feature: MA Experiment 20000573 PARAMETER Experiment Name: At_100uM_ABA_Mutants__P Parameter: Treatment Value: None
  misc_feature: MA Experiment ID: 20001248 Result: Down-regulated in Transcription
  misc_feature: MA Experiment 20001248 PARAMETER Experiment Name: At_Far-red-induction_P Parameter: Age (day) Value: 7
  misc_feature: MA Experiment 20001248 PARAMETER Experiment Name: At_Far-red-induction_P Parameter: Light Value: Far-red vs. White
  misc_feature: MA Experiment 20001248 PARAMETER Experiment Name: At_Far-red-induction_P Parameter: Organism Value: A. thaliana
  misc_feature: MA Experiment 20001248 PARAMETER Experiment Name: At_Far-red-induction_P Parameter: Plant Line Value: Columbia
  misc_feature: MA Experiment 20001248 PARAMETER Experiment Name: At_Far-red-induction_P Parameter: Timepoint (hr) Value: 4
  misc_feature: MA Experiment 20001248 PARAMETER Experiment Name: At_Far-red-induction_P Parameter: Tissue Value: Whole Plant
  misc_feature: MA Experiment ID: 20001557 Result: Down-regulated in Transcription
  misc_feature: MA Experiment 20001557 PARAMETER Experiment Name: At_Drought_Soil_Dry_P Parameter: Age (day) Value: 27
  misc_feature: MA Experiment 20001557 PARAMETER Experiment Name: At_Drought_Soil_Dry_P Parameter: Organism Value: A. thaliana
  misc_feature: MA Experiment 20001557 PARAMETER Experiment Name: At_Drought_Soil_Dry_P Parameter: Plant Line Value: WS
  misc_feature: MA Experiment 20001557 PARAMETER Experiment Name: At_Drought_Soil_Dry_P Parameter: Post Timepoint (hr) Value: 3
  misc_feature: MA Experiment 20001557 PARAMETER Experiment Name: At_Drought_Soil_Dry_P Parameter: Post-Treatment Value: Re-Water vs. No Drought
  misc_feature: MA Experiment 20001557 PARAMETER Experiment Name: At_Drought_Soil_Dry_P Parameter: Timepoint (day) Value: 13
  misc_feature: MA Experiment 20001557 PARAMETER Experiment Name: At_Drought_Soil_Dry_P Parameter: Treatment Value: Drought vs. No Drought
  misc_feature: MA Experiment ID: 20001558 Result: Down-regulated in Transcription
  misc_feature: MA Experiment 20001558 PARAMETER Experiment Name: At_Drought_Soil_Dry_P Parameter: Age (day) Value: 27
  misc_feature: MA Experiment 20001558 PARAMETER Experiment Name: At_Drought_Soil_Dry_P Parameter: Organism Value: A. thaliana
  misc_feature: MA Experiment 20001558 PARAMETER Experiment Name: At_Drought_Soil_Dry_P Parameter: Plant Line Value: WS
  misc_feature: MA Experiment 20001558 PARAMETER Experiment Name: At_Drought_Soil_Dry_P Parameter: Post Timepoint (hr) Value: 6
  misc_feature: MA Experiment 20001558 PARAMETER Experiment Name: At_Drought_Soil_Dry_P Parameter: Post-Treatment Value: Re-Water vs. No Drought
  misc_feature: MA Experiment 20001558 PARAMETER Experiment Name: At_Drought_Soil_Dry_P Parameter: Timepoint (day) Value: 13
  misc_feature: MA Experiment 20001558 PARAMETER Experiment Name: At_Drought_Soil_Dry_P Parameter: Treatment Value: Drought vs. No Drought
  misc_feature: MA Experiment ID: 20001560 Result: Down-regulated in Transcription
  misc_feature: MA Experiment 20001560 PARAMETER Experiment Name: At_Drought_Soil_Dry_P Parameter: Age (day) Value: 28
  misc_feature: MA Experiment 20001560 PARAMETER Experiment Name: At_Drought_Soil_Dry_P Parameter: Organism Value: A. thaliana
  misc_feature: MA Experiment 20001560 PARAMETER Experiment Name: At_Drought_Soil_Dry_P Parameter: Plant Line Value: WS
  misc_feature: MA Experiment 20001560 PARAMETER Experiment Name: At_Drought_Soil_Dry_P Parameter: Post Timepoint (hr) Value: None
  misc_feature: MA Experiment 20001560 PARAMETER Experiment Name: At_Drought_Soil_Dry_P Parameter: Post-Treatment Value: None
  misc_feature: MA Experiment 20001560 PARAMETER Experiment Name: At_Drought_Soil_Dry_P Parameter: Timepoint (day) Value: 14
  misc_feature: MA Experiment 20001560 PARAMETER Experiment Name: At_Drought_Soil_Dry_P Parameter: Treatment Value: Drought vs. No Drought
  misc_feature: MA Experiment ID: 20001905 Result: Up-regulated in Transcription
  misc_feature: MA Experiment 20001905 PARAMETER Experiment Name: At_Drought_Reproduction_P Parameter: Age (day) Value: 40
  misc_feature: MA Experiment 20001905 PARAMETER Experiment Name: At_Drought_Reproduction_P Parameter: Organism Value: A. thaliana
  misc_feature: MA Experiment 20001905 PARAMETER Experiment Name: At_Drought_Reproduction_P Parameter: Plant Line Value: WS
  misc_feature: MA Experiment 20001905 PARAMETER Experiment Name: At_Drought_Reproduction_P Parameter: Timepoint (day) Value: 10
  misc_feature: MA Experiment 20001905 PARAMETER Experiment Name: At_Drought_Reproduction_P Parameter: Tissue Value: Rosettes
  misc_feature: MA Experiment 20001905 PARAMETER Experiment Name: At_Drought_Reproduction_P Parameter: Treatment Value: Drought vs. No Drought
  misc_feature: MA Experiment ID: 20001911 Result: Up-regulated in Transcription
  misc_feature: MA Experiment 20001911 PARAMETER Experiment Name: At_Drought_Reproduction_P Parameter: Age (day) Value: 40
  misc_feature: MA Experiment 20001911 PARAMETER Experiment Name: At_Drought_Reproduction_P Parameter: Organism Value: A. thaliana
  misc_feature: MA Experiment 20001911 PARAMETER Experiment Name: At_Drought_Reproduction_P Parameter: Plant Line Value: WS
  misc_feature: MA Experiment 20001911 PARAMETER Experiment Name: At_Drought_Reproduction_P Parameter: Timepoint (day) Value: 10
  misc_feature: MA Experiment 20001911 PARAMETER Experiment Name: At_Drought_Reproduction_P Parameter: Tissue Value: Flowers
  misc_feature: MA Experiment 20001911 PARAMETER Experiment Name: At_Drought_Reproduction_P Parameter: Treatment Value: Drought vs. No Drought
gagtttttcattcatctatcggttgtttccattctcaggtttcagtcgaaaattccctctctttcttttcgatttgatctgggtttcattgtacatagctcgatcttcaagtttcgtcatctgggtcttgtaaagttttagacttttagggttgttttacttgtgaagtttctctcttttctaatggattctctgggtaattgatcgattagggtttaagattttagcggtggggaaagctgtttggttctagaattctatcttgattaacgtcacttgcagctttctcacaggttttggaattgtactaggttttgattgataatcatagattggtagtgatttgggagtttcttgattgtgtaatcatggcggaggctattggtgctgtatctttggtgggtcatcgaccttcaattgtgaggattacagtgaagaatgaattgaaaacgcagaaatcacagagcattgttcgctttccggtgaaggtagattatagtgcgaaaggtgttctctctcatttgatgacgcagagtgtgaaaaagaatcgaatgtcggtgtttccgatcagggctcttgctatggaattgacgaaagagaagaagaaagacgatcggttaccgaaaacttggaattatcttgattctggtgctgatgataagcctagtttatggcctcctgagaacaaagctgataagccttcattgcataatcctttacttaggcaagagcggatgggttgtggttggttaggtgctatatttgagtgggaaggagtattgattgaagacaatcctgacttggataaccaatcatggcttactttagctcaagaagaagggaaatctcctcctccggcttttatgctcagacgtgtcgaagggatgaagaacgagcaggccatatctgaggttctgtgttggtcgagagatcctgttcaagtgagaaggatggctaagcgtaaagaagagatctttaaagctctacatggaggagtgtatagactaagagatgggtcgcaggaatttgtcaatgtcttgatgaataataagatccctatggctttggtatcgactcgtcctcgggaaacattggagaatgcagttggatcgataggtatcagaaagttcttcagtgtgatagttgcatcggaagatgtttacagaggtaaaccagatcctgagatgttcatttacgcagcacagcttcttgatttcataccggaacgttgcattgtatttggaaactcaaaccagaccatagaggcagctcacgatgggaggatgaaatgtgtggctgtggcgagtaaacacccgatttatgagcttggtgcagctgagctggtggtaagaagactagacgagttatcgattatcgatttgaagaaacttgctgataccgatttgacagagttcgaaccggaattggagatggaaaaggaagatgagcgtgagctgccttcatcggctgtagcagttgatgatttctgatggaagtgatcttctgtaatgttgtacagtt

SEQ ID NO: 38131 - protein, 373 aa, Arabidopsis thaliana
  peptide (1)..(373): Ceres Seq. ID no. 13494690
  misc_feature (127)..(314): Pfam Name: haloacid dehalogenase-like hydrolase Pfam Description: haloacid dehalogenase-like hydrolase
  misc_feature (131)..(331): Homolog of NCBI NO: 21672855 NR Description: hydrolase, haloacid dehalogenase-like family
  misc_feature (128)..(332): Homolog of NCBI NO: 37521914 NR Description: hypothetical protein glr2345 [Gloeobacter
  misc_feature (176)..(371): Homolog of NCBI NO: 6016697 NR Description: unknown protein [Arabidopsis thaliana]
  misc_feature (129)..(371): Homolog of NCBI NO: 14532506 NR Description: AT3g10970/F9F8_21 [Arabidopsis thaliana]
  misc_feature (129)..(371): Homolog of NCBI NO: 21592870 NR Description: unknown [Arabidopsis thaliana]
  misc_feature (129)..(371): Homolog of NCBI NO: 18399067 NR Description: haloacid dehalogenase-like hydrolase family
  misc_feature (43)..(346): Homolog of NCBI NO: 38345597 NR Description: OSJNBb0012E24.15 [Oryza sativa (japonica
  misc_feature (101)..(356): Homolog of NCBI NO: 18542168 NR Description: putative genetic modifier [Zea mays]
  misc_feature (101)..(356): Homolog of NCBI NO: 10444400 NR Description: genetic modifier [Zea mays]
  misc_feature (1)..(373): Homolog of NCBI NO: 15234236 NR Description: haloacid dehalogenase-like hydrolase family
MAEAIGAVSLVGHRPSIVRITVKNELKTQKSQSIVRFPVKVDYSAKGVLSHLMTQSVKKNRMSVFPIRALAMELTKEKKKDDRLPKTWNYLDSGADDKPSLWPPENKADKPSLHNPLLRQERMGCGWLGAIFEWEGVLIEDNPDLDNQSWLTLAQEEGKSPPPAFMLRRVEGMKNEQAISEVLCWSRDPVQVRRMAKRKEEIFKALHGGVYRLRDGSQEFVNVLMNNKIPMALVSTRPRETLENAVGSIGIRKFFSVIVASEDVYRGKPDPEMFIYAAQLLDFIPERCIVFGNSNQTIEAAHDGRMKCVAVASKHPIYELGAAELVVRRLDELSIIDLKKLADTDLTEFEPELEMEKEDERELPSSAVAVDDF

SEQ ID NO: 38132 - protein, 321 aa, Arabidopsis thaliana
  peptide (1)..(321): Ceres Seq. ID no. 13494691
  misc_feature (75)..(262): Pfam Name: haloacid dehalogenase-like hydrolase Pfam Description: haloacid dehalogenase-like hydrolase
  misc_feature (79)..(279): Homolog of NCBI NO: 21672855 NR Description: hydrolase, haloacid dehalogenase-like family
  misc_feature (76)..(280): Homolog of NCBI NO: 37521914 NR Description: hypothetical protein glr2345 [Gloeobacter
  misc_feature (124)..(319): Homolog of NCBI NO: 6016697 NR Description: unknown protein [Arabidopsis thaliana]
  misc_feature (77)..(319): Homolog of NCBI NO: 14532506 NR Description: AT3g10970/F9F8_21 [Arabidopsis thaliana]
  misc_feature (77)..(319): Homolog of NCBI NO: 21592870 NR Description: unknown [Arabidopsis thaliana]
  misc_feature (77)..(319): Homolog of NCBI NO: 18399067 NR Description: haloacid dehalogenase-like hydrolase family
  misc_feature (1)..(294): Homolog of NCBI NO: 38345597 NR Description: OSJNBb0012E24.15 [Oryza sativa (japonica
  misc_feature (49)..(304): Homolog of NCBI NO: 18542168 NR Description: putative genetic modifier [Zea mays]
  misc_feature (49)..(304): Homolog of NCBI NO: 10444400 NR Description: genetic modifier [Zea mays]
  misc_feature (1)..(321): Homolog of NCBI NO: 15234236 NR Description: haloacid dehalogenase-like hydrolase family
MTQSVKKNRMSVFPIRALAMELTKEKKKDDRLPKTWNYLDSGADDKPSLWPPENKADKPSLHNPLLRQERMGCGWLGAIFEWEGVLIEDNPDLDNQSWLTLAQEEGKSPPPAFMLRRVEGMKNEQAISEVLCWSRDPVQVRRMAKRKEEIFKALHGGVYRLRDGSQEFVNVLMNNKIPMALVSTRPRETLENAVGSIGIRKFFSVIVASEDVYRGKPDPEMFIYAAQLLDFIPERCIVFGNSNQTIEAAHDGRMKCVAVASKHPIYELGAAELVVRRLDELSIIDLKKLADTDLTEFEPELEMEKEDERELPSSAVAVDDF

SEQ ID NO: 38133 - protein, 312 aa, Arabidopsis thaliana
  peptide (1)..(312): Ceres Seq. ID no. 13494692
  misc_feature (66)..(253): Pfam Name: haloacid dehalogenase-like hydrolase Pfam Description: haloacid dehalogenase-like hydrolase
  misc_feature (70)..(270): Homolog of NCBI NO: 21672855 NR Description: hydrolase, haloacid dehalogenase-like family
  misc_feature (67)..(271): Homolog of NCBI NO: 37521914 NR Description: hypothetical protein glr2345 [Gloeobacter
  misc_feature (115)..(310): Homolog of NCBI NO: 6016697 NR Description: unknown protein [Arabidopsis thaliana]
  misc_feature (68)..(310): Homolog of NCBI NO: 14532506 NR Description: AT3g10970/F9F8_21 [Arabidopsis thaliana]
  misc_feature (68)..(310): Homolog of NCBI NO: 21592870 NR Description: unknown [Arabidopsis thaliana]
  misc_feature (68)..(310): Homolog of NCBI NO: 18399067 NR Description: haloacid dehalogenase-like hydrolase family
  misc_feature (1)..(285): Homolog of NCBI NO: 38345597 NR Description: OSJNBb0012E24.15 [Oryza sativa (japonica
  misc_feature (40)..(295): Homolog of NCBI NO: 18542168 NR Description: putative genetic modifier [Zea mays]
  misc_feature (40)..(295): Homolog of NCBI NO: 10444400 NR Description: genetic modifier [Zea mays]
  misc_feature (1)..(312): Homolog of NCBI NO: 15234236 NR Description: haloacid dehalogenase-like hydrolase family
MSVFPIRALAMELTKEKKKDDRLPKTWNYLDSGADDKPSLWPPENKADKPSLHNPLLRQERMGCGWLGAIFEWEGVLIEDNPDLDNQSWLTLAQEEGKSPPPAFMLRRVEGMKNEQAISEVLCWSRDPVQVRRMAKRKEEIFKALHGGVYRLRDGSQEFVNVLMNNKIPMALVSTRPRETLENAVGSIGIRKFFSVIVASEDVYRGKPDPEMFIYAAQLLDFIPERCIVFGNSNQTIEAAHDGRMKCVAVASKHPIYELGAAELVVRRLDELSIIDLKKLADTDLTEFEPELEMEKEDERELPSSAVAVDDF

SEQ ID NO: 38134 - DNA, 1127 bp, Arabidopsis thaliana
  misc_feature (1)..(1127): Ceres Seq. ID no. 13488517
  misc_feature: MA Experiment ID: 108474 Result: Down-regulated in Transcription
  misc_feature: MA Experiment 108474 PARAMETER Experiment Name: At_Drought_Flowers_cDNA_P Parameter: Timepoint (hr) Value: null
  misc_feature: MA Experiment 108474 PARAMETER Experiment Name: At_Drought_Flowers_cDNA_P Parameter: Treatment Value: Drought vs. No Drought
  misc_feature: MA Experiment ID: 108501 Result: Up-regulated in Transcription
  misc_feature: MA Experiment 108501 PARAMETER Experiment Name: At_ap2_floral_buds_cDNA_P Parameter: Plant Line Value: ap2 (Ler.)
  misc_feature: MA Experiment 108501 PARAMETER Experiment Name: At_ap2_floral_buds_cDNA_P Parameter: Tissue Value: Closed Flower
  misc_feature: MA Experiment ID: 108595 Result: Up-regulated in Transcription
  misc_feature: MA Experiment 108595 PARAMETER Experiment Name: At_Ler-pi_Ovule_cDNA_P Parameter: Plant Line Value: null
  misc_feature: MA Experiment ID: 20000113 Result: Up-regulated in Transcription
  misc_feature: MA Experiment 20000113 PARAMETER Experiment Name: At_42deg_Heat_cDNA_P Parameter: Temperature (deg C) Value: 42 vs. 22
  misc_feature: MA Experiment 20000113 PARAMETER Experiment Name: At_42deg_Heat_cDNA_P Parameter: Timepoint (hr) Value: 8
  misc_feature: MA Experiment 20000113 PARAMETER Experiment Name: At_42deg_Heat_cDNA_P Parameter: Tissue Value: Aerial
  misc_feature: MA Experiment ID: 20000264 Result: Up-regulated in Transcription
  misc_feature: MA Experiment 20000264 PARAMETER Experiment Name: At_Open_Flower_P Parameter: Age (day) Value: 21
  misc_feature: MA Experiment 20000264 PARAMETER Experiment Name: At_Open_Flower_P Parameter: Plant Line Value: WS
  misc_feature: MA Experiment 20000264 PARAMETER Experiment Name: At_Open_Flower_P Parameter: Tissue Value: Open Flower vs. Whole Plant
  misc_feature: MA Experiment ID: 20000439 Result: Up-regulated in Transcription
  misc_feature: MA Experiment 20000439 PARAMETER Experiment Name: At_Roots__P Parameter: Age (day) Value: 14 vs. 21
  misc_feature: MA Experiment 20000439 PARAMETER Experiment Name: At_Roots__P Parameter: Organism Value: A. thaliana
  misc_feature: MA Experiment 20000439 PARAMETER Experiment Name: At_Roots__P Parameter: Tissue Value: Roots vs. Whole Plant
  misc_feature: MA Experiment ID: 20001451 Result: Up-regulated in Transcription
  misc_feature: MA Experiment 20001451 PARAMETER Experiment Name: At_Far-red-induction_P Parameter: Age (day) Value: 7
  misc_feature: MA Experiment 20001451 PARAMETER Experiment Name: At_Far-red-induction_P Parameter: Light Value: Far-red vs. White
  misc_feature: MA Experiment 20001451 PARAMETER Experiment Name: At_Far-red-induction_P Parameter: Organism Value: A. thaliana
  misc_feature: MA Experiment 20001451 PARAMETER Experiment Name: At_Far-red-induction_P Parameter: Plant Line Value: Columbia
  misc_feature: MA Experiment 20001451 PARAMETER Experiment Name: At_Far-red-induction_P Parameter: Timepoint (hr) Value: 24
  misc_feature: MA Experiment 20001451 PARAMETER Experiment Name: At_Far-red-induction_P Parameter: Tissue Value: Whole Plant
  misc_feature: MA Experiment ID: 20001558 Result: Up-regulated in Transcription
  misc_feature: MA Experiment 20001558 PARAMETER Experiment Name: At_Drought_Soil_Dry_P Parameter: Age (day) Value: 27
  misc_feature: MA Experiment 20001558 PARAMETER Experiment Name: At_Drought_Soil_Dry_P Parameter: Organism Value: A. thaliana
  misc_feature: MA Experiment 20001558 PARAMETER Experiment Name: At_Drought_Soil_Dry_P Parameter: Plant Line Value: WS
  misc_feature: MA Experiment 20001558 PARAMETER Experiment Name: At_Drought_Soil_Dry_P Parameter: Post Timepoint (hr) Value: 6
  misc_feature: MA Experiment 20001558 PARAMETER Experiment Name: At_Drought_Soil_Dry_P Parameter: Post-Treatment Value: Re-Water vs. No Drought
  misc_feature: MA Experiment 20001558 PARAMETER Experiment Name: At_Drought_Soil_Dry_P Parameter: Timepoint (day) Value: 13
  misc_feature: MA Experiment 20001558 PARAMETER Experiment Name: At_Drought_Soil_Dry_P Parameter: Treatment Value: Drought vs. No Drought
  misc_feature: MA Experiment ID: 20001560 Result: Up-regulated in Transcription
  misc_feature: MA Experiment 20001560 PARAMETER Experiment Name: At_Drought_Soil_Dry_P Parameter: Age (day) Value: 28
  misc_feature: MA Experiment 20001560 PARAMETER Experiment Name: At_Drought_Soil_Dry_P Parameter: Organism Value: A. thaliana
  misc_feature: MA Experiment 20001560 PARAMETER Experiment Name: At_Drought_Soil_Dry_P Parameter: Plant Line Value: WS
  misc_feature: MA Experiment 20001560 PARAMETER Experiment Name: At_Drought_Soil_Dry_P Parameter: Post Timepoint (hr) Value: None
  misc_feature: MA Experiment 20001560 PARAMETER Experiment Name: At_Drought_Soil_Dry_P Parameter: Post-Treatment Value: None
  misc_feature: MA Experiment 20001560 PARAMETER Experiment Name: At_Drought_Soil_Dry_P Parameter: Timepoint (day) Value: 14
  misc_feature: MA Experiment 20001560 PARAMETER Experiment Name: At_Drought_Soil_Dry_P Parameter: Treatment Value: Drought vs. No Drought
  misc_feature: MA Experiment ID: 20001911 Result: Down-regulated in Transcription
  misc_feature: MA Experiment 20001911 PARAMETER Experiment Name: At_Drought_Reproduction_P Parameter: Age (day) Value: 40
  misc_feature: MA Experiment 20001911 PARAMETER Experiment Name: At_Drought_Reproduction_P Parameter: Organism Value: A. thaliana
  misc_feature: MA Experiment 20001911 PARAMETER Experiment Name: At_Drought_Reproduction_P Parameter: Plant Line Value: WS
  misc_feature: MA Experiment 20001911 PARAMETER Experiment Name: At_Drought_Reproduction_P Parameter: Timepoint (day) Value: 10
  misc_feature: MA Experiment 20001911 PARAMETER Experiment Name: At_Drought_Reproduction_P Parameter: Tissue Value: Flowers
  misc_feature: MA Experiment 20001911 PARAMETER Experiment Name: At_Drought_Reproduction_P Parameter: Treatment Value: Drought vs. No Drought
atattttcattgattttgcatattaatgcatatgttttcataaaaaaagaaaaacgagtgtaaagttattgatagtttctgttacttattaatttttaaggttatgtgtattattaccaattggaggactatatagtcgcaagtctcaaccctataaaagaaaacattcttcgatcatcttcccgcctcgagtatctctctctctctctctcttctctgttttctttattgattgcatagacaaaaatacacacatacacaacagaaagaaagatggagacgacgatgaagaagaaagggagagtgaaagcgacaataacgtcacagaaagaagaagaaggaacagtgagaaaaggaccatggactatggaagaagatttcatcctctttaattacatccttaatcatggtgaaggtctttggaactctgtcgccaaagcctctggtctaaaacgtactggaaaaagttgtcggctccggtggctgaactatctccgaccagatgtgcggcgagggaacataaccgaagaagaacagcttttgatcattcagcttcatgctaagcttggaaacaggtggtcgaagattgcgaagcatcttccgggaagaacggacaacgagataaagaacttctggaggacaaagattcagagacacatgaaagtgtcatcggaaaatatgatgaatcatcaacatcattgttcgggaaactcacagagctcggggatgacgacgcaaggcagctccggcaaagccatagacacggctgagagcttctctcaggcgaagacgacgacgtttaatgtggtggaacaacagtcaaacgagaattactggaacgttgaagatctgtggcccgtccacttgcttaatggtgaccaccatgtgatttaagatatatatatagacctcctatacatttatatgccccagctgggtttttttgtatggtacgttatttggtttttctattgctgaaatgtcgttgcatttaatttacatacgaaaagtgcattaaatcattaaatcttcaatacatatggaggtggtgtttgagtaacttctggtcgttaaagcatatatactactgtactctttttttttctttcaaattgttgttgtttttg

SEQ ID NO: 38135 - protein, 206 aa, Arabidopsis thaliana
  peptide (1)..(206): Ceres Seq. ID no. 13488518
  misc_feature (27)..(74): Pfam Name: Myb-like DNA-binding domain Pfam Description: Myb-like DNA-binding domain
  misc_feature (22)..(187): Homolog of NCBI NO: 21554734 NR Description: putative transcription factor MYB24 [Arabidopsis
  misc_feature (22)..(187): Homolog of NCBI NO: 15242669 NR Description: myb family transcription factor [Arabidopsis
  misc_feature (5)..(174): Homolog of NCBI NO: 30688935 NR Description: myb family transcription factor (ATMYB3)
  misc_feature (12)..(204): Homolog of NCBI NO: 7438338 NR Description: Myb26 protein - garden pea
  misc_feature (25)..(200): Homolog of NCBI NO: 82311 NR Description: myb-related protein 340 - garden snapdragon
  misc_feature (17)..(202): Homolog of NCBI NO: 40643882 NR Description: MYB8 protein [Gerbera hybrid cv. 'Terra Regina']
  misc_feature (25)..(202): Homolog of NCBI NO: 82306 NR Description: myb-related protein 305 - garden snapdragon
  misc_feature (89)..(206): Homolog of NCBI NO: 11358545 NR Description: myb-related transcription factor MYB57
  misc_feature (1)..(206): Homolog of NCBI NO: 21618026 NR Description: putative transcription factor [Arabidopsis
  misc_feature (1)..(206): Homolog of NCBI NO: 15232137 NR Description: myb family transcription factor [Arabidopsis
METTMKKKGRVKATITSQKEEEGTVRKGPWTMEEDFILFNYILNHGEGLWNSVAKASGLKRTGKSCRLRWLNYLRPDVRRGNITEEEQLLIIQLHAKLGNRWSKIAKHLPGRTDNEIKNFWRTKIQRHMKVSSENMMNHQHHCSGNSQSSGMTTQGSSGKAIDTAESFSQAKTTTFNVVEQQSNENYWNVEDLWPVHLLNGDHHVI

SEQ ID NO: 38136 - protein, 202 aa, Arabidopsis thaliana
  peptide (1)..(202): Ceres Seq. ID no. 13488519
  misc_feature (23)..(70): Pfam Name: Myb-like DNA-binding domain Pfam Description: Myb-like DNA-binding domain
  misc_feature (18)..(183): Homolog of NCBI NO: 21554734 NR Description: putative transcription factor MYB24 [Arabidopsis
  misc_feature (18)..(183): Homolog of NCBI NO: 15242669 NR Description: myb family transcription factor [Arabidopsis
  misc_feature (1)..(170): Homolog of NCBI NO: 30688935 NR Description: myb family transcription factor (ATMYB3)
  misc_feature (8)..(200): Homolog of NCBI NO: 7438338 NR Description: Myb26 protein - garden pea
  misc_feature (21)..(196): Homolog of NCBI NO: 82311 NR Description: myb-related protein 340 - garden snapdragon
  misc_feature (13)..(198): Homolog of NCBI NO: 40643882 NR Description: MYB8 protein [Gerbera hybrid cv. 'Terra Regina']
  misc_feature (21)..(198): Homolog of NCBI NO: 82306 NR Description: myb-related protein 305 - garden snapdragon
  misc_feature (85)..(202): Homolog of NCBI NO: 11358545 NR Description: myb-related transcription factor MYB57
  misc_feature (1)..(202): Homolog of NCBI NO: 21618026 NR Description: putative transcription factor [Arabidopsis
  misc_feature (1)..(202): Homolog of NCBI NO: 15232137 NR Description: myb family transcription factor [Arabidopsis
MKKKGRVKATITSQKEEEGTVRKGPWTMEEDFILFNYILNHGEGLWNSVAKASGLKRTGKSCRLRWLNYLRPDVRRGNITEEEQLLIIQLHAKLGNRWSKIAKHLPGRTDNEIKNFWRTKIQRHMKVSSENMMNHQHHCSGNSQSSGMTTQGSSGKAIDTAESFSQAKTTTFNVVEQQSNENYWNVEDLWPVHLLNGDHHVI

SEQ ID NO: 38137 - protein, 175 aa, Arabidopsis thaliana
  peptide (1)..(175): Ceres Seq. ID no. 13488520
  misc_feature (1)..(43): Pfam Name: Myb-like DNA-binding domain Pfam Description: Myb-like DNA-binding domain
  misc_feature (1)..(156): Homolog of NCBI NO: 21554734 NR Description: putative transcription factor MYB24 [Arabidopsis
  misc_feature (1)..(156): Homolog of NCBI NO: 15242669 NR Description: myb family transcription factor [Arabidopsis
  misc_feature (1)..(143): Homolog of NCBI NO: 30688935 NR Description: myb family transcription factor (ATMYB3)
  misc_feature (1)..(173): Homolog of NCBI NO: 7438338 NR Description: Myb26 protein - garden pea
  misc_feature (1)..(169): Homolog of NCBI NO: 82311 NR Description: myb-related protein 340 - garden snapdragon
  misc_feature (1)..(171): Homolog of NCBI NO: 40643882 NR Description: MYB8 protein [Gerbera hybrid cv. 'Terra Regina']
  misc_feature (1)..(171): Homolog of NCBI NO: 82306 NR Description: myb-related protein 305 - garden snapdragon
  misc_feature (58)..(175): Homolog of NCBI NO: 11358545 NR Description: myb-related transcription factor MYB57
  misc_feature (1)..(175): Homolog of NCBI NO: 21618026 NR Description: putative transcription factor [Arabidopsis
  misc_feature (1)..(175): Homolog of NCBI NO: 15232137 NR Description: myb family transcription factor [Arabidopsis
MEEDFILFNYILNHGEGLWNSVAKASGLKRTGKSCRLRWLNYLRPDVRRGNITEEEQLLIIQLHAKLGNRWSKIAKHLPGRTDNEIKNFWRTKIQRHMKVSSENMMNHQHHCSGNSQSSGMTTQGSSGKAIDTAESFSQAKTTTFNVVEQQSNENYWNVEDLWPVHLLNGDHHVI

SEQ ID NO: 38138 - DNA, 1604 bp, Arabidopsis thaliana
  misc_feature (1)..(1604): Ceres Seq. ID no. 13489191
  misc_feature: MA Experiment ID: 108462 Result: Down-regulated in Transcription
  misc_feature: MA Experiment 108462 PARAMETER Experiment Name: At_Germinating_Seeds_cDNA_P Parameter: Age (day) Value: 2 vs. 0
  misc_feature: MA Experiment 108462 PARAMETER Experiment Name: At_Germinating_Seeds_cDNA_P Parameter: Tissue Value: Germinating Seeds
  misc_feature: MA Experiment ID: 108463 Result: Down-regulated in Transcription
  misc_feature: MA Experiment 108463 PARAMETER Experiment Name: At_Germinating_Seeds_cDNA_P Parameter: Age (day) Value: 3 vs. 0
  misc_feature: MA Experiment 108463 PARAMETER Experiment Name: At_Germinating_Seeds_cDNA_P Parameter: Tissue Value: Germinating Seeds
  misc_feature: MA Experiment ID: 108464 Result: Down-regulated in Transcription
  misc_feature: MA Experiment 108464 PARAMETER Experiment Name: At_Germinating_Seeds_cDNA_P Parameter: Age (day) Value: 4 vs. 0
  misc_feature: MA Experiment 108464 PARAMETER Experiment Name: At_Germinating_Seeds_cDNA_P Parameter: Tissue Value: Germinating Seeds
  misc_feature: MA Experiment ID: 108469 Result: Up-regulated in Transcription
  misc_feature: MA Experiment ID: 108585 Result: Up-regulated in Transcription
  misc_feature: MA Experiment 108585 PARAMETER Experiment Name: At_5mM_NaNP_cDNA_P Parameter: Timepoint (hr) Value: 6
  misc_feature: MA Experiment 108585 PARAMETER Experiment Name: At_5mM_NaNP_cDNA_P Parameter: Tissue Value: Aerial
  misc_feature: MA Experiment 108585 PARAMETER Experiment Name: At_5mM_NaNP_cDNA_P Parameter: Treatment Value: null
  misc_feature: MA Experiment ID: 108667 Result: Up-regulated in Transcription
  misc_feature: MA Experiment 108667 PARAMETER Experiment Name: At_2mM_SA_cDNA_P Parameter: Plant Line Value: WS
  misc_feature: MA Experiment 108667 PARAMETER Experiment Name: At_2mM_SA_cDNA_P Parameter: Timepoint (hr) Value: 1
  misc_feature: MA Experiment 108667 PARAMETER Experiment Name: At_2mM_SA_cDNA_P Parameter: Treatment Value: 2mM SA vs. No Treatment
  misc_feature: MA Experiment ID: 108668 Result: Up-regulated in Transcription
  misc_feature: MA Experiment 108668 PARAMETER Experiment Name: At_2mM_SA_cDNA_P Parameter: Plant Line Value: WS
  misc_feature: MA Experiment 108668 PARAMETER Experiment Name: At_2mM_SA_cDNA_P Parameter: Timepoint (hr) Value: 6
  misc_feature: MA Experiment 108668 PARAMETER Experiment Name: At_2mM_SA_cDNA_P Parameter: Treatment Value: 2mM SA vs. No Treatment
  misc_feature: MA Experiment ID: 20000182 Result: Up-regulated in Transcription
  misc_feature: MA Experiment 20000182 PARAMETER Experiment Name: At_2mM_SA_P Parameter: Age (day) Value: 14
  misc_feature: MA Experiment 20000182 PARAMETER Experiment Name: At_2mM_SA_P Parameter: Organism Value: A. thaliana
  misc_feature: MA Experiment 20000182 PARAMETER Experiment Name: At_2mM_SA_P Parameter: Plant Line Value: WS
  misc_feature: MA Experiment 20000182 PARAMETER Experiment Name: At_2mM_SA_P Parameter: Timepoint (hr) Value: 6
  misc_feature: MA Experiment 20000182 PARAMETER Experiment Name: At_2mM_SA_P Parameter: Tissue Value: Aerial
  misc_feature: MA Experiment 20000182 PARAMETER Experiment Name: At_2mM_SA_P Parameter: Treatment Value: 2mM SA vs. No Treatment
  misc_feature: MA Experiment ID: 20000185 Result: Up-regulated in Transcription
  misc_feature: MA Experiment 20000185 PARAMETER Experiment Name: At_Roots__P Parameter: Age (day) Value: 7 vs. 21
  misc_feature: MA Experiment 20000185 PARAMETER Experiment Name: At_Roots__P Parameter: Organism Value: A. thaliana
  misc_feature: MA Experiment 20000185 PARAMETER Experiment Name: At_Roots__P Parameter: Tissue Value: Roots vs. Whole Plant
  misc_feature: MA Experiment ID: 20000234 Result: Up-regulated in Transcription
  misc_feature: MA Experiment 20000234 PARAMETER Experiment Name: At_Siliques_P Parameter: Age (day) Value: 21
  misc_feature: MA Experiment 20000234 PARAMETER Experiment Name: At_Siliques_P Parameter: Organism Value: A. thaliana
  misc_feature: MA Experiment 20000234 PARAMETER Experiment Name: At_Siliques_P Parameter: Plant Line Value: WS
  misc_feature: MA Experiment 20000234 PARAMETER Experiment Name: At_Siliques_P Parameter: Tissue Value: Less Than 5mm Siliques vs. Whole Plant
  misc_feature: MA Experiment ID: 20000264 Result: Up-regulated in Transcription
  misc_feature: MA Experiment 20000264 PARAMETER Experiment Name: At_Open_Flower_P Parameter: Age (day) Value: 21
  misc_feature: MA Experiment 20000264 PARAMETER Experiment Name: At_Open_Flower_P Parameter: Plant Line Value: WS
  misc_feature: MA Experiment 20000264 PARAMETER Experiment Name: At_Open_Flower_P Parameter: Tissue Value: Open Flower vs. Whole Plant
  misc_feature: MA Experiment ID: 20000265 Result: Up-regulated in Transcription
  misc_feature: MA Experiment 20000265 PARAMETER Experiment Name: At_Open_Flower_P Parameter: Age (day) Value: 21
  misc_feature: MA Experiment 20000265 PARAMETER Experiment Name: At_Open_Flower_P Parameter: Plant Line Value: WS
  misc_feature: MA Experiment 20000265 PARAMETER Experiment Name: At_Open_Flower_P Parameter: Tissue Value: Closed Flower vs. Whole Plant
  misc_feature: MA Experiment ID: 20000286 Result: Up-regulated in Transcription
  misc_feature: MA Experiment 20000286 PARAMETER Experiment Name: At_Open_Flower_P Parameter: Age (day) Value: 21
  misc_feature: MA Experiment 20000286 PARAMETER Experiment Name: At_Open_Flower_P Parameter: Plant Line Value: WS
  misc_feature: MA Experiment 20000286 PARAMETER Experiment Name: At_Open_Flower_P Parameter: Tissue Value: Half Open vs. Whole Plant
  misc_feature: MA Experiment ID: 20000439 Result: Up-regulated in Transcription
  misc_feature: MA Experiment 20000439 PARAMETER Experiment Name: At_Roots__P Parameter: Age (day) Value: 14 vs. 21
  misc_feature: MA Experiment 20000439 PARAMETER Experiment Name: At_Roots__P Parameter: Organism Value: A. thaliana
  misc_feature: MA Experiment 20000439 PARAMETER Experiment Name: At_Roots__P Parameter: Tissue Value: Roots vs. Whole Plant
  misc_feature: MA Experiment ID: 20000709 Result: Up-regulated in Transcription
  misc_feature: MA Experiment 20000709 PARAMETER Experiment Name: At_15mM_NH4NO3_L-to-H_P Parameter: Age (hr) Value: 14
  misc_feature: MA Experiment 20000709 PARAMETER Experiment Name: At_15mM_NH4NO3_L-to-H_P Parameter: Organism Value: A. thaliana
  misc_feature: MA Experiment 20000709 PARAMETER Experiment Name: At_15mM_NH4NO3_L-to-H_P Parameter: Plant Line Value: WS
  misc_feature: MA Experiment 20000709 PARAMETER Experiment Name: At_15mM_NH4NO3_L-to-H_P Parameter: Timepoint (hr) Value: 4
  misc_feature: MA Experiment 20000709 PARAMETER Experiment Name: At_15mM_NH4NO3_L-to-H_P Parameter: Tissue Value: Aerial
  misc_feature: MA Experiment 20000709 PARAMETER Experiment Name: At_15mM_NH4NO3_L-to-H_P Parameter: Treatment Value: 15mM NH4NO3 vs. 30mM Mannitol
  misc_feature: MA Experiment ID: 20001557 Result: Up-regulated in Transcription
  misc_feature: MA Experiment 20001557 PARAMETER Experiment Name: At_Drought_Soil_Dry_P Parameter: Age (day) Value: 27
  misc_feature: MA Experiment 20001557 PARAMETER Experiment Name: At_Drought_Soil_Dry_P Parameter: Organism Value: A. thaliana
  misc_feature: MA Experiment 20001557 PARAMETER Experiment Name: At_Drought_Soil_Dry_P Parameter: Plant Line Value: WS
  misc_feature: MA Experiment 20001557 PARAMETER Experiment Name: At_Drought_Soil_Dry_P Parameter: Post Timepoint (hr) Value: 3
  misc_feature: MA Experiment 20001557 PARAMETER Experiment Name: At_Drought_Soil_Dry_P Parameter: Post-Treatment Value: Re-Water vs. No Drought
  misc_feature: MA Experiment 20001557 PARAMETER Experiment Name: At_Drought_Soil_Dry_P Parameter: Timepoint (day) Value: 13
  misc_feature: MA Experiment 20001557 PARAMETER Experiment Name: At_Drought_Soil_Dry_P Parameter: Treatment Value: Drought vs. No Drought
  misc_feature: MA Experiment ID: 20001560 Result: Up-regulated in Transcription
  misc_feature: MA Experiment 20001560 PARAMETER Experiment Name: At_Drought_Soil_Dry_P Parameter: Age (day) Value: 28
  misc_feature: MA Experiment 20001560 PARAMETER Experiment Name: At_Drought_Soil_Dry_P Parameter: Organism Value: A. thaliana
  misc_feature: MA Experiment 20001560 PARAMETER Experiment Name: At_Drought_Soil_Dry_P Parameter: Plant Line Value: WS
  misc_feature: MA Experiment 20001560 PARAMETER Experiment Name: At_Drought_Soil_Dry_P Parameter: Post Timepoint (hr) Value: None
  misc_feature: MA Experiment 20001560 PARAMETER Experiment Name: At_Drought_Soil_Dry_P Parameter: Post-Treatment Value: None
  misc_feature: MA Experiment 20001560 PARAMETER Experiment Name: At_Drought_Soil_Dry_P Parameter: Timepoint (day) Value: 14
  misc_feature: MA Experiment 20001560 PARAMETER Experiment Name: At_Drought_Soil_Dry_P Parameter: Treatment Value: Drought vs. No Drought
atttttgtctcatttttttactcaaacgaacattttcgtggctccagagctacactcaaaagccattcagcggaaggggttaggatttttggcggcgagatctctctgtttctggtagcttagcaatggccttatcttctctcctcagatctgccgccacttccgccgcagctcctcgtgtcgagctttatccatcgtcatcgtacaatcattctcaggtcacgtcaagtcttggattcagtcatagcctgacctcgtctagattttctggtgctgcagtttcaaccggaaaatacagtgcgaagagggttcaacccatcaaggccacagctacggaagcacctcctgctgttcataggtcaaggagcagtggaaagacaaaggttgggatcaacggttttggtcgaattggaagattggtcctccgcatcgcaacctttagggatgatatcgaggttgtagcagtcaacgatccattcatagatgccaagtacatggcttacatgttcaagtatgattctactcatggaaattacaaaggaactatcaatgtaattgatgattcaactttggagatcaatggaaaacaagtcaaagttgtcagcaagagagacccagctgaaatcccgtgggctgatcttggagctgagtatgttgttgagtcttcaggggtattcaccaccgttggacaagcttcatcacatttgaagggtggtgctaagaaggtcatcatttctgcaccttcagcggacgcgcccatgtttgttgttggagtaaatgaaaagacatacctgcctaacatggatatagtctccaatgcaagttgtaccaccaattgtcttgcacctcttgccaaggtggtgcatgaggaatttggtattcttgaaggcttgatgacaacagtccacgcgaccacagctactcagaaaactgtggacggcccatcaatgaaggactggagaggaggccgaggcgcaagtcaaaacatcattcctagctcaacaggcgctgcaaaggctgttggtaaggtccttccggaactcaatggaaaactaacaggaatggccttccgtgtcccaacaccaaatgtctctgttgtggatttaacttgtcgacttgagaaggatgcatcgtatgaagacgtcaaggcagccataaagtttgcatcagaaggaccacttaggggcattcttggatatacagaagaagatgtcgtctctaatgattttcttggagattcaaggtcaagtatctttgatgctaatgctgggattggattaagcaagtccttcatgaaacttgtctcctggtatgacaacgaatggggttacagcaaccgagtccttgacctgatagaacacatggcgttagttgcagccagccgctaaaaccatatcccgccaacgttcgttaggtagtttttgttacattgggggttcgattactgaaccttccggttttggctccaagttttatgtaaaaccatacgatatctaataatatggggaagattttttttgttgtacgaagaaatattgttagcagctagtcgaaaccttttctatatataaaaattggtttccaaagattggaattttctggct

SEQ ID NO: 38139 - protein, 420 aa, Arabidopsis thaliana
  peptide (1)..(420): Ceres Seq. ID no. 13489192
  misc_feature (235)..(396): Pfam Name: Glyceraldehyde 3-phosphate dehydrogenase, Pfam Description: Glyceraldehyde 3-phosphate dehydrogenase,
  misc_feature (58)..(420): Homolog of NCBI NO: 3059122 NR Description: glyeraldehyde-3-phosphate dehydrogenase [Marsilea
  misc_feature (58)..(420): Homolog of NCBI NO: 3059140 NR Description: NAD-dependent glyceraldehyde-3-phosphate
  misc_feature (1)..(420): Homolog of NCBI NO: 2129472 NR Description: glyceraldehyde-3-phosphate dehydrogenase
  misc_feature (1)..(420): Homolog of NCBI NO: 2129471 NR Description: glyceraldehyde-3-phosphate dehydrogenase
  misc_feature (1)..(419): Homolog of NCBI NO: 18072805 NR Description: glyceraldehyde-3-phosphate dehydrogenase
  misc_feature (1)..(419): Homolog of NCBI NO: 15219406 NR Description: glyceraldehyde-3-phosphate dehydrogenase -related
  misc_feature (1)..(420): Homolog of NCBI NO: 25284351 NR Description: hypothetical protein F3O9.10 - Arabidopsis
  misc_feature (1)..(420): Homolog of NCBI NO: 21618027 NR Description: putative glyceraldehyde-3-phosphate dehydrogenase
  misc_feature (1)..(420): Homolog of NCBI NO: 15219206 NR Description: glyceraldehyde-3-phosphate dehydrogenase -related
  misc_feature (1)..(420): Homolog of NCBI NO: 27754473 NR Description: putative glyceraldehyde-3-phosphate dehydrogenase
MALSSLLRSAATSAAAPRVELYPSSSYNHSQVTSSLGFSHSLTSSRFSGAAVSTGKYSAKRVQPIKATATEAPPAVHRSRSSGKTKVGINGFGRIGRLVLRIATFRDDIEVVAVNDPFIDAKYMAYMFKYDSTHGNYKGTINVIDDSTLEINGKQVKVVSKRDPAEIPWADLGAEYVVESSGVFTTVGQASSHLKGGAKKVIISAPSADAPMFVVGVNEKTYLPNMDIVSNASCTTNCLAPLAKVVHEEFGILEGLMTTVHATTATQKTVDGPSMKDWRGGRGASQNIIPSSTGAAKAVGKVLPELNGKLTGMAFRVPTPNVSVVDLTCRLEKDASYEDVKAAIKFASEGPLRGILGYTEEDVVSNDFLGDSRSSIFDANAGIGLSKSFMKLVSWYDNEWGYSNRVLDLIEHMALVAASR

SEQ ID NO: 38140 - protein, 297 aa, Arabidopsis thaliana
  peptide (1)..(297): Ceres Seq. ID no. 13489193
  misc_feature (112)..(273): Pfam Name: Glyceraldehyde 3-phosphate dehydrogenase, Pfam Description: Glyceraldehyde 3-phosphate dehydrogenase,
  misc_feature (1)..(297): Homolog of NCBI NO: 3059122 NR Description: glyeraldehyde-3-phosphate dehydrogenase [Marsilea
  misc_feature (1)..(297): Homolog of NCBI NO: 3059140 NR Description: NAD-dependent glyceraldehyde-3-phosphate
  misc_feature (1)..(297): Homolog of NCBI NO: 2129472 NR Description: glyceraldehyde-3-phosphate dehydrogenase
  misc_feature (1)..(297): Homolog of NCBI NO: 2129471 NR Description: glyceraldehyde-3-phosphate dehydrogenase
  misc_feature (1)..(296): Homolog of NCBI NO: 18072805 NR Description: glyceraldehyde-3-phosphate dehydrogenase
  misc_feature (1)..(296): Homolog of NCBI NO: 15219406 NR Description: glyceraldehyde-3-phosphate dehydrogenase -related
  misc_feature (1)..(297): Homolog of NCBI NO: 25284351 NR Description: hypothetical protein F3O9.10 - Arabidopsis
  misc_feature (1)..(297): Homolog of NCBI NO: 21618027 NR Description: putative glyceraldehyde-3-phosphate dehydrogenase
  misc_feature (1)..(297): Homolog of NCBI NO: 15219206 NR Description: glyceraldehyde-3-phosphate dehydrogenase -related
  misc_feature (1)..(297): Homolog of NCBI NO: 27754473 NR Description: putative glyceraldehyde-3-phosphate dehydrogenase
MAYMFKYDSTHGNYKGTINVIDDSTLEINGKQVKVVSKRDPAEIPWADLGAEYVVESSGVFTTVGQASSHLKGGAKKVIISAPSADAPMFVVGVNEKTYLPNMDIVSNASCTTNCLAPLAKVVHEEFGILEGLMTTVHATTATQKTVDGPSMKDWRGGRGASQNIIPSSTGAAKAVGKVLPELNGKLTGMAFRVPTPNVSVVDLTCRLEKDASYEDVKAAIKFASEGPLRGILGYTEEDVVSNDFLGDSRSSIFDANAGIGLSKSFMKLVSWYDNEWGYSNRVLDLIEHMALVAASR

SEQ ID NO: 38141 - protein, 294 aa, Arabidopsis thaliana
  peptide (1)..(294): Ceres Seq. ID no. 13489194
  misc_feature (109)..(270): Pfam Name: Glyceraldehyde 3-phosphate dehydrogenase, Pfam Description: Glyceraldehyde 3-phosphate dehydrogenase,
  misc_feature (1)..(294): Homolog of NCBI NO: 3059122 NR Description: glyeraldehyde-3-phosphate dehydrogenase [Marsilea
  misc_feature (1)..(294): Homolog of NCBI NO: 3059140 NR Description: NAD-dependent glyceraldehyde-3-phosphate
  misc_feature (1)..(294): Homolog of NCBI NO: 2129472 NR Description: glyceraldehyde-3-phosphate dehydrogenase
  misc_feature (1)..(294): Homolog of NCBI NO: 2129471 NR Description: glyceraldehyde-3-phosphate dehydrogenase
  misc_feature (1)..(293): Homolog of NCBI NO: 18072805 NR Description: glyceraldehyde-3-phosphate dehydrogenase
  misc_feature (1)..(293): Homolog of NCBI NO: 15219406 NR Description: glyceraldehyde-3-phosphate dehydrogenase -related
  misc_feature (1)..(294): Homolog of NCBI NO: 25284351 NR Description: hypothetical protein F3O9.10 - Arabidopsis
  misc_feature (1)..(294): Homolog of NCBI NO: 21618027 NR Description: putative glyceraldehyde-3-phosphate dehydrogenase
  misc_feature (1)..(294): Homolog of NCBI NO: 15219206 NR Description: glyceraldehyde-3-phosphate dehydrogenase -related
  misc_feature (1)..(294): Homolog of NCBI NO: 27754473 NR Description: putative glyceraldehyde-3-phosphate dehydrogenase
MFKYDSTHGNYKGTINVIDDSTLEINGKQVKVVSKRDPAEIPWADLGAEYVVESSGVFTTVGQASSHLKGGAKKVIISAPSADAPMFVVGVNEKTYLPNMDIVSNASCTTNCLAPLAKVVHEEFGILEGLMTTVHATTATQKTVDGPSMKDWRGGRGASQNIIPSSTGAAKAVGKVLPELNGKLTGMAFRVPTPNVSVVDLTCRLEKDASYEDVKAAIKFASEGPLRGILGYTEEDVVSNDFLGDSRSSIFDANAGIGLSKSFMKLVSWYDNEWGYSNRVLDLIEHMALVAASR

SEQ ID NO: 38142 - DNA, 1539 bp, Arabidopsis thaliana
  misc_feature (1)..(1539): Ceres Seq. ID no. 12481869
  misc_feature: MA Experiment ID: 20000179 Result: Down-regulated in Transcription
  misc_feature: MA Experiment 20000179 PARAMETER Experiment Name: At_Germinating_Seeds_P Parameter: Age (hr) Value: 6 vs. 0
  misc_feature: MA Experiment 20000179 PARAMETER Experiment Name: At_Germinating_Seeds_P Parameter: Tissue Value: Germinating Seeds
  misc_feature: MA Experiment ID: 20000180 Result: Down-regulated in Transcription
  misc_feature: MA Experiment 20000180 PARAMETER Experiment Name: At_Germinating_Seeds_P Parameter: Age (hr) Value: 24 vs. 0
  misc_feature: MA Experiment 20000180 PARAMETER Experiment Name: At_Germinating_Seeds_P Parameter: Tissue Value: Germinating Seeds
  misc_feature: MA Experiment ID: 20000184 Result: Down-regulated in Transcription
  misc_feature: MA Experiment 20000184 PARAMETER Experiment Name: At_Shoots__P Parameter: Age (day) Value: 7
  misc_feature: MA Experiment 20000184 PARAMETER Experiment Name: At_Shoots__P Parameter: Tissue Value: Shoots vs. Whole Plant
  misc_feature: MA Experiment ID: 20000185 Result: Down-regulated in Transcription
  misc_feature: MA Experiment 20000185 PARAMETER Experiment Name: At_Roots__P Parameter: Age (day) Value: 7 vs. 21
  misc_feature: MA Experiment 20000185 PARAMETER Experiment Name: At_Roots__P Parameter: Organism Value: A. thaliana
  misc_feature: MA Experiment 20000185 PARAMETER Experiment Name: At_Roots__P Parameter: Tissue Value: Roots vs. Whole Plant
  misc_feature: MA Experiment ID: 20000234 Result: Down-regulated in Transcription
  misc_feature: MA Experiment 20000234 PARAMETER Experiment Name: At_Siliques_P Parameter: Age (day) Value: 21
  misc_feature: MA Experiment 20000234 PARAMETER Experiment Name: At_Siliques_P Parameter: Organism Value: A. thaliana
  misc_feature: MA Experiment 20000234 PARAMETER Experiment Name: At_Siliques_P Parameter: Plant Line Value: WS
  misc_feature: MA Experiment 20000234 PARAMETER Experiment Name: At_Siliques_P Parameter: Tissue Value: Less Than 5mm Siliques vs. Whole Plant
  misc_feature: MA Experiment ID: 20000235 Result: Down-regulated in Transcription
  misc_feature: MA Experiment 20000235 PARAMETER Experiment Name: At_Siliques_P Parameter: Age (day) Value: 21
  misc_feature: MA Experiment 20000235 PARAMETER Experiment Name: At_Siliques_P Parameter: Organism Value: A. thaliana
  misc_feature: MA Experiment 20000235 PARAMETER Experiment Name: At_Siliques_P Parameter: Plant Line Value: WS
  misc_feature: MA Experiment 20000235 PARAMETER Experiment Name: At_Siliques_P Parameter: Tissue Value: 5-10mm Siliques vs. Whole Plant
  misc_feature: MA Experiment ID: 20000264 Result: Down-regulated in Transcription
  misc_feature: MA Experiment 20000264 PARAMETER Experiment Name: At_Open_Flower_P Parameter: Age (day) Value: 21
  misc_feature: MA Experiment 20000264 PARAMETER Experiment Name: At_Open_Flower_P Parameter: Plant Line Value: WS
  misc_feature: MA Experiment 20000264 PARAMETER Experiment Name: At_Open_Flower_P Parameter: Tissue Value: Open Flower vs. Whole Plant
  misc_feature: MA Experiment ID: 20000265 Result: Down-regulated in Transcription
  misc_feature: MA Experiment 20000265 PARAMETER Experiment Name: At_Open_Flower_P Parameter: Age (day) Value: 21
  misc_feature: MA Experiment 20000265 PARAMETER Experiment Name: At_Open_Flower_P Parameter: Plant Line Value: WS
  misc_feature: MA Experiment 20000265 PARAMETER Experiment Name: At_Open_Flower_P Parameter: Tissue Value: Closed Flower vs. Whole Plant
  misc_feature: MA Experiment ID: 20000286 Result: Down-regulated in Transcription
  misc_feature: MA Experiment 20000286 PARAMETER Experiment Name: At_Open_Flower_P Parameter: Age (day) Value: 21
  misc_feature: MA Experiment 20000286 PARAMETER Experiment Name: At_Open_Flower_P Parameter: Plant Line Value: WS
  misc_feature: MA Experiment 20000286 PARAMETER Experiment Name: At_Open_Flower_P Parameter: Tissue Value: Half Open vs. Whole Plant
  misc_feature: MA Experiment ID: 20000438 Result: Down-regulated in Transcription
  misc_feature: MA Experiment 20000438 PARAMETER Experiment Name: At_Shoots__P Parameter: Age (day) Value: 14
  misc_feature: MA Experiment 20000438 PARAMETER Experiment Name: At_Shoots__P Parameter: Tissue Value: Shoots vs. Whole Plant
  misc_feature: MA Experiment ID: 20000439 Result: Down-regulated in Transcription
  misc_feature: MA Experiment 20000439 PARAMETER Experiment Name: At_Roots__P Parameter: Age (day) Value: 14 vs. 21
  misc_feature: MA Experiment 20000439 PARAMETER Experiment Name: At_Roots__P Parameter: Organism Value: A. thaliana
  misc_feature: MA Experiment 20000439 PARAMETER Experiment Name: At_Roots__P Parameter: Tissue Value: Roots vs. Whole Plant
  misc_feature: MA Experiment ID: 20000441 Result: Up-regulated in Transcription
  misc_feature: MA Experiment 20000441 PARAMETER Experiment Name: At_1uM_BR-BRZ__P Parameter: Tissue Value: Shoot Apices
  misc_feature: MA Experiment 20000441 PARAMETER Experiment Name: At_1uM_BR-BRZ__P Parameter: Treatment Value: 1uM BR vs. No Treatment
  misc_feature: MA Experiment ID: 20000443 Result: Up-regulated in Transcription
  misc_feature: MA Experiment 20000443 PARAMETER Experiment Name: At_1uM_BR-BRZ__P Parameter: Tissue Value: Shoot Apices
  misc_feature: MA Experiment 20000443 PARAMETER Experiment Name: At_1uM_BR-BRZ__P Parameter: Treatment Value: 1uM BRZ vs. No Treatment
  misc_feature: MA Experiment ID: 20000452 Result: Up-regulated in Transcription
  misc_feature: MA Experiment 20000452 PARAMETER Experiment Name: At_CS6879_Shoots-Roots_P Parameter: Age (day) Value: 14
  misc_feature: MA Experiment 20000452 PARAMETER Experiment Name: At_CS6879_Shoots-Roots_P Parameter: Organism Value: A. thaliana
  misc_feature: MA Experiment 20000452 PARAMETER Experiment Name: At_CS6879_Shoots-Roots_P Parameter: Plant Line Value: CS6879 vs. WS
  misc_feature: MA Experiment 20000452 PARAMETER Experiment Name: At_CS6879_Shoots-Roots_P Parameter: Tissue Value: Shoots
  misc_feature: MA Experiment ID: 20000460 Result: Up-regulated in Transcription
  misc_feature: MA Experiment 20000460 PARAMETER Experiment Name: At_10percent_PEG_P Parameter: Age (day) Value: 12
  misc_feature: MA Experiment 20000460 PARAMETER Experiment Name: At_10percent_PEG_P Parameter: Organism Value: A. thaliana
  misc_feature: MA Experiment 20000460 PARAMETER Experiment Name: At_10percent_PEG_P Parameter: Plant Line Value: WS
  misc_feature: MA Experiment 20000460 PARAMETER Experiment Name: At_10percent_PEG_P Parameter: Timepoint (day) Value: 12
  misc_feature: MA Experiment 20000460 PARAMETER Experiment Name: At_10percent_PEG_P Parameter: Tissue Value: Whole Plant
  misc_feature: MA Experiment 20000460 PARAMETER Experiment Name: At_10percent_PEG_P Parameter: Treatment Value: 10percent PEG vs. No Treatment
  misc_feature: MA Experiment ID: 20000495 Result: Down-regulated in Transcription
  misc_feature: MA Experiment 20000495 PARAMETER Experiment Name: At_Guard_Cells_P Parameter: Harvest Date Value: 8/2/2002
  misc_feature: MA Experiment 20000495 PARAMETER Experiment Name: At_Guard_Cells_P Parameter: Organism Value: A. thaliana
  misc_feature: MA Experiment 20000495 PARAMETER Experiment Name: At_Guard_Cells_P Parameter: Tissue Value: Guard Cells vs. Leaves
  misc_feature: MA Experiment ID: 20000527 Result: Up-regulated in Transcription
  misc_feature: MA Experiment 20000527 PARAMETER Experiment Name: At_10percent_PEG_P Parameter: Age (day) Value: 20
  misc_feature: MA Experiment 20000527 PARAMETER Experiment Name: At_10percent_PEG_P Parameter: Organism Value: A. thaliana
  misc_feature: MA Experiment 20000527 PARAMETER Experiment Name: At_10percent_PEG_P Parameter: Plant Line Value: WS
  misc_feature: MA Experiment 20000527 PARAMETER Experiment Name: At_10percent_PEG_P Parameter: Timepoint (day) Value: 20
  misc_feature: MA Experiment 20000527 PARAMETER Experiment Name: At_10percent_PEG_P Parameter: Tissue Value: Whole Plant
  misc_feature: MA Experiment 20000527 PARAMETER Experiment Name: At_10percent_PEG_P Parameter: Treatment Value: 10percent PEG vs. No Treatment
  misc_feature: MA Experiment ID: 20000573 Result: Down-regulated in Transcription
  misc_feature: MA Experiment 20000573 PARAMETER Experiment Name: At_100uM_ABA_Mutants__P Parameter: Organism Value: A. thaliana
  misc_feature: MA Experiment 20000573 PARAMETER Experiment Name: At_100uM_ABA_Mutants__P Parameter: Plant Line Value: CS22 vs. Ler wt
  misc_feature: MA Experiment 20000573 PARAMETER Experiment Name: At_100uM_ABA_Mutants__P Parameter: Timepoint (hr) Value: N/A
  misc_feature: MA Experiment 20000573 PARAMETER Experiment Name: At_100uM_ABA_Mutants__P Parameter: Tissue Value: Whole Plant
  misc_feature: MA Experiment 20000573 PARAMETER Experiment Name: At_100uM_ABA_Mutants__P Parameter: Treatment Value: None
  misc_feature: MA Experiment ID: 20000574 Result: Down-regulated in Transcription
  misc_feature: MA Experiment 20000574 PARAMETER Experiment Name: At_100uM_ABA_Mutants__P Parameter: Organism Value: A. thaliana
  misc_feature: MA Experiment 20000574 PARAMETER Experiment Name: At_100uM_ABA_Mutants__P Parameter: Plant Line Value: CS23 vs. Ler wt
  misc_feature: MA Experiment 20000574 PARAMETER Experiment Name: At_100uM_ABA_Mutants__P Parameter: Timepoint (hr) Value: N/A
  misc_feature: MA Experiment 20000574 PARAMETER Experiment Name: At_100uM_ABA_Mutants__P Parameter: Tissue Value: Whole Plant
  misc_feature: MA Experiment 20000574 PARAMETER Experiment Name: At_100uM_ABA_Mutants__P Parameter: Treatment Value: None
  misc_feature: MA Experiment ID: 20000794 Result: Down-regulated in Transcription
  misc_feature: MA Experiment 20000794 PARAMETER Experiment Name: At_Petals_P Parameter: Age (day) Value: 23-25 days
  misc_feature: MA Experiment 20000794 PARAMETER Experiment Name: At_Petals_P Parameter: Plant Line Value: WS
  misc_feature: MA Experiment 20000794 PARAMETER Experiment Name: At_Petals_P Parameter: Tissue Value: Petals vs. Whole plant
  misc_feature: MA Experiment ID: 20001773 Result: Down-regulated in Transcription
  misc_feature: MA Experiment 20001773 PARAMETER Experiment Name: At_Far-red-enriched-adult_P Parameter: Age (day) Value: 30
  misc_feature: MA Experiment 20001773 PARAMETER Experiment Name: At_Far-red-enriched-adult_P Parameter: Light Value: Far-red enriched vs. White
  misc_feature: MA Experiment 20001773 PARAMETER Experiment Name: At_Far-red-enriched-adult_P Parameter: Organism Value: A. thaliana
  misc_feature: MA Experiment 20001773 PARAMETER Experiment Name: At_Far-red-enriched-adult_P Parameter: Plant Line Value: Columbia
  misc_feature: MA Experiment 20001773 PARAMETER Experiment Name: At_Far-red-enriched-adult_P Parameter: Timepoint (hr) Value: 48
  misc_feature: MA Experiment 20001773 PARAMETER Experiment Name: At_Far-red-enriched-adult_P Parameter: Tissue Value: Aerial
  misc_feature: MA Experiment ID: 20001905 Result: Up-regulated in Transcription
  misc_feature: MA Experiment 20001905 PARAMETER Experiment Name: At_Drought_Reproduction_P Parameter: Age (day) Value: 40
  misc_feature: MA Experiment 20001905 PARAMETER Experiment Name: At_Drought_Reproduction_P Parameter: Organism Value: A. thaliana
  misc_feature: MA Experiment 20001905 PARAMETER Experiment Name: At_Drought_Reproduction_P Parameter: Plant Line Value: WS
  misc_feature: MA Experiment 20001905 PARAMETER Experiment Name: At_Drought_Reproduction_P Parameter: Timepoint (day) Value: 10
  misc_feature: MA Experiment 20001905 PARAMETER Experiment Name: At_Drought_Reproduction_P Parameter: Tissue Value: Rosettes
  misc_feature: MA Experiment 20001905 PARAMETER Experiment Name: At_Drought_Reproduction_P Parameter: Treatment Value: Drought vs. No Drought
atggacaatagcagaaccagacaaaacatgaatggttctgctaattggtcacaacaatccggaagaacatctacttcctctttggaagatcttgagataccaaagttcagatcttttgctccttcttcaatctctatctctccttctcttgtctctccttccacttgtttcagtccctctctttttctcgattcccctgcttttgtctcctcctctgctaacgttctagcttctccaaccacaggagctttaatcacaaacgtaactaaccagaaaggtataaatgaaggagacaagagcaacaacaacaactttaacttattcgatttctcattccacacacaatcatcaggagtttctgctccgaccacaactacaactacaactacaactacaacaacaacaaacagttctatctttcaatctcaggaacaacagaagaagaaccagtcagaacaatggagccaaaccgagactcgtccaaacaatcaagctgtatcttacaatggaagagagcaaaggaaaggagaggatggttacaattggagaaagtacggacaaaaacaggtgaaaggaagtgagaatcctcggagttactataagtgtactttccctaattgtccaacgaagaagaaagtggagagatctttggaaggtcagatcacagagattgtgtataaaggaagccacaaccatcctaaacctcagtctactagaagatcttcttcgtcttcttcgacttttcattcagctgtgtacaatgccagtttggatcataatcgtcaagcttcttctgatcagcctaattccaataatagctttcatcagtctgattcctttgggatgcaacaagaggataatactacttctgattctgttggtgacgatgagttcgaacaaggctcatcgattgtcagcagagacgaagaagattgtgggagtgaacctgaagcaaagagatggaaaggggacaatgaaacaaatggtgggaatggtggtggaagcaagacagtgagagagccgagaatcgtagtgcagacaacgagtgatattgacattcttgacgacggttacagatggagaaaatacggccagaaagtcgttaagggaaacccaaatccaagaagctactacaagtgcacaaccatcggttgtccagtgaggaaacatgtggagagagcatcacacgacatgagagcagtaatcacaacctacgaagggaaacacaaccacgatgttcctgcagctcgtggtagcggttacgccacaaacagagcaccacaggattcgtcttcagtcccgattagaccagctgctattgctggtcactccaactacactacttcttctcaagcaccatatacacttcagatgctgcacaacaacaacactaataccgggccttttggttacgccatgaacaacaataacaacaacagcaaccttcaaacgcaacaaaactttgttggtggtggattctctagagcaaaggaagaaccaaacgaggagacctcatttttcgattcgtttatgccctga

SEQ ID NO: 38143 - protein, 512 aa, Arabidopsis thaliana
  peptide (1)..(512): Ceres Seq. ID no. 12481870
  misc_feature (354)..(413): Pfam Name: WRKY DNA -binding domain Pfam Description: WRKY DNA -binding domain
  misc_feature (32)..(511): Homolog of NCBI NO: 5917653 NR Description: zinc-finger type transcription factor WRKY1
  misc_feature (32)..(511): Homolog of NCBI NO: 3420906 NR Description: zinc finger protein; WRKY1 [Pimpinella
  misc_feature (32)..(511): Homolog of NCBI NO: 7488948 NR Description: DNA-binding protein WRKY1 - parsley
  misc_feature (42)..(511): Homolog of NCBI NO: 5360683 NR Description: NtWRKY1 [Nicotiana tabacum]
  misc_feature (2)..(511): Homolog of NCBI NO: 14530681 NR Description: WRKY DNA-binding protein [Nicotiana tabacum]
  misc_feature (30)..(511): Homolog of NCBI NO: 34484314 NR Description: WRKY-type transcription factor [Solanum chacoense]
  misc_feature (33)..(511): Homolog of NCBI NO: 1076685 NR Description: SPF1 protein - sweet potato
  misc_feature (1)..(512): Homolog of NCBI NO: 32454266 NR Description: WRKY transcription factor 33 [Capsella rubella]
  misc_feature (1)..(512): Homolog of NCBI NO: 30687530 NR Description: WRKY family transcription factor [Arabidopsis
  misc_feature (1)..(512): Homolog of NCBI NO: 29839571 NR Description: Probable WRKY transcription factor 33 (WRKY
MDNSRTRQNMNGSANWSQQSGRTSTSSLEDLEIPKFRSFAPSSISISPSLVSPSTCFSPSLFLDSPAFVSSSANVLASPTTGALITNVTNQKGINEGDKSNNNNFNLFDFSFHTQSSGVSAPTTTTTTTTTTTTTNSSIFQSQEQQKKNQSEQWSQTETRPNNQAVSYNGREQRKGEDGYNWRKYGQKQVKGSENPRSYYKCTFPNCPTKKKVERSLEGQITEIVYKGSHNHPKPQSTRRSSSSSSTFHSAVYNASLDHNRQASSDQPNSNNSFHQSDSFGMQQEDNTTSDSVGDDEFEQGSSIVSRDEEDCGSEPEAKRWKGDNETNGGNGGGSKTVREPRIVVQTTSDIDILDDGYRWRKYGQKVVKGNPNPRSYYKCTTIGCPVRKHVERASHDMRAVITTYEGKHNHDVPAARGSGYATNRAPQDSSSVPIRPAAIAGHSNYTTSSQAPYTLQMLHNNNTNTGPFGYAMNNNNNNSNLQTQQNFVGGGFSRAKEEPNEETSFFDSFMP

SEQ ID NO: 38144 - protein, 503 aa, Arabidopsis thaliana
  peptide (1)..(503): Ceres Seq. ID no. 12481871
  misc_feature (345)..(404): Pfam Name: WRKY DNA -binding domain Pfam Description: WRKY DNA -binding domain
  misc_feature (23)..(502): Homolog of NCBI NO: 5917653 NR Description: zinc-finger type transcription factor WRKY1
  misc_feature (23)..(502): Homolog of NCBI NO: 3420906 NR Description: zinc finger protein; WRKY1 [Pimpinella
  misc_feature (23)..(502): Homolog of NCBI NO: 7488948 NR Description: DNA-binding protein WRKY1 - parsley
  misc_feature (33)..(502): Homolog of NCBI NO: 5360683 NR Description: NtWRKY1 [Nicotiana tabacum]
  misc_feature (1)..(502): Homolog of NCBI NO: 14530681 NR Description: WRKY DNA-binding protein [Nicotiana tabacum]
  misc_feature (21)..(502): Homolog of NCBI NO: 34484314 NR Description: WRKY-type transcription factor [Solanum chacoense]
  misc_feature (24)..(502): Homolog of NCBI NO: 1076685 NR Description: SPF1 protein - sweet potato
  misc_feature (1)..(503): Homolog of NCBI NO: 32454266 NR Description: WRKY transcription factor 33 [Capsella rubella]
  misc_feature (1)..(503): Homolog of NCBI NO: 30687530 NR Description: WRKY family transcription factor [Arabidopsis
  misc_feature (1)..(503): Homolog of NCBI NO: 29839571 NR Description: Probable WRKY transcription factor 33 (WRKY
MNGSANWSQQSGRTSTSSLEDLEIPKFRSFAPSSISISPSLVSPSTCFSPSLFLDSPAFVSSSANVLASPTTGALITNVTNQKGINEGDKSNNNNFNLFDFSFHTQSSGVSAPTTTTTTTTTTTTTNSSIFQSQEQQKKNQSEQWSQTETRPNNQAVSYNGREQRKGEDGYNWRKYGQKQVKGSENPRSYYKCTFPNCPTKKKVERSLEGQITEIVYKGSHNHPKPQSTRRSSSSSSTFHSAVYNASLDHNRQASSDQPNSNNSFHQSDSFGMQQEDNTTSDSVGDDEFEQGSSIVSRDEEDCGSEPEAKRWKGDNETNGGNGGGSKTVREPRIVVQTTSDIDILDDGYRWRKYGQKVVKGNPNPRSYYKCTTIGCPVRKHVERASHDMRAVITTYEGKHNHDVPAARGSGYATNRAPQDSSSVPIRPAAIAGHSNYTTSSQAPYTLQMLHNNNTNTGPFGYAMNNNNNNSNLQTQQNFVGGGFSRAKEEPNEETSFFDSFMP

SEQ ID NO: 38145 - DNA, 794 bp, Arabidopsis thaliana
  misc_feature (1)..(794): Ceres Seq. ID no. 12326724
  misc_feature: MA Experiment ID: 108434 Result: Up-regulated in Transcription
  misc_feature: MA Experiment 108434 PARAMETER Experiment Name: At_Root_Tips_cDNA_P Parameter: Tissue Value: Root Tips
  misc_feature: MA Experiment ID: 20000111 Result: Down-regulated in Transcription
  misc_feature: MA Experiment 20000111 PARAMETER Experiment Name: At_42deg_Heat_cDNA_P Parameter: Temperature (deg C) Value: 42 vs. 22
  misc_feature: MA Experiment 20000111 PARAMETER Experiment Name: At_42deg_Heat_cDNA_P Parameter: Timepoint (hr) Value: 6
  misc_feature: MA Experiment 20000111 PARAMETER Experiment Name: At_42deg_Heat_cDNA_P Parameter: Tissue Value: Aerial
  misc_feature: MA Experiment ID: 20000113 Result: Down-regulated in Transcription
  misc_feature: MA Experiment 20000113 PARAMETER Experiment Name: At_42deg_Heat_cDNA_P Parameter: Temperature (deg C) Value: 42 vs. 22
  misc_feature: MA Experiment 20000113 PARAMETER Experiment Name: At_42deg_Heat_cDNA_P Parameter: Timepoint (hr) Value: 8
  misc_feature: MA Experiment 20000113 PARAMETER Experiment Name: At_42deg_Heat_cDNA_P Parameter: Tissue Value: Aerial
  misc_feature: MA Experiment ID: 20000173 Result: Down-regulated in Transcription
  misc_feature: MA Experiment 20000173 PARAMETER Experiment Name: At_42deg_Heat_P Parameter: Age (day) Value: 14
  misc_feature: MA Experiment 20000173 PARAMETER Experiment Name: At_42deg_Heat_P Parameter: Organism Value: A. thaliana
  misc_feature: MA Experiment 20000173 PARAMETER Experiment Name: At_42deg_Heat_P Parameter: Plant Line Value: WS
  misc_feature: MA Experiment 20000173 PARAMETER Experiment Name: At_42deg_Heat_P Parameter: Temperature (deg C) Value: 42 vs. 22
  misc_feature: MA Experiment 20000173 PARAMETER Experiment Name: At_42deg_Heat_P Parameter: Timepoint (hr) Value: 6
  misc_feature: MA Experiment 20000173 PARAMETER Experiment Name: At_42deg_Heat_P Parameter: Tissue Value: Aerial
  misc_feature: MA Experiment ID: 20000184 Result: Down-regulated in Transcription
  misc_feature: MA Experiment 20000184 PARAMETER Experiment Name: At_Shoots__P Parameter: Age (day) Value: 7
  misc_feature: MA Experiment 20000184 PARAMETER Experiment Name: At_Shoots__P Parameter: Tissue Value: Shoots vs. Whole Plant
  misc_feature: MA Experiment ID: 20000234 Result: Up-regulated in Transcription
  misc_feature: MA Experiment 20000234 PARAMETER Experiment Name: At_Siliques_P Parameter: Age (day) Value: 21
  misc_feature: MA Experiment 20000234 PARAMETER Experiment Name: At_Siliques_P Parameter: Organism Value: A. thaliana
  misc_feature: MA Experiment 20000234 PARAMETER Experiment Name: At_Siliques_P Parameter: Plant Line Value: WS
  misc_feature: MA Experiment 20000234 PARAMETER Experiment Name: At_Siliques_P Parameter: Tissue Value: Less Than 5mm Siliques vs. Whole Plant
  misc_feature: MA Experiment ID: 20000265 Result: Up-regulated in Transcription
  misc_feature: MA Experiment 20000265 PARAMETER Experiment Name: At_Open_Flower_P Parameter: Age (day) Value: 21
  misc_feature: MA Experiment 20000265 PARAMETER Experiment Name: At_Open_Flower_P Parameter: Plant Line Value: WS
  misc_feature: MA Experiment 20000265 PARAMETER Experiment Name: At_Open_Flower_P Parameter: Tissue Value: Closed Flower vs. Whole Plant
  misc_feature: MA Experiment ID: 20000495 Result: Up-regulated in Transcription
  misc_feature: MA Experiment 20000495 PARAMETER Experiment Name: At_Guard_Cells_P Parameter: Harvest Date Value: 8/2/2002
  misc_feature: MA Experiment 20000495 PARAMETER Experiment Name: At_Guard_Cells_P Parameter: Organism Value: A. thaliana
  misc_feature: MA Experiment 20000495 PARAMETER Experiment Name: At_Guard_Cells_P Parameter: Tissue Value: Guard Cells vs. Leaves
cccaaattacaaagacgaaggagtaatggcaattacggcgactagattggtctcactgactctcttatggattgtcgtcctcttcgtcacacttgctctcattcagatcaaattgactgatgttgcagatcctagtgtcaatgagaagattcttgatgctaagctcaatcaggtgggagaggatttagaaggagttacacacaaagtttactttgacattcagatcaatggttcaccagcagggcgcattctcatcggcctttttggaaatatagttcctaaaactgcagagaactttcggtcactttgcacgggagagaaaggagttggaaacatggggaaacctctttatttcaaaggaagtagcttccataggatcattcctggcttcatgattcagggtggagattttacacgaggcgatggacgaggtggagagtcgatatatggagataaatttgcagatgagaactttaaactcaaacacactgggccaggatttttatcaatggcaaactcgggaccagactccaacggttcacagttcttcatcacaacagtcaccacgagttggttggacggacatcacgttgtgtttgggaaggtattgtctggcatggaagtagtgcgcaagatcgaagcccagggacaagacagtggagtgcccaaagctaatgttattatttttgctagtggagaagtttctttgtaatatcgtcttcaagttttttcttcatccgaatgaacaagagaccaagattcacaaaaacaaagaaaatcaatcaaattctttg

SEQ ID NO: 38146 - protein, 236 aa, Arabidopsis thaliana
  peptide (1)..(236): Ceres Seq. ID no. 12326725
  misc_feature (68)..(234): Homolog of NCBI NO: 863016 NR Description: cyclophilin
  misc_feature (68)..(234): Homolog of NCBI NO: 17566266 NR Description: CYcloPhilin family CYP-7 (18.4 kD) (cyp-7)
  misc_feature (26)..(234): Homolog of NCBI NO: 5731960 NR Description: cyclophilin B [Dictyostelium discoideum]
  misc_feature (60)..(236): Homolog of NCBI NO: 15237739 NR Description: cyclophilin ROC7
  misc_feature (57)..(236): Homolog of NCBI NO: 21554007 NR Description: cyclophilin [Arabidopsis thaliana]
  misc_feature (57)..(236): Homolog of NCBI NO: 11270326 NR Description: peptidylprolyl isomerase (EC 5.2.1.8) CYP5
  misc_feature (57)..(236): Homolog of NCBI NO: 15227674 NR Description: cyclophilin
  misc_feature (61)..(236): Homolog of NCBI NO: 32351008 NR Description: cyclophilin [Triticum aestivum]
  misc_feature (9)..(236): Homolog of NCBI NO: 11270308 NR Description: peptidylprolyl isomerase (EC 5.2.1.8) F27K19.100
  misc_feature (9)..(236): Homolog of NCBI NO: 18410386 NR Description: cyclophilin-like protein
PNYKDEGVMAITATRLVSLTLLWIVVLFVTLALIQIKLTDVADPSVNEKILDAKLNQVGEDLEGVTHKVYFDIQINGSPAGRILIGLFGNIVPKTAENFRSLCTGEKGVGNMGKPLYFKGSSFHRIIPGFMIQGGDFTRGDGRGGESIYGDKFADENFKLKHTGPGFLSMANSGPDSNGSQFFITTVTTSWLDGHHVVFGKVLSGMEVVRKIEAQGQDSGVPKANVIIFASGEVSL

SEQ ID NO: 38147 - protein, 228 aa, Arabidopsis thaliana
  peptide (1)..(228): Ceres Seq. ID no. 12326726
  misc_feature (60)..(226): Homolog of NCBI NO: 863016 NR Description: cyclophilin
  misc_feature (60)..(226): Homolog of NCBI NO: 17566266 NR Description: CYcloPhilin family CYP-7 (18.4 kD) (cyp-7)
  misc_feature (18)..(226): Homolog of NCBI NO: 5731960 NR Description: cyclophilin B [Dictyostelium discoideum]
  misc_feature (52)..(228): Homolog of NCBI NO: 15237739 NR Description: cyclophilin ROC7
  misc_feature (49)..(228): Homolog of NCBI NO: 21554007 NR Description: cyclophilin [Arabidopsis thaliana]
  misc_feature (49)..(228): Homolog of NCBI NO: 11270326 NR Description: peptidylprolyl isomerase (EC 5.2.1.8) CYP5
  misc_feature (49)..(228): Homolog of NCBI NO: 15227674 NR Description: cyclophilin
  misc_feature (53)..(228): Homolog of NCBI NO: 32351008 NR Description: cyclophilin [Triticum aestivum]
  misc_feature (1)..(228): Homolog of NCBI NO: 11270308 NR Description: peptidylprolyl isomerase (EC 5.2.1.8) F27K19.100
  misc_feature (1)..(228): Homolog of NCBI NO: 18410386 NR Description: cyclophilin-like protein
MAITATRLVSLTLLWIVVLFVTLALIQIKLTDVADPSVNEKILDAKLNQVGEDLEGVTHKVYFDIQINGSPAGRILIGLFGNIVPKTAENFRSLCTGEKGVGNMGKPLYFKGSSFHRIIPGFMIQGGDFTRGDGRGGESIYGDKFADENFKLKHTGPGFLSMANSGPDSNGSQFFITTVTTSWLDGHHVVFGKVLSGMEVVRKIEAQGQDSGVPKANVIIFASGEVSL

SEQ ID NO: 38148 - protein, 125 aa, Arabidopsis thaliana
  peptide (1)..(125): Ceres Seq. ID no. 12326727
  misc_feature (1)..(123): Homolog of NCBI NO: 863016 NR Description: cyclophilin
  misc_feature (1)..(123): Homolog of NCBI NO: 17566266 NR Description: CYcloPhilin family CYP-7 (18.4 kD) (cyp-7)
  misc_feature (1)..(123): Homolog of NCBI NO: 5731960 NR Description: cyclophilin B [Dictyostelium discoideum]
  misc_feature (1)..(125): Homolog of NCBI NO: 15237739 NR Description: cyclophilin ROC7
  misc_feature (1)..(125): Homolog of NCBI NO: 21554007 NR Description: cyclophilin [Arabidopsis thaliana]
  misc_feature (1)..(125): Homolog of NCBI NO: 11270326 NR Description: peptidylprolyl isomerase (EC 5.2.1.8) CYP5
  misc_feature (1)..(125): Homolog of NCBI NO: 15227674 NR Description: cyclophilin
  misc_feature (1)..(125): Homolog of NCBI NO: 32351008 NR Description: cyclophilin [Triticum aestivum]
  misc_feature (1)..(125): Homolog of NCBI NO: 11270308 NR Description: peptidylprolyl isomerase (EC 5.2.1.8) F27K19.100
  misc_feature (1)..(125): Homolog of NCBI NO: 18410386 NR Description: cyclophilin-like protein
MGKPLYFKGSSFHRIIPGFMIQGGDFTRGDGRGGESIYGDKFADENFKLKHTGPGFLSMANSGPDSNGSQFFITTVTTSWLDGHHVVFGKVLSGMEVVRKIEAQGQDSGVPKANVIIFASGEVSL

SEQ ID NO: 38149 - DNA, 900 bp, Arabidopsis thaliana
  misc_feature (1)..(900): Ceres Seq. ID no. 12330525
  misc_feature: MA Experiment ID: 20000224 Result: Down-regulated in Transcription
aaagctaaattagaaacctgacgatctctctctctctctctctctcgatcggataatatttgagctttgtggttggaggatctgagttagtcatgttcatgatcgattggttctatggcgttctcgcttcgttagggttatggcagaaagaggctaagatcttgtttctgggactcgataatgctggtaaaaccactctgcttcacatgttgaaagacgagagattggtacagcatcagcctacgcagcatccaacttctgaagaactcagcattgggaaaatcaagtttaaggcttttgatttgggtggtcaccagattgctcgcagggtctggaaggattactatgctaaggtggacgctgtggtctacctagttgatgcttacgacaaagagagatttgcagaatcaaaaaaggaacttgatgcacttctctcagacgaatccctagccagcgttccattcctcattctaggaaacaagatagacataccgtatgctgcatcagaggacgagctccgttaccatctcggcctctccaacttcactacaggaaagggtaaagtgaatctaacggattcgaacgttaggccattggaggttttcatgtgcagcattgtcaggaaaatgggttacggagaaggtttcaaatgggtttctcaatacatcaagtaagacaaacacacgctgtgttattattaagccgtaagcttgcttctataaatcctgttttttgtatcgtcttgcttcgttttttcctctctttaattgtgttgtaagaaaatgtcttaaaccgtacctagctttttctcgtttgtctgatcctcgactggtttgttcttgtagtgaattttttacacgtttcgtaatttattcaaataagggaagaaaaaaagattag

SEQ ID NO: 38150 - protein, 193 aa, Arabidopsis thaliana
  peptide (1)..(193): Ceres Seq. ID no. 12330526
  misc_feature (5)..(192): Pfam Name: ADP-ribosylation factor family Pfam Description: ADP-ribosylation factor family
  misc_feature (1)..(193): Homolog of NCBI NO: 7438457 NR Description: GTP-binding protein - curled-leaved tobacco
  misc_feature (1)..(193): Homolog of NCBI NO: 1549222 NR Description: NtSar1 protein [Nicotiana tabacum]
  misc_feature (1)..(193): Homolog of NCBI NO: 25294173 NR Description: small GTP-binding protein Sar1BNt [imported] -
  misc_feature (1)..(193): Homolog of NCBI NO: 34902852 NR Description: unnamed protein product [Oryza sativa (japonica
  misc_feature (1)..(192): Homolog of NCBI NO: 15223516 NR Description: GTP-binding protein (SAR1B)
  misc_feature (1)..(192): Homolog of NCBI NO: 25294172 NR Description: ras-like small monomeric GTP-binding protein
  misc_feature (1)..(193): Homolog of NCBI NO: 34894960 NR Description: putative GTP-binding protein
  misc_feature (1)..(192): Homolog of NCBI NO: 15228793 NR Description: Sar1-like GTP binding protein
  misc_feature (1)..(193): Homolog of NCBI NO: 3334321 NR Description: GTP-binding protein SAR1A
  misc_feature (1)..(193): Homolog of NCBI NO: 15235226 NR Description: SAR1/GTP-binding secretory factor
MFMIDWFYGVLASLGLWQKEAKILFLGLDNAGKTTLLHMLKDERLVQHQPTQHPTSEELSIGKIKFKAFDLGGHQIARRVWKDYYAKVDAVVYLVDAYDKERFAESKKELDALLSDESLASVPFLILGNKIDIPYAASEDELRYHLGLSNFTTGKGKVNLTDSNVRPLEVFMCSIVRKMGYGEGFKWVSQYIK

SEQ ID NO: 38151 - protein, 191 aa, Arabidopsis thaliana
  peptide (1)..(191): Ceres Seq. ID no. 12330527
  misc_feature (3)..(190): Pfam Name: ADP-ribosylation factor family Pfam Description: ADP-ribosylation factor family
  misc_feature (1)..(191): Homolog of NCBI NO: 7438457 NR Description: GTP-binding protein - curled-leaved tobacco
  misc_feature (1)..(191): Homolog of NCBI NO: 1549222 NR Description: NtSar1 protein [Nicotiana tabacum]
  misc_feature (1)..(191): Homolog of NCBI NO: 25294173 NR Description: small GTP-binding protein Sar1BNt [imported] -
  misc_feature (1)..(191): Homolog of NCBI NO: 34902852 NR Description: unnamed protein product [Oryza sativa (japonica
  misc_feature (1)..(190): Homolog of NCBI NO: 15223516 NR Description: GTP-binding protein (SAR1B)
  misc_feature (1)..(190): Homolog of NCBI NO: 25294172 NR Description: ras-like small monomeric GTP-binding protein
  misc_feature (1)..(191): Homolog of NCBI NO: 34894960 NR Description: putative GTP-binding protein
  misc_feature (1)..(190): Homolog of NCBI NO: 15228793 NR Description: Sar1-like GTP binding protein
  misc_feature (1)..(191): Homolog of NCBI NO: 3334321 NR Description: GTP-binding protein SAR1A
  misc_feature (1)..(191): Homolog of NCBI NO: 15235226 NR Description: SAR1/GTP-binding secretory factor
MIDWFYGVLASLGLWQKEAKILFLGLDNAGKTTLLHMLKDERLVQHQPTQHPTSEELSIGKIKFKAFDLGGHQIARRVWKDYYAKVDAVVYLVDAYDKERFAESKKELDALLSDESLASVPFLILGNKIDIPYAASEDELRYHLGLSNFTTGKGKVNLTDSNVRPLEVFMCSIVRKMGYGEGFKWVSQYIK

SEQ ID NO: 38152 - protein, 155 aa, Arabidopsis thaliana
  peptide (1)..(155): Ceres Seq. ID no. 12330528
  misc_feature (1)..(154): Pfam Name: ADP-ribosylation factor family Pfam Description: ADP-ribosylation factor family
  misc_feature (1)..(155): Homolog of NCBI NO: 7438457 NR Description: GTP-binding protein - curled-leaved tobacco
  misc_feature (1)..(155): Homolog of NCBI NO: 1549222 NR Description: NtSar1 protein [Nicotiana tabacum]
  misc_feature (1)..(155): Homolog of NCBI NO: 25294173 NR Description: small GTP-binding protein Sar1BNt [imported] -
  misc_feature (1)..(155): Homolog of NCBI NO: 34902852 NR Description: unnamed protein product [Oryza sativa (japonica
  misc_feature (1)..(154): Homolog of NCBI NO: 15223516 NR Description: GTP-binding protein (SAR1B)
  misc_feature (1)..(154): Homolog of NCBI NO: 25294172 NR Description: ras-like small monomeric GTP-binding protein
  misc_feature (1)..(155): Homolog of NCBI NO: 34894960 NR Description: putative GTP-binding protein
  misc_feature (1)..(154): Homolog of NCBI NO: 15228793 NR Description: Sar1-like GTP binding protein
  misc_feature (1)..(155): Homolog of NCBI NO: 3334321 NR Description: GTP-binding protein SAR1A
  misc_feature (1)..(155): Homolog of NCBI NO: 15235226 NR Description: SAR1/GTP-binding secretory factor
MLKDERLVQHQPTQHPTSEELSIGKIKFKAFDLGGHQIARRVWKDYYAKVDAVVYLVDAYDKERFAESKKELDALLSDESLASVPFLILGNKIDIPYAASEDELRYHLGLSNFTTGKGKVNLTDSNVRPLEVFMCSIVRKMGYGEGFKWVSQYIK

SEQ ID NO: 38153 - DNA, 1040 bp, Arabidopsis thaliana
  misc_feature (1)..(1040): Ceres Seq. ID no. 12329774
  misc_feature: MA Experiment ID: 20000794 Result: Down-regulated in Transcription
  misc_feature: MA Experiment 20000794 PARAMETER Experiment Name: At_Petals_P Parameter: Age (day) Value: 23-25 days
  misc_feature: MA Experiment 20000794 PARAMETER Experiment Name: At_Petals_P Parameter: Plant Line Value: WS
  misc_feature: MA Experiment 20000794 PARAMETER Experiment Name: At_Petals_P Parameter: Tissue Value: Petals vs. Whole plant
  misc_feature: MA Experiment ID: 20001560 Result: Up-regulated in Transcription
  misc_feature: MA Experiment 20001560 PARAMETER Experiment Name: At_Drought_Soil_Dry_P Parameter: Age (day) Value: 28
  misc_feature: MA Experiment 20001560 PARAMETER Experiment Name: At_Drought_Soil_Dry_P Parameter: Organism Value: A. thaliana
  misc_feature: MA Experiment 20001560 PARAMETER Experiment Name: At_Drought_Soil_Dry_P Parameter: Plant Line Value: WS
  misc_feature: MA Experiment 20001560 PARAMETER Experiment Name: At_Drought_Soil_Dry_P Parameter: Post Timepoint (hr) Value: None
  misc_feature: MA Experiment 20001560 PARAMETER Experiment Name: At_Drought_Soil_Dry_P Parameter: Post-Treatment Value: None
  misc_feature: MA Experiment 20001560 PARAMETER Experiment Name: At_Drought_Soil_Dry_P Parameter: Timepoint (day) Value: 14
  misc_feature: MA Experiment 20001560 PARAMETER Experiment Name: At_Drought_Soil_Dry_P Parameter: Treatment Value: Drought vs. No Drought
  misc_feature: MA Experiment ID: 20001911 Result: Down-regulated in Transcription
  misc_feature: MA Experiment 20001911 PARAMETER Experiment Name: At_Drought_Reproduction_P Parameter: Age (day) Value: 40
  misc_feature: MA Experiment 20001911 PARAMETER Experiment Name: At_Drought_Reproduction_P Parameter: Organism Value: A. thaliana
  misc_feature: MA Experiment 20001911 PARAMETER Experiment Name: At_Drought_Reproduction_P Parameter: Plant Line Value: WS
  misc_feature: MA Experiment 20001911 PARAMETER Experiment Name: At_Drought_Reproduction_P Parameter: Timepoint (day) Value: 10
  misc_feature: MA Experiment 20001911 PARAMETER Experiment Name: At_Drought_Reproduction_P Parameter: Tissue Value: Flowers
  misc_feature: MA Experiment 20001911 PARAMETER Experiment Name: At_Drought_Reproduction_P Parameter: Treatment Value: Drought vs. No Drought
tttttcgttttcttctccgtttctcgctcatcgcttactgaaaccagaaacaagtttagggtttttgcggaggtttcaaagttaacaatggcggaagagcacaagcacgaggaatcgatcatggagaagatctctgagaagatccatggtcacgatgactcttcttcttcttcttccgattcggatgacgataagaactctgcgtctctcaaaaccaagatttatcgtcttttcggaagagaacagcctcttcacaagcttttcggtggcggaaaacctgccgacattttcctgtggaggaacaagaaagtatcaggaggagtattgggtgctgcaactgtttcctggatcttattcgagttacttgagtacaatcttctcacactcttcggccacatttcaattcttgctctcgcagtattgtttttgtggtctagtgctactaccttcattcacaagtcacctcctcatatccctgaagtttacatccccgaggatgttattcttcagcttgcttctggattaaggattgaaatcaatcgtggattttactgttcttagggacattgcatcaggatagatcttaagaagtttctgttggtgattgctggtttatgggttttgtccaaagttggtagctcctgcaacttcttgaccttaatctacatcgcaactgtacttctcttcacgattcccgtgctttacgagaagtatgaagataaagtagatgactttggtgaaaaggcgatgagggagatgaagaagcaatacgtggagttcgacgtgaaggttttgagtaaggtgatgagcaaaattcctaaaggagccttagcctttatcaagaagaaagattagagagtgtaagtttctctcatcatcattatccgagattattcaagattgatatataaatctcgaagcattgtttttttggctgttggttaataaccctttattctctcaaatatctgctatatggattttattcgggttttaaccaaattttttagcaatattgaatctgattgaaatttgaattc

SEQ ID NO: 38154 - protein, 186 aa, Arabidopsis thaliana
  peptide (1)..(186): Ceres Seq. ID no. 12329775
  misc_feature (30)..(186): Homolog of NCBI NO: 15233147 NR Description: putative protein; protein id: At3g61560.1
  misc_feature (37)..(186): Homolog of NCBI NO: 15234108 NR Description: hypothetical protein; protein id: At4g01230.1
  misc_feature (38)..(65): Homolog of NCBI NO: 34904202 NR Description: P0492F05.25 [Oryza sativa (japonica
  misc_feature (67)..(186): Homolog of NCBI NO: 34904202 NR Description: P0492F05.25 [Oryza sativa (japonica
  misc_feature (30)..(186): Homolog of NCBI NO: 18406991 NR Description: expressed protein
  misc_feature (31)..(186): Homolog of NCBI NO: 15236556 NR Description: putative protein
  misc_feature (28)..(186): Homolog of NCBI NO: 15237093 NR Description: putative protein
  misc_feature (33)..(186): Homolog of NCBI NO: 34909318 NR Description: OSJNBb0021A09.5 [Oryza sativa (japonica
  misc_feature (30)..(186): Homolog of NCBI NO: 15238125 NR Description: putative protein
  misc_feature (30)..(186): Homolog of NCBI NO: 15222616 NR Description: hypothetical protein
FFVFFSVSRSSLTETRNKFRVFAEVSKLTMAEEHKHEESIMEKISEKIHGHDDSSSSSSDSDDDKNSASLKTKIYRLFGREQPLHKLFGGGKPADIFLWRNKKVSGGVLGAATVSWILFELLEYNLLTLFGHISILALAVLFLWSSATTFIHKSPPHIPEVYIPEDVILQLASGLRIEINRGFYCS

SEQ ID NO: 38155 - protein, 157 aa, Arabidopsis thaliana
  peptide (1)..(157): Ceres Seq. ID no. 12329776
  misc_feature (1)..(157): Homolog of NCBI NO: 15233147 NR Description: putative protein; protein id: At3g61560.1
  misc_feature (8)..(157): Homolog of NCBI NO: 15234108 NR Description: hypothetical protein; protein id: At4g01230.1
  misc_feature (9)..(36): Homolog of NCBI NO: 34904202 NR Description: P0492F05.25 [Oryza sativa (japonica
  misc_feature (38)..(157): Homolog of NCBI NO: 34904202 NR Description: P0492F05.25 [Oryza sativa (japonica
  misc_feature (1)..(157): Homolog of NCBI NO: 18406991 NR Description: expressed protein
  misc_feature (2)..(157): Homolog of NCBI NO: 15236556 NR Description: putative protein
  misc_feature (1)..(157): Homolog of NCBI NO: 15237093 NR Description: putative protein
  misc_feature (4)..(157): Homolog of NCBI NO: 34909318 NR Description: OSJNBb0021A09.5 [Oryza sativa (japonica
  misc_feature (1)..(157): Homolog of NCBI NO: 15238125 NR Description: putative protein
  misc_feature (1)..(157): Homolog of NCBI NO: 15222616 NR Description: hypothetical protein
MAEEHKHEESIMEKISEKIHGHDDSSSSSSDSDDDKNSASLKTKIYRLFGREQPLHKLFGGGKPADIFLWRNKKVSGGVLGAATVSWILFELLEYNLLTLFGHISILALAVLFLWSSATTFIHKSPPHIPEVYIPEDVILQLASGLRIEINRGFYCS

SEQ ID NO: 38156 - protein, 146 aa, Arabidopsis thaliana
  peptide (1)..(146): Ceres Seq. ID no. 12329777
  misc_feature (1)..(146): Homolog of NCBI NO: 15233147 NR Description: putative protein; protein id: At3g61560.1
  misc_feature (1)..(146): Homolog of NCBI NO: 15234108 NR Description: hypothetical protein; protein id: At4g01230.1
  misc_feature (1)..(25): Homolog of NCBI NO: 34904202 NR Description: P0492F05.25 [Oryza sativa (japonica
  misc_feature (27)..(146): Homolog of NCBI NO: 34904202 NR Description: P0492F05.25 [Oryza sativa (japonica
  misc_feature (1)..(146): Homolog of NCBI NO: 18406991 NR Description: expressed protein
  misc_feature (1)..(146): Homolog of NCBI NO: 15236556 NR Description: putative protein
  misc_feature (1)..(146): Homolog of NCBI NO: 15237093 NR Description: putative protein
  misc_feature (1)..(146): Homolog of NCBI NO: 34909318 NR Description: OSJNBb0021A09.5 [Oryza sativa (japonica
  misc_feature (1)..(146): Homolog of NCBI NO: 15238125 NR Description: putative protein
  misc_feature (1)..(146): Homolog of NCBI NO: 15222616 NR Description: hypothetical protein
MEKISEKIHGHDDSSSSSSDSDDDKNSASLKTKIYRLFGREQPLHKLFGGGKPADIFLWRNKKVSGGVLGAATVSWILFELLEYNLLTLFGHISILALAVLFLWSSATTFIHKSPPHIPEVYIPEDVILQLASGLRIEINRGFYCS

SEQ ID NO: 38157 - DNA, 1013 bp, Arabidopsis thaliana
  misc_feature (1)..(1013): Ceres Seq. ID no. 13575559
  misc_feature: MA Experiment ID: 20000328 Result: Down-regulated in Transcription
  misc_feature: MA Experiment 20000328 PARAMETER Experiment Name: At_42deg_Heat_Sub_P Parameter: Age (day) Value: 14
  misc_feature: MA Experiment 20000328 PARAMETER Experiment Name: At_42deg_Heat_Sub_P Parameter: Organism Value: A. thaliana
  misc_feature: MA Experiment 20000328 PARAMETER Experiment Name: At_42deg_Heat_Sub_P Parameter: Plant Line Value: WS
  misc_feature: MA Experiment 20000328 PARAMETER Experiment Name: At_42deg_Heat_Sub_P Parameter: Temperature (deg C) Value: 42 vs. 22
  misc_feature: MA Experiment 20000328 PARAMETER Experiment Name: At_42deg_Heat_Sub_P Parameter: Timepoint (hr) Value: 6
  misc_feature: MA Experiment 20000328 PARAMETER Experiment Name: At_42deg_Heat_Sub_P Parameter: Tissue Value: Aerial
atgagaatctatttttccatatgctctccacactcccaccaaacaaatcccaagaatcaacaaaagaaaaaacattcaccttctcttacgcgactctcgccggaaacagatcgctccgccgtgaactcggaagccatggggtcacttttgcagggttttactaaatcactcgccatgactttcctctccgagattggtgacaaaacgttcttcgctgctgctattttggcgatgcggtatcctaggaggcttgtattagctggttgtttatcagctttgattgtcatgactatattatctgctacacttggttgggctgctccaaatctgatctctcggaaatggactcatcatataacaacattcttgttctttggctttgggttatggtctttgtgggatggttttaaagaaggaggaggttctgaagaattggcagaagttgaagcagaactggattctgatttgaagaagactaatgatcaatcgaaaaacagtaagattgaagatgaacagaaaaagcagaaaagaccattccttactgcattcttctctcccatttttctcaaggcgttttcgattaacttctttggtgaatggggtgacaagagtcagcttgcgaccattggtttggctgcagatgaaaatccactcggcgtggtccttggcggaattgtggcacaaacattgtgtaccacagctgctgtgcttggtggcaagagcttagcatctcaaatatccgaacgaattgtggctctttccggtggaatgcttttcattatcttcggcattcagtcgcttcttactccggttgatgcttgatacatctatatggtatcccatcaatgtcttgaaactgcaggtttcttgggtttgaatgcttttttgggcgagatgaaaccgaaacacgtcactcccttacaattgcttagatacatttacattagtgattacagaatcagaaagattcatctgtaacaccatttgacttcaataaagttttgtttatttgc

SEQ ID NO: 38158 - protein, 273 aa, Arabidopsis thaliana
  peptide (1)..(273): Ceres Seq. ID no. 13575560
  misc_feature (53)..(128): Pfam Name: Uncharacterized protein family UPF0016 Pfam Description: Uncharacterized protein family UPF0016
  misc_feature (42)..(273): Homolog of NCBI NO: 20385488 NR Description: transmembrane protein HTP-1 [Danio rerio]
  misc_feature (211)..(270): Homolog of NCBI NO: 34877387 NR Description: similar to probable transmembrane protein FT27 -
  misc_feature (30)..(215): Homolog of NCBI NO: 34877387 NR Description: similar to probable transmembrane protein FT27 -
  misc_feature (48)..(270): Homolog of NCBI NO: 18421551 NR Description: transmembrane protein FT27/PFT27-related
  misc_feature (29)..(270): Homolog of NCBI NO: 7684611 NR Description: TPARDL [Mus musculus]
  misc_feature (6)..(270): Homolog of NCBI NO: 6755853 NR Description: TPA regulated locus [Mus musculus]
  misc_feature (14)..(272): Homolog of NCBI NO: 21357589 NR Description: CG4196-PC [Drosophila melanogaster]
  misc_feature (46)..(273): Homolog of NCBI NO: 21593636 NR Description: transmembrane protein, putative [Arabidopsis
  misc_feature (46)..(273): Homolog of NCBI NO: 15222613 NR Description: transmembrane protein -related [Arabidopsis
  misc_feature (46)..(273): Homolog of NCBI NO: 15221462 NR Description: transmembrane protein -related [Arabidopsis
MRIYFSICSPHSHQTNPKNQQKKKHSPSLTRLSPETDRSAVNSEAMGSLLQGFTKSLAMTFLSEIGDKTFFAAAILAMRYPRRLVLAGCLSALIVMTILSATLGWAAPNLISRKWTHHITTFLFFGFGLWSLWDGFKEGGGSEELAEVEAELDSDLKKTNDQSKNSKIEDEQKKQKRPFLTAFFSPIFLKAFSINFFGEWGDKSQLATIGLAADENPLGVVLGGIVAQTLCTTAAVLGGKSLASQISERIVALSGGMLFIIFGIQSLLTPVDA

SEQ ID NO: 38159 - protein, 228 aa, Arabidopsis thaliana
  peptide (1)..(228): Ceres Seq. ID no. 13575561
  misc_feature (8)..(83): Pfam Name: Uncharacterized protein family UPF0016 Pfam Description: Uncharacterized protein family UPF0016
  misc_feature (1)..(228): Homolog of NCBI NO: 20385488 NR Description: transmembrane protein HTP-1 [Danio rerio]
  misc_feature (166)..(225): Homolog of NCBI NO: 34877387 NR Description: similar to probable transmembrane protein FT27 -
  misc_feature (1)..(170): Homolog of NCBI NO: 34877387 NR Description: similar to probable transmembrane protein FT27 -
  misc_feature (3)..(225): Homolog of NCBI NO: 18421551 NR Description: transmembrane protein FT27/PFT27-related
  misc_feature (1)..(225): Homolog of NCBI NO: 7684611 NR Description: TPARDL [Mus musculus]
  misc_feature (1)..(225): Homolog of NCBI NO: 6755853 NR Description: TPA regulated locus [Mus musculus]
  misc_feature (1)..(227): Homolog of NCBI NO: 21357589 NR Description: CG4196-PC [Drosophila melanogaster]
  misc_feature (1)..(228): Homolog of NCBI NO: 21593636 NR Description: transmembrane protein, putative [Arabidopsis
  misc_feature (1)..(228): Homolog of NCBI NO: 15222613 NR Description: transmembrane protein -related [Arabidopsis
  misc_feature (1)..(228): Homolog of NCBI NO: 15221462 NR Description: transmembrane protein -related [Arabidopsis
MGSLLQGFTKSLAMTFLSEIGDKTFFAAAILAMRYPRRLVLAGCLSALIVMTILSATLGWAAPNLISRKWTHHITTFLFFGFGLWSLWDGFKEGGGSEELAEVEAELDSDLKKTNDQSKNSKIEDEQKKQKRPFLTAFFSPIFLKAFSINFFGEWGDKSQLATIGLAADENPLGVVLGGIVAQTLCTTAAVLGGKSLASQISERIVALSGGMLFIIFGIQSLLTPVDA

SEQ ID NO: 38160 - protein, 215 aa, Arabidopsis thaliana
  peptide (1)..(215): Ceres Seq. ID no. 13575562
  misc_feature (1)..(70): Pfam Name: Uncharacterized protein family UPF0016 Pfam Description: Uncharacterized protein family UPF0016
  misc_feature (1)..(215): Homolog of NCBI NO: 20385488 NR Description: transmembrane protein HTP-1 [Danio rerio]
  misc_feature (153)..(212): Homolog of NCBI NO: 34877387 NR Description: similar to probable transmembrane protein FT27 -
  misc_feature (1)..(157): Homolog of NCBI NO: 34877387 NR Description: similar to probable transmembrane protein FT27 -
  misc_feature (1)..(212): Homolog of NCBI NO: 18421551 NR Description: transmembrane protein FT27/PFT27-related
  misc_feature (1)..(212): Homolog of NCBI NO: 7684611 NR Description: TPARDL [Mus musculus]
  misc_feature (1)..(212): Homolog of NCBI NO: 6755853 NR Description: TPA regulated locus [Mus musculus]
  misc_feature (1)..(214): Homolog of NCBI NO: 21357589 NR Description: CG4196-PC [Drosophila melanogaster]
  misc_feature (1)..(215): Homolog of NCBI NO: 21593636 NR Description: transmembrane protein, putative [Arabidopsis
  misc_feature (1)..(215): Homolog of NCBI NO: 15222613 NR Description: transmembrane protein -related [Arabidopsis
  misc_feature (1)..(215): Homolog of NCBI NO: 15221462 NR Description: transmembrane protein -related [Arabidopsis
MTFLSEIGDKTFFAAAILAMRYPRRLVLAGCLSALIVMTILSATLGWAAPNLISRKWTHHITTFLFFGFGLWSLWDGFKEGGGSEELAEVEAELDSDLKKTNDQSKNSKIEDEQKKQKRPFLTAFFSPIFLKAFSINFFGEWGDKSQLATIGLAADENPLGVVLGGIVAQTLCTTAAVLGGKSLASQISERIVALSGGMLFIIFGIQSLLTPVDA

SEQ ID NO: 38161 - DNA, 786 bp, Arabidopsis thaliana
  misc_feature (1)..(786): Ceres Seq. ID no. 12561786
  misc_feature: MA Experiment ID: 108434 Result: Up-regulated in Transcription
  misc_feature: MA Experiment 108434 PARAMETER Experiment Name: At_Root_Tips_cDNA_P Parameter: Tissue Value: Root Tips
  misc_feature: MA Experiment ID: 108462 Result: Down-regulated in Transcription
  misc_feature: MA Experiment 108462 PARAMETER Experiment Name: At_Germinating_Seeds_cDNA_P Parameter: Age (day) Value: 2 vs. 0
  misc_feature: MA Experiment 108462 PARAMETER Experiment Name: At_Germinating_Seeds_cDNA_P Parameter: Tissue Value: Germinating Seeds
  misc_feature: MA Experiment ID: 108463 Result: Down-regulated in Transcription
  misc_feature: MA Experiment 108463 PARAMETER Experiment Name: At_Germinating_Seeds_cDNA_P Parameter: Age (day) Value: 3 vs. 0
  misc_feature: MA Experiment 108463 PARAMETER Experiment Name: At_Germinating_Seeds_cDNA_P Parameter: Tissue Value: Germinating Seeds
  misc_feature: MA Experiment ID: 108464 Result: Down-regulated in Transcription
  misc_feature: MA Experiment 108464 PARAMETER Experiment Name: At_Germinating_Seeds_cDNA_P Parameter: Age (day) Value: 4 vs. 0
  misc_feature: MA Experiment 108464 PARAMETER Experiment Name: At_Germinating_Seeds_cDNA_P Parameter: Tissue Value: Germinating Seeds
  misc_feature: MA Experiment ID: 108569 Result: Down-regulated in Transcription
  misc_feature: MA Experiment 108569 PARAMETER Experiment Name: At_0.001%_MeJA__cDNA_P Parameter: Timepoint (hr) Value: 6
  misc_feature: MA Experiment 108569 PARAMETER Experiment Name: At_0.001%_MeJA__cDNA_P Parameter: Tissue Value: Aerial
  misc_feature: MA Experiment 108569 PARAMETER Experiment Name: At_0.001%_MeJA__cDNA_P Parameter: Treatment Value: 0.001% MeJA vs. No Treatment
  misc_feature: MA Experiment ID: 108573 Result: Down-regulated in Transcription
  misc_feature: MA Experiment 108573 PARAMETER Experiment Name: At_Drought_cDNA_P Parameter: Timepoint (hr) Value: 6
  misc_feature: MA Experiment 108573 PARAMETER Experiment Name: At_Drought_cDNA_P Parameter: Tissue Value: Aerial
  misc_feature: MA Experiment 108573 PARAMETER Experiment Name: At_Drought_cDNA_P Parameter: Treatment Value: Drought vs. No Drought
  misc_feature: MA Experiment ID: 20001558 Result: Up-regulated in Transcription
  misc_feature: MA Experiment 20001558 PARAMETER Experiment Name: At_Drought_Soil_Dry_P Parameter: Age (day) Value: 27
  misc_feature: MA Experiment 20001558 PARAMETER Experiment Name: At_Drought_Soil_Dry_P Parameter: Organism Value: A. thaliana
  misc_feature: MA Experiment 20001558 PARAMETER Experiment Name: At_Drought_Soil_Dry_P Parameter: Plant Line Value: WS
  misc_feature: MA Experiment 20001558 PARAMETER Experiment Name: At_Drought_Soil_Dry_P Parameter: Post Timepoint (hr) Value: 6
  misc_feature: MA Experiment 20001558 PARAMETER Experiment Name: At_Drought_Soil_Dry_P Parameter: Post-Treatment Value: Re-Water vs. No Drought
  misc_feature: MA Experiment 20001558 PARAMETER Experiment Name: At_Drought_Soil_Dry_P Parameter: Timepoint (day) Value: 13
  misc_feature: MA Experiment 20001558 PARAMETER Experiment Name: At_Drought_Soil_Dry_P Parameter: Treatment Value: Drought vs. No Drought
  misc_feature: MA Experiment ID: 20001757 Result: Up-regulated in Transcription
  misc_feature: MA Experiment 20001757 PARAMETER Experiment Name: At_50mM_NH4NO3_L-to-H_P Parameter: Timepoint (hr) Value: 6
  misc_feature: MA Experiment 20001757 PARAMETER Experiment Name: At_50mM_NH4NO3_L-to-H_P Parameter: Tissue Value: Leaf
  misc_feature: MA Experiment 20001757 PARAMETER Experiment Name: At_50mM_NH4NO3_L-to-H_P Parameter: Treatment Value: 50mM NH4NO3 vs 100mM Mannitol
gtgaagtctcttatatataagtatcgagagaattagggttttctagtctagtgtttccgggagcagcctgagcaggaggaagaagacgaagaagaagaggagcagctactaccatggttctcaagacggagctttgtcgtttcagtggacagaagatttacccaggaagaggaattaggtttatccgatctgattctcaggttttcttgtttcttaactcaaaatgtaagaggtacttccataacaagttgaagccatccaagcttgcatggactgccatgtacagaaagcaacacaagaaggatgcagcacaagaggctgtgaagagaaggagacgtgccaccaagaagccatactcaaggtccattgttggtgctaccttggaagtaattcagaagaagagagctgagaagcctgaagttcgtgatgcagccagggaagctgctctgcgtgagatcaaggaaagaatcaaaaagaccaaagatgaaaagaaggctaagaaggtggaatttgcttctaagcaacagaaggtcaaggctaatttccccaaagctgctgctgcatccaagggtcctaaggtgggaggtggtggtggcaaacgctgaagagcttaaagccatcttttctcactctgcgtcttttctgctagtagctacttttagtagttgatgttcatttctgaatatttgcaaaacataaaccttgttatttcgtttttgtctctcacttttgctactcttataatatcagacttgagaattttgctgcttatgaactttatttcac

SEQ ID NO: 38162 - protein, 163 aa, Arabidopsis thaliana
  peptide (1)..(163): Ceres Seq. ID no. 12561787
  misc_feature (7)..(158): Homolog of NCBI NO: 31236377 NR Description: ENSANGP00000012247 [Anopheles gambiae]
  misc_feature (1)..(158): Homolog of NCBI NO: 28174943 NR Description: Similar to ribosomal protein L24 [Mus musculus]
  misc_feature (3)..(158): Homolog of NCBI NO: 40642996 NR Description: ribosomal protein L24 [Crassostrea gigas]
  misc_feature (4)..(163): Homolog of NCBI NO: 34900364 NR Description: putative 60S ribosomal protein L24
  misc_feature (1)..(158): Homolog of NCBI NO: 10180025 NR Description: 60S ribosomal protein L24 [Prunus avium]
  misc_feature (1)..(163): Homolog of NCBI NO: 1710521 NR Description: 60S RIBOSOMAL PROTEIN L24
  misc_feature (1)..(162): Homolog of NCBI NO: 6094040 NR Description: 60S ribosomal protein L24
  misc_feature (5)..(163): Homolog of NCBI NO: 25295112 NR Description: 60S ribosomal protein L24 [imported] -
  misc_feature (1)..(163): Homolog of NCBI NO: 18404176 NR Description: 60S ribosomal protein L24
  misc_feature (1)..(163): Homolog of NCBI NO: 15231730 NR Description: 60S ribosomal protein - like
MVLKTELCRFSGQKIYPGRGIRFIRSDSQVFLFLNSKCKRYFHNKLKPSKLAWTAMYRKQHKKDAAQEAVKRRRRATKKPYSRSIVGATLEVIQKKRAEKPEVRDAAREAALREIKERIKKTKDEKKAKKVEFASKQQKVKANFPKAAAASKGPKVGGGGGKR

SEQ ID NO: 38163 - protein, 108 aa, Arabidopsis thaliana
  peptide (1)..(108): Ceres Seq. ID no. 12561788
  misc_feature (1)..(103): Homolog of NCBI NO: 31236377 NR Description: ENSANGP00000012247 [Anopheles gambiae]
  misc_feature (1)..(103): Homolog of NCBI NO: 28174943 NR Description: Similar to ribosomal protein L24 [Mus musculus]
  misc_feature (1)..(103): Homolog of NCBI NO: 40642996 NR Description: ribosomal protein L24 [Crassostrea gigas]
  misc_feature (1)..(108): Homolog of NCBI NO: 34900364 NR Description: putative 60S ribosomal protein L24
  misc_feature (1)..(103): Homolog of NCBI NO: 10180025 NR Description: 60S ribosomal protein L24 [Prunus avium]
  misc_feature (1)..(108): Homolog of NCBI NO: 1710521 NR Description: 60S RIBOSOMAL PROTEIN L24
  misc_feature (1)..(107): Homolog of NCBI NO: 6094040 NR Description: 60S ribosomal protein L24
  misc_feature (1)..(108): Homolog of NCBI NO: 25295112 NR Description: 60S ribosomal protein L24 [imported] -
  misc_feature (1)..(108): Homolog of NCBI NO: 18404176 NR Description: 60S ribosomal protein L24
  misc_feature (1)..(108): Homolog of NCBI NO: 15231730 NR Description: 60S ribosomal protein - like
MYRKQHKKDAAQEAVKRRRRATKKPYSRSIVGATLEVIQKKRAEKPEVRDAAREAALREIKERIKKTKDEKKAKKVEFASKQQKVKANFPKAAAASKGPKVGGGGGKR

SEQ ID NO: 38164 - DNA, 1729 bp, Arabidopsis thaliana
  misc_feature (1)..(1729): Ceres Seq. ID no. 12371173
  misc_feature: MA Experiment ID: 108462 Result: Down-regulated in Transcription
  misc_feature: MA Experiment 108462 PARAMETER Experiment Name: At_Germinating_Seeds_cDNA_P Parameter: Age (day) Value: 2 vs. 0
  misc_feature: MA Experiment 108462 PARAMETER Experiment Name: At_Germinating_Seeds_cDNA_P Parameter: Tissue Value: Germinating Seeds
  misc_feature: MA Experiment ID: 108569 Result: Down-regulated in Transcription
  misc_feature: MA Experiment 108569 PARAMETER Experiment Name: At_0.001%_MeJA__cDNA_P Parameter: Timepoint (hr) Value: 6
  misc_feature: MA Experiment 108569 PARAMETER Experiment Name: At_0.001%_MeJA__cDNA_P Parameter: Tissue Value: Aerial
  misc_feature: MA Experiment 108569 PARAMETER Experiment Name: At_0.001%_MeJA__cDNA_P Parameter: Treatment Value: 0.001% MeJA vs. No Treatment
  misc_feature: MA Experiment ID: 108573 Result: Down-regulated in Transcription
  misc_feature: MA Experiment 108573 PARAMETER Experiment Name: At_Drought_cDNA_P Parameter: Timepoint (hr) Value: 6
  misc_feature: MA Experiment 108573 PARAMETER Experiment Name: At_Drought_cDNA_P Parameter: Tissue Value: Aerial
  misc_feature: MA Experiment 108573 PARAMETER Experiment Name: At_Drought_cDNA_P Parameter: Treatment Value: Drought vs. No Drought
  misc_feature: MA Experiment ID: 20001760 Result: Up-regulated in Transcription
  misc_feature: MA Experiment 20001760 PARAMETER Experiment Name: At_50mM_NH4NO3_L-to-H_P Parameter: Timepoint (hr) Value: 2
  misc_feature: MA Experiment 20001760 PARAMETER Experiment Name: At_50mM_NH4NO3_L-to-H_P Parameter: Tissue Value: Siliques
  misc_feature: MA Experiment 20001760 PARAMETER Experiment Name: At_50mM_NH4NO3_L-to-H_P Parameter: Treatment Value: 50mM NH4NO3 vs 100mM Mannitol
aacaacaccaaaagaaaagggaaaaaaaaaacagaggaactaataaacggaccatgagctccacagagacatacgagccgttattgacacgactccactcggattctcagataactgaacggtcttcgccagagatagaggagtttctccgccgtcgtggatccacagtgacaccacggtggtggctaaagctggcagtgtgggagtcaaagcttctatggacactctctggagcctctatagtggtctctgttctgaattacatgctcagcttcgtcaccgtcatgttcaccggtcatctcggttctcttcagctcgccggcgcttccatcgccaccgtcggaatccaaggcctagcttacggtatcatgttaggaatggcgagcgcggtccaaacagtgtgtggtcaagcgtacggagcgagacagtactcatcaatgggaataatctgccaacgagccatggtcttgcaccttgcagctgcagtcttcctcacgttcctctactggtactcgggtccaatccttaaaacaatgggccaatccgtagccatagcacacgagggtcagatctttgcacgtggaatgattccacaaatttacgcatttgccctcgcttgcccgatgcagaggtttcttcaggctcagaacatagtgaaccctttggcttacatgtccttaggagttttcttgctccacacgttactcacgtggctggttaccaacgtgctggatttcggcttgcttggggcggctctgattctcagtttctcatggtggctgctagtagctgtgaatggtatgtatatcttgatgagcccgaattgtaaggagacatggacagggttttcaacgagggcatttagagggatatggccttacttcaagctcacggtagcttcagcagttatgctatgtttggagatatggtacaaccaagggctagtgattatctctggtttactctccaatccgacaatttctctagacgctatttcgatttgcatgtattacttgaattgggatatgcagttcatgcttggtctaagtgcagcaatcagtgtgcgagtgagcaatgagctaggagcgggaaatccacgagtggctatgttatcagtagtggttgtcaacatcacgactgttctcatcagctcagttctctgtgtcatcgtgcttgtgttccgcgttggccttagcaaagccttcaccagcgatgcagaagttatagcagccgtctctgacctctttcctcttctcgccgtttccattttcttaaacggaatccagccaattctctctggggttgctattgggagtgggtggcaagcagtggtggcttatgtgaatcttgttacgtactatgtcattggtcttcctattggctgtgtccttggcttcaaaaccagtcttggagttgctgggatctggtgggggatgattgcaggagtcatacttcaaaccctaactttgattgttcttacacttaaaactaattggacttccgaggtagaaaatgcagctcagagagtaaagacttcggcaactgagaatcaagagatggctaacgcaggtgtttaagataacagcaacagtgactctgttttttttcccctcttttggtgaaaagagatataagatgaaataagtaaccttttgattcttatgaagttatttgaggattcgttaactacagagaaaaataatggacgacctacttagttctcttctgc

SEQ ID NO: 38165 - protein, 524 aa, Arabidopsis thaliana
  peptide (1)..(524): Ceres Seq. ID no. 12371174
  misc_feature (53)..(518): Homolog of NCBI NO: 15220246 NR Description: unknown protein
  misc_feature (68)..(509): Homolog of NCBI NO: 22655139 NR Description: unknown protein [Arabidopsis thaliana]
  misc_feature (68)..(509): Homolog of NCBI NO: 15221073 NR Description: unknown protein; protein id: At1g11670.1
  misc_feature (14)..(521): Homolog of NCBI NO: 21553843 NR Description: unknown [Arabidopsis thaliana]
  misc_feature (14)..(521): Homolog of NCBI NO: 18415793 NR Description: putative protein; protein id: At4g21910.1
  misc_feature (45)..(509): Homolog of NCBI NO: 18407368 NR Description: expressed protein
  misc_feature (45)..(509): Homolog of NCBI NO: 15081773 NR Description: At1g61890/F8K4_9 [Arabidopsis thaliana]
  misc_feature (24)..(519): Homolog of NCBI NO: 20466556 NR Description: integral membrane protein, putative [Arabidopsis
  misc_feature (24)..(519): Homolog of NCBI NO: 15233127 NR Description: integral membrane protein, putative
  misc_feature (18)..(524): Homolog of NCBI NO: 15231620 NR Description: MATE efflux family protein, putative
QHQKKREKKNRGTNKRTMSSTETYEPLLTRLHSDSQITERSSPEIEEFLRRRGSTVTPRWWLKLAVWESKLLWTLSGASIVVSVLNYMLSFVTVMFTGHLGSLQLAGASIATVGIQGLAYGIMLGMASAVQTVCGQAYGARQYSSMGIICQRAMVLHLAAAVFLTFLYWYSGPILKTMGQSVAIAHEGQIFARGMIPQIYAFALACPMQRFLQAQNIVNPLAYMSLGVFLLHTLLTWLVTNVLDFGLLGAALILSFSWWLLVAVNGMYILMSPNCKETWTGFSTRAFRGIWPYFKLTVASAVMLCLEIWYNQGLVIISGLLSNPTISLDAISICMYYLNWDMQFMLGLSAAISVRVSNELGAGNPRVAMLSVVVVNITTVLISSVLCVIVLVFRVGLSKAFTSDAEVIAAVSDLFPLLAVSIFLNGIQPILSGVAIGSGWQAVVAYVNLVTYYVIGLPIGCVLGFKTSLGVAGIWWGMIAGVILQTLTLIVLTLKTNWTSEVENAAQRVKTSATENQEMANAGV

SEQ ID NO: 38166 - protein, 507 aa, Arabidopsis thaliana
  peptide (1)..(507): Ceres Seq. ID no. 12371175
  misc_feature (36)..(501): Homolog of NCBI NO: 15220246 NR Description: unknown protein
  misc_feature (51)..(492): Homolog of NCBI NO: 22655139 NR Description: unknown protein [Arabidopsis thaliana]
  misc_feature (51)..(492): Homolog of NCBI NO: 15221073 NR Description: unknown protein; protein id: At1g11670.1
  misc_feature (1)..(504): Homolog of NCBI NO: 21553843 NR Description: unknown [Arabidopsis thaliana]
  misc_feature (1)..(504): Homolog of NCBI NO: 18415793 NR Description: putative protein; protein id: At4g21910.1
  misc_feature (28)..(492): Homolog of NCBI NO: 18407368 NR Description: expressed protein
  misc_feature (28)..(492): Homolog of NCBI NO: 15081773 NR Description: At1g61890/F8K4_9 [Arabidopsis thaliana]
  misc_feature (7)..(502): Homolog of NCBI NO: 20466556 NR Description: integral membrane protein, putative [Arabidopsis
  misc_feature (7)..(502): Homolog of NCBI NO: 15233127 NR Description: integral membrane protein, putative
  misc_feature (1)..(507): Homolog of NCBI NO: 15231620 NR Description: MATE efflux family protein, putative
MSSTETYEPLLTRLHSDSQITERSSPEIEEFLRRRGSTVTPRWWLKLAVWESKLLWTLSGASIVVSVLNYMLSFVTVMFTGHLGSLQLAGASIATVGIQGLAYGIMLGMASAVQTVCGQAYGARQYSSMGIICQRAMVLHLAAAVFLTFLYWYSGPILKTMGQSVAIAHEGQIFARGMIPQIYAFALACPMQRFLQAQNIVNPLAYMSLGVFLLHTLLTWLVTNVLDFGLLGAALILSFSWWLLVAVNGMYILMSPNCKETWTGFSTRAFRGIWPYFKLTVASAVMLCLEIWYNQGLVIISGLLSNPTISLDAISICMYYLNWDMQFMLGLSAAISVRVSNELGAGNPRVAMLSVVVVNITTVLISSVLCVIVLVFRVGLSKAFTSDAEVIAAVSDLFPLLAVSIFLNGIQPILSGVAIGSGWQAVVAYVNLVTYYVIGLPIGCVLGFKTSLGVAGIWWGMIAGVILQTLTLIVLTLKTNWTSEVENAAQRVKTSATENQEMANAGV

SEQ ID NO: 38167 - protein, 437 aa, Arabidopsis thaliana
  peptide (1)..(437): Ceres Seq. ID no. 12371176
  misc_feature (1)..(431): Homolog of NCBI NO: 15220246 NR Description: unknown protein
  misc_feature (1)..(422): Homolog of NCBI NO: 22655139 NR Description: unknown protein [Arabidopsis thaliana]
  misc_feature (1)..(422): Homolog of NCBI NO: 15221073 NR Description: unknown protein; protein id: At1g11670.1
  misc_feature (1)..(434): Homolog of NCBI NO: 21553843 NR Description: unknown [Arabidopsis thaliana]
  misc_feature (1)..(434): Homolog of NCBI NO: 18415793 NR Description: putative protein; protein id: At4g21910.1
  misc_feature (1)..(422): Homolog of NCBI NO: 18407368 NR Description: expressed protein
  misc_feature (1)..(422): Homolog of NCBI NO: 15081773 NR Description: At1g61890/F8K4_9 [Arabidopsis thaliana]
  misc_feature (1)..(432): Homolog of NCBI NO: 20466556 NR Description: integral membrane protein, putative [Arabidopsis
  misc_feature (1)..(432): Homolog of NCBI NO: 15233127 NR Description: integral membrane protein, putative
  misc_feature (1)..(437): Homolog of NCBI NO: 15231620 NR Description: MATE efflux family protein, putative
MLSFVTVMFTGHLGSLQLAGASIATVGIQGLAYGIMLGMASAVQTVCGQAYGARQYSSMGIICQRAMVLHLAAAVFLTFLYWYSGPILKTMGQSVAIAHEGQIFARGMIPQIYAFALACPMQRFLQAQNIVNPLAYMSLGVFLLHTLLTWLVTNVLDFGLLGAALILSFSWWLLVAVNGMYILMSPNCKETWTGFSTRAFRGIWPYFKLTVASAVMLCLEIWYNQGLVIISGLLSNPTISLDAISICMYYLNWDMQFMLGLSAAISVRVSNELGAGNPRVAMLSVVVVNITTVLISSVLCVIVLVFRVGLSKAFTSDAEVIAAVSDLFPLLAVSIFLNGIQPILSGVAIGSGWQAVVAYVNLVTYYVIGLPIGCVLGFKTSLGVAGIWWGMIAGVILQTLTLIVLTLKTNWTSEVENAAQRVKTSATENQEMANAGV

SEQ ID NO: 38168 - DNA, 1302 bp, Arabidopsis thaliana
  misc_feature (1)..(1302): Ceres Seq. ID no. 12604854
  misc_feature: MA Experiment ID: 108433 Result: Down-regulated in Transcription
  misc_feature: MA Experiment 108433 PARAMETER Experiment Name: At_rhl_Mutant2_cDNA_P Parameter: Age (day) Value: 7
  misc_feature: MA Experiment 108433 PARAMETER Experiment Name: At_rhl_Mutant2_cDNA_P Parameter: Organism Value: A. thaliana
  misc_feature: MA Experiment 108433 PARAMETER Experiment Name: At_rhl_Mutant2_cDNA_P Parameter: Plant Line Value: rhl Mutant vs. wt landsburg
  misc_feature: MA Experiment 108433 PARAMETER Experiment Name: At_rhl_Mutant2_cDNA_P Parameter: Tissue Value: Roots
  misc_feature: MA Experiment ID: 108434 Result: Up-regulated in Transcription
  misc_feature: MA Experiment 108434 PARAMETER Experiment Name: At_Root_Tips_cDNA_P Parameter: Tissue Value: Root Tips
  misc_feature: MA Experiment ID: 108569 Result: Up-regulated in Transcription
  misc_feature: MA Experiment 108569 PARAMETER Experiment Name: At_0.001%_MeJA__cDNA_P Parameter: Timepoint (hr) Value: 6
  misc_feature: MA Experiment 108569 PARAMETER Experiment Name: At_0.001%_MeJA__cDNA_P Parameter: Tissue Value: Aerial
  misc_feature: MA Experiment 108569 PARAMETER Experiment Name: At_0.001%_MeJA__cDNA_P Parameter: Treatment Value: 0.001% MeJA vs. No Treatment
  misc_feature: MA Experiment ID: 108595 Result: Down-regulated in Transcription
  misc_feature: MA Experiment 108595 PARAMETER Experiment Name: At_Ler-pi_Ovule_cDNA_P Parameter: Plant Line Value: null
  misc_feature: MA Experiment ID: 20000224 Result: Down-regulated in Transcription
  misc_feature: MA Experiment ID: 20000227 Result: Up-regulated in Transcription
  misc_feature: MA Experiment 20000227 PARAMETER Experiment Name: At_Root-Tips-vs-Tops_P Parameter: Tissue Value: Root Tips vs. Root Tops
  misc_feature: MA Experiment ID: 20000437 Result: Down-regulated in Transcription
  misc_feature: MA Experiment 20000437 PARAMETER Experiment Name: At_Drought_P Parameter: Age (day) Value: 8
  misc_feature: MA Experiment 20000437 PARAMETER Experiment Name: At_Drought_P Parameter: Organism Value: A. thaliana
  misc_feature: MA Experiment 20000437 PARAMETER Experiment Name: At_Drought_P Parameter: Plant Line Value: WS
  misc_feature: MA Experiment 20000437 PARAMETER Experiment Name: At_Drought_P Parameter: Timepoint (hr) Value: 24
  misc_feature: MA Experiment 20000437 PARAMETER Experiment Name: At_Drought_P Parameter: Tissue Value: Whole Plant
  misc_feature: MA Experiment 20000437 PARAMETER Experiment Name: At_Drought_P Parameter: Treatment Value: Drought vs. No Drought
  misc_feature: MA Experiment ID: 20001247 Result: Up-regulated in Transcription
  misc_feature: MA Experiment 20001247 PARAMETER Experiment Name: At_Far-red-induction_P Parameter: Age (day) Value: 7
  misc_feature: MA Experiment 20001247 PARAMETER Experiment Name: At_Far-red-induction_P Parameter: Light Value: Far-red vs. White
  misc_feature: MA Experiment 20001247 PARAMETER Experiment Name: At_Far-red-induction_P Parameter: Organism Value: A. thaliana
  misc_feature: MA Experiment 20001247 PARAMETER Experiment Name: At_Far-red-induction_P Parameter: Plant Line Value: Columbia
  misc_feature: MA Experiment 20001247 PARAMETER Experiment Name: At_Far-red-induction_P Parameter: Timepoint (hr) Value: 1
  misc_feature: MA Experiment 20001247 PARAMETER Experiment Name: At_Far-red-induction_P Parameter: Tissue Value: Whole Plant
  misc_feature: MA Experiment ID: 20001450 Result: Up-regulated in Transcription
  misc_feature: MA Experiment 20001450 PARAMETER Experiment Name: At_Far-red-induction_P Parameter: Age (day) Value: 7
  misc_feature: MA Experiment 20001450 PARAMETER Experiment Name: At_Far-red-induction_P Parameter: Light Value: Far-red vs. White
  misc_feature: MA Experiment 20001450 PARAMETER Experiment Name: At_Far-red-induction_P Parameter: Organism Value: A. thaliana
  misc_feature: MA Experiment 20001450 PARAMETER Experiment Name: At_Far-red-induction_P Parameter: Plant Line Value: Columbia
  misc_feature: MA Experiment 20001450 PARAMETER Experiment Name: At_Far-red-induction_P Parameter: Timepoint (hr) Value: 8
  misc_feature: MA Experiment 20001450 PARAMETER Experiment Name: At_Far-red-induction_P Parameter: Tissue Value: Whole Plant
  misc_feature: MA Experiment ID: 20001557 Result: Up-regulated in Transcription
  misc_feature: MA Experiment 20001557 PARAMETER Experiment Name: At_Drought_Soil_Dry_P Parameter: Age (day) Value: 27
  misc_feature: MA Experiment 20001557 PARAMETER Experiment Name: At_Drought_Soil_Dry_P Parameter: Organism Value: A. thaliana
  misc_feature: MA Experiment 20001557 PARAMETER Experiment Name: At_Drought_Soil_Dry_P Parameter: Plant Line Value: WS
  misc_feature: MA Experiment 20001557 PARAMETER Experiment Name: At_Drought_Soil_Dry_P Parameter: Post Timepoint (hr) Value: 3
  misc_feature: MA Experiment 20001557 PARAMETER Experiment Name: At_Drought_Soil_Dry_P Parameter: Post-Treatment Value: Re-Water vs. No Drought
  misc_feature: MA Experiment 20001557 PARAMETER Experiment Name: At_Drought_Soil_Dry_P Parameter: Timepoint (day) Value: 13
  misc_feature: MA Experiment 20001557 PARAMETER Experiment Name: At_Drought_Soil_Dry_P Parameter: Treatment Value: Drought vs. No Drought
  misc_feature: MA Experiment ID: 20001558 Result: Up-regulated in Transcription
  misc_feature: MA Experiment 20001558 PARAMETER Experiment Name: At_Drought_Soil_Dry_P Parameter: Age (day) Value: 27
  misc_feature: MA Experiment 20001558 PARAMETER Experiment Name: At_Drought_Soil_Dry_P Parameter: Organism Value: A. thaliana
  misc_feature: MA Experiment 20001558 PARAMETER Experiment Name: At_Drought_Soil_Dry_P Parameter: Plant Line Value: WS
  misc_feature: MA Experiment 20001558 PARAMETER Experiment Name: At_Drought_Soil_Dry_P Parameter: Post Timepoint (hr) Value: 6
  misc_feature: MA Experiment 20001558 PARAMETER Experiment Name: At_Drought_Soil_Dry_P Parameter: Post-Treatment Value: Re-Water vs. No Drought
  misc_feature: MA Experiment 20001558 PARAMETER Experiment Name: At_Drought_Soil_Dry_P Parameter: Timepoint (day) Value: 13
  misc_feature: MA Experiment 20001558 PARAMETER Experiment Name: At_Drought_Soil_Dry_P Parameter: Treatment Value: Drought vs. No Drought
  misc_feature: MA Experiment ID: 20001560 Result: Up-regulated in Transcription
  misc_feature: MA Experiment 20001560 PARAMETER Experiment Name: At_Drought_Soil_Dry_P Parameter: Age (day) Value: 28
  misc_feature: MA Experiment 20001560 PARAMETER Experiment Name: At_Drought_Soil_Dry_P Parameter: Organism Value: A. thaliana
  misc_feature: MA Experiment 20001560 PARAMETER Experiment Name: At_Drought_Soil_Dry_P Parameter: Plant Line Value: WS
  misc_feature: MA Experiment 20001560 PARAMETER Experiment Name: At_Drought_Soil_Dry_P Parameter: Post Timepoint (hr) Value: None
  misc_feature: MA Experiment 20001560 PARAMETER Experiment Name: At_Drought_Soil_Dry_P Parameter: Post-Treatment Value: None
  misc_feature: MA Experiment 20001560 PARAMETER Experiment Name: At_Drought_Soil_Dry_P Parameter: Timepoint (day) Value: 14
  misc_feature: MA Experiment 20001560 PARAMETER Experiment Name: At_Drought_Soil_Dry_P Parameter: Treatment Value: Drought vs. No Drought
  misc_feature: MA Experiment ID: 20001911 Result: Down-regulated in Transcription
  misc_feature: MA Experiment 20001911 PARAMETER Experiment Name: At_Drought_Reproduction_P Parameter: Age (day) Value: 40
  misc_feature: MA Experiment 20001911 PARAMETER Experiment Name: At_Drought_Reproduction_P Parameter: Organism Value: A. thaliana
  misc_feature: MA Experiment 20001911 PARAMETER Experiment Name: At_Drought_Reproduction_P Parameter: Plant Line Value: WS
  misc_feature: MA Experiment 20001911 PARAMETER Experiment Name: At_Drought_Reproduction_P Parameter: Timepoint (day) Value: 10
  misc_feature: MA Experiment 20001911 PARAMETER Experiment Name: At_Drought_Reproduction_P Parameter: Tissue Value: Flowers
  misc_feature: MA Experiment 20001911 PARAMETER Experiment Name: At_Drought_Reproduction_P Parameter: Treatment Value: Drought vs. No Drought
gtgaacttaacgtctctctctattcctctgcttctctctttctccctgtgaaaaaatggactcggtggctctctactgcaccgctggtctcattgccggcgccgtctactggttcatatgcgtcctaggtccagcagaacgaaaaggcaaacgagcctctgatctctccggcggctcaatctccgcagaaaaagtcaaagacaactataaccaatactggtctttcttccgcaaaccaaaagagatcgaatcagccgagaaagtacctgacttcgtcgacacgttctacaatcttgtcactgatatctacgagtggggatggggacaatctttccatttctctcctcatgtccctggaaaatccgacaaagacgccacaagaatccacgaagaaatggccgtcgatctcatcaaagtgaaaccgggacaaaagattcttgacgctggttgcggcgtgggtgggccgatgagagccatcgcggcccattccaaggcccaagtcactggaatcactatcaacgagtaccaagtgcaacgagccaagcttcacaacaagaaagctggacttgattctctctgcaacgtcgtttgtggtaactttttaaagatgccgttcgatgaaaacacgtttgacggagcttactcgatcgaagctacgtgtcacgctcctaagctcgaagaagtatactcggagatcttcagagtgatgaaaccaggatctttgttcgtgtcctacgaatgggtcaccactgaaaaatacagagacgatgacgaagaacacaaggacgtgattcaagggatcgagagaggagacgcacttcctggactaagaagctacgctgatatagccgtgacggcgaagaaagttgggtttgaggtagtgaaggagaaagatttggctaaaccaccgtctaaaccgtggtggaaccggttaaagatgggaaggattgcttattggagaaaccatgttgtggttgtgattctttctgctattggggttgctcctaaaggaactgttgatgttcataagatgttgtttaagactgctgattatttgaccagaggtggtgagactggaatcttctctccgatgcatatgattctctgtagaaaaccagagaaagcttctgaatgaatgattgagaatcttcttccttgttctcgtttttcttcttctttctttctaagttcatgttttgccccttaagaatctctttgtcgtcgtattaatgttatcactttgttgtttattgtatttttttttttcaatttgatttgtttaaattgatgatggatcactgg

SEQ ID NO: 38169 - protein, 359 aa, Arabidopsis thaliana
  peptide (1)..(359): Ceres Seq. ID no. 12604855
  misc_feature (82)..(281): Pfam Name: ubiE/COQ5 methyltransferase family Pfam Description: ubiE/COQ5 methyltransferase family
  misc_feature (1)..(354): Homolog of NCBI NO: 3560533 NR Description: 24-methylene lophenol C24(1)methyltransferase
  misc_feature (9)..(356): Homolog of NCBI NO: 7443717 NR Description: probable sterol 24-C-methyltransferase (EC
  misc_feature (1)..(356): Homolog of NCBI NO: 7443718 NR Description: probable sterol 24-C-methyltransferase (EC
  misc_feature (1)..(359): Homolog of NCBI NO: 21555010 NR Description: sterol-C-methyltransferase [Arabidopsis thaliana]
  misc_feature (1)..(359): Homolog of NCBI NO: 1061040 NR Description: sterol-C-methyltransferase [Arabidopsis thaliana]
  misc_feature (1)..(359): Homolog of NCBI NO: 23397216 NR Description: putative sterol-C-methyltransferase [Arabidopsis
  misc_feature (1)..(359): Homolog of NCBI NO: 22136020 NR Description: 24-sterol C-methyltransferase [Arabidopsis
  misc_feature (1)..(359): Homolog of NCBI NO: 15217917 NR Description: sterol-C-methyltransferase
  misc_feature (1)..(359): Homolog of NCBI NO: 2246456 NR Description: S-adenosyl-methionine-sterol-C-methyltransferase
  misc_feature (1)..(359): Homolog of NCBI NO: 15222955 NR Description: S-adenosyl-methionine-sterol-C-methyltransferase,
MDSVALYCTAGLIAGAVYWFICVLGPAERKGKRASDLSGGSISAEKVKDNYNQYWSFFRKPKEIESAEKVPDFVDTFYNLVTDIYEWGWGQSFHFSPHVPGKSDKDATRIHEEMAVDLIKVKPGQKILDAGCGVGGPMRAIAAHSKAQVTGITINEYQVQRAKLHNKKAGLDSLCNVVCGNFLKMPFDENTFDGAYSIEATCHAPKLEEVYSEIFRVMKPGSLFVSYEWVTTEKYRDDDEEHKDVIQGIERGDALPGLRSYADIAVTAKKVGFEVVKEKDLAKPPSKPWWNRLKMGRIAYWRNHVVVVILSAIGVAPKGTVDVHKMLFKTADYLTRGGETGIFSPMHMILCRKPEKASE

SEQ ID NO: 38170 - protein, 246 aa, Arabidopsis thaliana
  peptide (1)..(246): Ceres Seq. ID no. 12604856
  misc_feature (1)..(168): Pfam Name: ubiE/COQ5 methyltransferase family Pfam Description: ubiE/COQ5 methyltransferase family
  misc_feature (1)..(241): Homolog of NCBI NO: 3560533 NR Description: 24-methylene lophenol C24(1)methyltransferase
  misc_feature (1)..(243): Homolog of NCBI NO: 7443717 NR Description: probable sterol 24-C-methyltransferase (EC
  misc_feature (1)..(243): Homolog of NCBI NO: 7443718 NR Description: probable sterol 24-C-methyltransferase (EC
  misc_feature (1)..(246): Homolog of NCBI NO: 21555010 NR Description: sterol-C-methyltransferase [Arabidopsis thaliana]
  misc_feature (1)..(246): Homolog of NCBI NO: 1061040 NR Description: sterol-C-methyltransferase [Arabidopsis thaliana]
  misc_feature (1)..(246): Homolog of NCBI NO: 23397216 NR Description: putative sterol-C-methyltransferase [Arabidopsis
  misc_feature (1)..(246): Homolog of NCBI NO: 22136020 NR Description: 24-sterol C-methyltransferase [Arabidopsis
  misc_feature (1)..(246): Homolog of NCBI NO: 15217917 NR Description: sterol-C-methyltransferase
  misc_feature (1)..(246): Homolog of NCBI NO: 2246456 NR Description: S-adenosyl-methionine-sterol-C-methyltransferase
  misc_feature (1)..(246): Homolog of NCBI NO: 15222955 NR Description: S-adenosyl-methionine-sterol-C-methyltransferase,
MAVDLIKVKPGQKILDAGCGVGGPMRAIAAHSKAQVTGITINEYQVQRAKLHNKKAGLDSLCNVVCGNFLKMPFDENTFDGAYSIEATCHAPKLEEVYSEIFRVMKPGSLFVSYEWVTTEKYRDDDEEHKDVIQGIERGDALPGLRSYADIAVTAKKVGFEVVKEKDLAKPPSKPWWNRLKMGRIAYWRNHVVVVILSAIGVAPKGTVDVHKMLFKTADYLTRGGETGIFSPMHMILCRKPEKASE

SEQ ID NO: 38171 - protein, 222 aa, Arabidopsis thaliana
  peptide (1)..(222): Ceres Seq. ID no. 12604857
  misc_feature (1)..(144): Pfam Name: ubiE/COQ5 methyltransferase family Pfam Description: ubiE/COQ5 methyltransferase family
  misc_feature (1)..(217): Homolog of NCBI NO: 3560533 NR Description: 24-methylene lophenol C24(1)methyltransferase
  misc_feature (1)..(219): Homolog of NCBI NO: 7443717 NR Description: probable sterol 24-C-methyltransferase (EC
  misc_feature (1)..(219): Homolog of NCBI NO: 7443718 NR Description: probable sterol 24-C-methyltransferase (EC
  misc_feature (1)..(222): Homolog of NCBI NO: 21555010 NR Description: sterol-C-methyltransferase [Arabidopsis thaliana]
  misc_feature (1)..(222): Homolog of NCBI NO: 1061040 NR Description: sterol-C-methyltransferase [Arabidopsis thaliana]
  misc_feature (1)..(222): Homolog of NCBI NO: 23397216 NR Description: putative sterol-C-methyltransferase [Arabidopsis
  misc_feature (1)..(222): Homolog of NCBI NO: 22136020 NR Description: 24-sterol C-methyltransferase [Arabidopsis
  misc_feature (1)..(222): Homolog of NCBI NO: 15217917 NR Description: sterol-C-methyltransferase
  misc_feature (1)..(222): Homolog of NCBI NO: 2246456 NR Description: S-adenosyl-methionine-sterol-C-methyltransferase
  misc_feature (1)..(222): Homolog of NCBI NO: 15222955 NR Description: S-adenosyl-methionine-sterol-C-methyltransferase,
MRAIAAHSKAQVTGITINEYQVQRAKLHNKKAGLDSLCNVVCGNFLKMPFDENTFDGAYSIEATCHAPKLEEVYSEIFRVMKPGSLFVSYEWVTTEKYRDDDEEHKDVIQGIERGDALPGLRSYADIAVTAKKVGFEVVKEKDLAKPPSKPWWNRLKMGRIAYWRNHVVVVILSAIGVAPKGTVDVHKMLFKTADYLTRGGETGIFSPMHMILCRKPEKASE

SEQ ID NO: 38172 - DNA, 718 bp, Arabidopsis thaliana
  misc_feature (1)..(718): Ceres Seq. ID no. 12337883
  misc_feature: MA Experiment ID: 20000180 Result: Up-regulated in Transcription
  misc_feature: MA Experiment 20000180 PARAMETER Experiment Name: At_Germinating_Seeds_P Parameter: Age (hr) Value: 24 vs. 0
  misc_feature: MA Experiment 20000180 PARAMETER Experiment Name: At_Germinating_Seeds_P Parameter: Tissue Value: Germinating Seeds
  misc_feature: MA Experiment ID: 20000185 Result: Down-regulated in Transcription
  misc_feature: MA Experiment 20000185 PARAMETER Experiment Name: At_Roots__P Parameter: Age (day) Value: 7 vs. 21
  misc_feature: MA Experiment 20000185 PARAMETER Experiment Name: At_Roots__P Parameter: Organism Value: A. thaliana
  misc_feature: MA Experiment 20000185 PARAMETER Experiment Name: At_Roots__P Parameter: Tissue Value: Roots vs. Whole Plant
  misc_feature: MA Experiment ID: 20000439 Result: Down-regulated in Transcription
  misc_feature: MA Experiment 20000439 PARAMETER Experiment Name: At_Roots__P Parameter: Age (day) Value: 14 vs. 21
  misc_feature: MA Experiment 20000439 PARAMETER Experiment Name: At_Roots__P Parameter: Organism Value: A. thaliana
  misc_feature: MA Experiment 20000439 PARAMETER Experiment Name: At_Roots__P Parameter: Tissue Value: Roots vs. Whole Plant
  misc_feature: MA Experiment ID: 20000451 Result: Down-regulated in Transcription
  misc_feature: MA Experiment 20000451 PARAMETER Experiment Name: At_CS6879_Shoots-Roots_P Parameter: Age (day) Value: 14
  misc_feature: MA Experiment 20000451 PARAMETER Experiment Name: At_CS6879_Shoots-Roots_P Parameter: Organism Value: A. thaliana
  misc_feature: MA Experiment 20000451 PARAMETER Experiment Name: At_CS6879_Shoots-Roots_P Parameter: Plant Line Value: CS6879 vs. WS
  misc_feature: MA Experiment 20000451 PARAMETER Experiment Name: At_CS6879_Shoots-Roots_P Parameter: Tissue Value: Roots
  misc_feature: MA Experiment ID: 20000794 Result: Down-regulated in Transcription
  misc_feature: MA Experiment 20000794 PARAMETER Experiment Name: At_Petals_P Parameter: Age (day) Value: 23-25 days
  misc_feature: MA Experiment 20000794 PARAMETER Experiment Name: At_Petals_P Parameter: Plant Line Value: WS
  misc_feature: MA Experiment 20000794 PARAMETER Experiment Name: At_Petals_P Parameter: Tissue Value: Petals vs. Whole plant
  misc_feature: MA Experiment ID: 20001248 Result: Down-regulated in Transcription
  misc_feature: MA Experiment 20001248 PARAMETER Experiment Name: At_Far-red-induction_P Parameter: Age (day) Value: 7
  misc_feature: MA Experiment 20001248 PARAMETER Experiment Name: At_Far-red-induction_P Parameter: Light Value: Far-red vs. White
  misc_feature: MA Experiment 20001248 PARAMETER Experiment Name: At_Far-red-induction_P Parameter: Organism Value: A. thaliana
  misc_feature: MA Experiment 20001248 PARAMETER Experiment Name: At_Far-red-induction_P Parameter: Plant Line Value: Columbia
  misc_feature: MA Experiment 20001248 PARAMETER Experiment Name: At_Far-red-induction_P Parameter: Timepoint (hr) Value: 4
  misc_feature: MA Experiment 20001248 PARAMETER Experiment Name: At_Far-red-induction_P Parameter: Tissue Value: Whole Plant
  misc_feature: MA Experiment ID: 20001450 Result: Down-regulated in Transcription
  misc_feature: MA Experiment 20001450 PARAMETER Experiment Name: At_Far-red-induction_P Parameter: Age (day) Value: 7
  misc_feature: MA Experiment 20001450 PARAMETER Experiment Name: At_Far-red-induction_P Parameter: Light Value: Far-red vs. White
  misc_feature: MA Experiment 20001450 PARAMETER Experiment Name: At_Far-red-induction_P Parameter: Organism Value: A. thaliana
  misc_feature: MA Experiment 20001450 PARAMETER Experiment Name: At_Far-red-induction_P Parameter: Plant Line Value: Columbia
  misc_feature: MA Experiment 20001450 PARAMETER Experiment Name: At_Far-red-induction_P Parameter: Timepoint (hr) Value: 8
  misc_feature: MA Experiment 20001450 PARAMETER Experiment Name: At_Far-red-induction_P Parameter: Tissue Value: Whole Plant
  misc_feature: MA Experiment ID: 20001557 Result: Down-regulated in Transcription
  misc_feature: MA Experiment 20001557 PARAMETER Experiment Name: At_Drought_Soil_Dry_P Parameter: Age (day) Value: 27
  misc_feature: MA Experiment 20001557 PARAMETER Experiment Name: At_Drought_Soil_Dry_P Parameter: Organism Value: A. thaliana
  misc_feature: MA Experiment 20001557 PARAMETER Experiment Name: At_Drought_Soil_Dry_P Parameter: Plant Line Value: WS
  misc_feature: MA Experiment 20001557 PARAMETER Experiment Name: At_Drought_Soil_Dry_P Parameter: Post Timepoint (hr) Value: 3
  misc_feature: MA Experiment 20001557 PARAMETER Experiment Name: At_Drought_Soil_Dry_P Parameter: Post-Treatment Value: Re-Water vs. No Drought
  misc_feature: MA Experiment 20001557 PARAMETER Experiment Name: At_Drought_Soil_Dry_P Parameter: Timepoint (day) Value: 13
  misc_feature: MA Experiment 20001557 PARAMETER Experiment Name: At_Drought_Soil_Dry_P Parameter: Treatment Value: Drought vs. No Drought
  misc_feature: MA Experiment ID: 20001558 Result: Down-regulated in Transcription
  misc_feature: MA Experiment 20001558 PARAMETER Experiment Name: At_Drought_Soil_Dry_P Parameter: Age (day) Value: 27
  misc_feature: MA Experiment 20001558 PARAMETER Experiment Name: At_Drought_Soil_Dry_P Parameter: Organism Value: A. thaliana
  misc_feature: MA Experiment 20001558 PARAMETER Experiment Name: At_Drought_Soil_Dry_P Parameter: Plant Line Value: WS
  misc_feature: MA Experiment 20001558 PARAMETER Experiment Name: At_Drought_Soil_Dry_P Parameter: Post Timepoint (hr) Value: 6
  misc_feature: MA Experiment 20001558 PARAMETER Experiment Name: At_Drought_Soil_Dry_P Parameter: Post-Treatment Value: Re-Water vs. No Drought
  misc_feature: MA Experiment 20001558 PARAMETER Experiment Name: At_Drought_Soil_Dry_P Parameter: Timepoint (day) Value: 13
  misc_feature: MA Experiment 20001558 PARAMETER Experiment Name: At_Drought_Soil_Dry_P Parameter: Treatment Value: Drought vs. No Drought
  misc_feature: MA Experiment ID: 20001559 Result: Down-regulated in Transcription
  misc_feature: MA Experiment 20001559 PARAMETER Experiment Name: At_Drought_Soil_Dry_P Parameter: Age (day) Value: 28
  misc_feature: MA Experiment 20001559 PARAMETER Experiment Name: At_Drought_Soil_Dry_P Parameter: Organism Value: A. thaliana
  misc_feature: MA Experiment 20001559 PARAMETER Experiment Name: At_Drought_Soil_Dry_P Parameter: Plant Line Value: WS
  misc_feature: MA Experiment 20001559 PARAMETER Experiment Name: At_Drought_Soil_Dry_P Parameter: Post Timepoint (hr) Value: 29
  misc_feature: MA Experiment 20001559 PARAMETER Experiment Name: At_Drought_Soil_Dry_P Parameter: Post-Treatment Value: Re-Water vs. No Drought
  misc_feature: MA Experiment 20001559 PARAMETER Experiment Name: At_Drought_Soil_Dry_P Parameter: Timepoint (day) Value: 14
  misc_feature: MA Experiment 20001559 PARAMETER Experiment Name: At_Drought_Soil_Dry_P Parameter: Treatment Value: Drought vs. No Drought
  misc_feature: MA Experiment ID: 20001757 Result: Up-regulated in Transcription
  misc_feature: MA Experiment 20001757 PARAMETER Experiment Name: At_50mM_NH4NO3_L-to-H_P Parameter: Timepoint (hr) Value: 6
  misc_feature: MA Experiment 20001757 PARAMETER Experiment Name: At_50mM_NH4NO3_L-to-H_P Parameter: Tissue Value: Leaf
  misc_feature: MA Experiment 20001757 PARAMETER Experiment Name: At_50mM_NH4NO3_L-to-H_P Parameter: Treatment Value: 50mM NH4NO3 vs 100mM Mannitol
  misc_feature: MA Experiment ID: 20001904 Result: Down-regulated in Transcription
  misc_feature: MA Experiment 20001904 PARAMETER Experiment Name: At_Drought_Reproduction_P Parameter: Age (day) Value: 37
  misc_feature: MA Experiment 20001904 PARAMETER Experiment Name: At_Drought_Reproduction_P Parameter: Organism Value: A. thaliana
  misc_feature: MA Experiment 20001904 PARAMETER Experiment Name: At_Drought_Reproduction_P Parameter: Plant Line Value: WS
  misc_feature: MA Experiment 20001904 PARAMETER Experiment Name: At_Drought_Reproduction_P Parameter: Timepoint (day) Value: 7
  misc_feature: MA Experiment 20001904 PARAMETER Experiment Name: At_Drought_Reproduction_P Parameter: Tissue Value: Rosettes
  misc_feature: MA Experiment 20001904 PARAMETER Experiment Name: At_Drought_Reproduction_P Parameter: Treatment Value: Drought vs. No Drought
  misc_feature: MA Experiment ID: 20001906 Result: Down-regulated in Transcription
  misc_feature: MA Experiment 20001906 PARAMETER Experiment Name: At_Drought_Reproduction_P Parameter: Age (day) Value: 35
  misc_feature: MA Experiment 20001906 PARAMETER Experiment Name: At_Drought_Reproduction_P Parameter: Organism Value: A. thaliana
  misc_feature: MA Experiment 20001906 PARAMETER Experiment Name: At_Drought_Reproduction_P Parameter: Plant Line Value: WS
  misc_feature: MA Experiment 20001906 PARAMETER Experiment Name: At_Drought_Reproduction_P Parameter: Timepoint (day) Value: 5
  misc_feature: MA Experiment 20001906 PARAMETER Experiment Name: At_Drought_Reproduction_P Parameter: Tissue Value: Siliques
  misc_feature: MA Experiment 20001906 PARAMETER Experiment Name: At_Drought_Reproduction_P Parameter: Treatment Value: Drought vs. No Drought
cttcgtctctgtctccaaaatcgaatcaaaatctctaaagtttcaatttttttgttctgttctttttttttttttaaagaatggcttcaatttctgcaactttgccttcgccattgttactcacacagagaaaatccaatctcacatcgattcaaaaactcccattttctctaactcgaggtacgaatgatctttctccattatctcttactcgaaaccctagcagcatcagtctgatggtgaaagctagtggagaaagctcagattcatcgactgatctcgacgttgttagtacgattcagaatgtttgggataagtctgaagataggttaggtcttattggtttgggttttgctggtattgtagctctttgggcatcattgaatctcatcacggcaattgacaaatttgcccgttatctcgagcggattcgaactagttggtatcttgttctccacgtggttcacatatcgatatctcttgttcaaaccggacagacaggagctttcgaaaattgtcaagaaatcagtagcggatatacttggccagtgaaccttgtgtgtgtgataatacttcatctttggaagatgatttgtttgcaagtttgtaaaattacatgacagggtggttgttgtttctagtccaataatgtcatgcatttgaaacctgtaaatactttattgttggtttttggttgtgagcaaaatcaatcttttct

SEQ ID NO: 38173 - protein, 179 aa, Arabidopsis thaliana
  peptide (1)..(179): Ceres Seq. ID no. 12337884
  misc_feature (46)..(108): Homolog of NCBI NO: 38175474 NR Description: unknown protein [Oryza sativa (japonica
  misc_feature (48)..(109): Homolog of NCBI NO: 34393236 NR Description: unknown protein [Oryza sativa (japonica
  misc_feature (1)..(109): Homolog of NCBI NO: 21555057 NR Description: unknown [Arabidopsis thaliana]
  misc_feature (1)..(109): Homolog of NCBI NO: 18407178 NR Description: expressed protein
  misc_feature (1)..(109): Homolog of NCBI NO: 34909746 NR Description: contains ESTs
  misc_feature (1)..(109): Homolog of NCBI NO: 21554231 NR Description: unknown [Arabidopsis thaliana]
  misc_feature (1)..(109): Homolog of NCBI NO: 18403896 NR Description: expressed protein
MASISATLPSPLLLTQRKSNLTSIQKLPFSLTRGTNDLSPLSLTRNPSSISLMVKASGESSDSSTDLDVVSTIQNVWDKSEDRLGLIGLGFAGIVALWASLNLITAIDKFARYLERIRTSWYLVLHVVHISISLVQTGQTGAFENCQEISSGYTWPVNLVCVIILHLWKMICLQVCKIT

SEQ ID NO: 38174 - protein, 127 aa, Arabidopsis thaliana
  peptide (1)..(127): Ceres Seq. ID no. 12337885
  misc_feature (1)..(56): Homolog of NCBI NO: 38175474 NR Description: unknown protein [Oryza sativa (japonica
  misc_feature (1)..(57): Homolog of NCBI NO: 34393236 NR Description: unknown protein [Oryza sativa (japonica
  misc_feature (1)..(57): Homolog of NCBI NO: 21555057 NR Description: unknown [Arabidopsis thaliana]
  misc_feature (1)..(57): Homolog of NCBI NO: 18407178 NR Description: expressed protein
  misc_feature (1)..(57): Homolog of NCBI NO: 34909746 NR Description: contains ESTs
  misc_feature (1)..(57): Homolog of NCBI NO: 21554231 NR Description: unknown [Arabidopsis thaliana]
  misc_feature (1)..(57): Homolog of NCBI NO: 18403896 NR Description: expressed protein
MVKASGESSDSSTDLDVVSTIQNVWDKSEDRLGLIGLGFAGIVALWASLNLITAIDKFARYLERIRTSWYLVLHVVHISISLVQTGQTGAFENCQEISSGYTWPVNLVCVIILHLWKMICLQVCKIT

SEQ ID NO: 38175 - DNA, 1390 bp, Arabidopsis thaliana
  misc_feature (1)..(1390): Ceres Seq. ID no. 12329134
  misc_feature: MA Experiment ID: 108434 Result: Down-regulated in Transcription
  misc_feature: MA Experiment 108434 PARAMETER Experiment Name: At_Root_Tips_cDNA_P Parameter: Tissue Value: Root Tips
  misc_feature: MA Experiment ID: 108469 Result: Up-regulated in Transcription
  misc_feature: MA Experiment ID: 108489 Result: Up-regulated in Transcription
  misc_feature: MA Experiment ID: 108573 Result: Up-regulated in Transcription
  misc_feature: MA Experiment 108573 PARAMETER Experiment Name: At_Drought_cDNA_P Parameter: Timepoint (hr) Value: 6
  misc_feature: MA Experiment 108573 PARAMETER Experiment Name: At_Drought_cDNA_P Parameter: Tissue Value: Aerial
  misc_feature: MA Experiment 108573 PARAMETER Experiment Name: At_Drought_cDNA_P Parameter: Treatment Value: Drought vs. No Drought
  misc_feature: MA Experiment ID: 108585 Result: Up-regulated in Transcription
  misc_feature: MA Experiment 108585 PARAMETER Experiment Name: At_5mM_NaNP_cDNA_P Parameter: Timepoint (hr) Value: 6
  misc_feature: MA Experiment 108585 PARAMETER Experiment Name: At_5mM_NaNP_cDNA_P Parameter: Tissue Value: Aerial
  misc_feature: MA Experiment 108585 PARAMETER Experiment Name: At_5mM_NaNP_cDNA_P Parameter: Treatment Value: null
  misc_feature: MA Experiment ID: 108595 Result: Up-regulated in Transcription
  misc_feature: MA Experiment 108595 PARAMETER Experiment Name: At_Ler-pi_Ovule_cDNA_P Parameter: Plant Line Value: null
  misc_feature: MA Experiment ID: 108605 Result: Up-regulated in Transcription
  misc_feature: MA Experiment 108605 PARAMETER Experiment Name: At_100uM_ABA_cDNA_P Parameter: Timepoint (hr) Value: 6
  misc_feature: MA Experiment 108605 PARAMETER Experiment Name: At_100uM_ABA_cDNA_P Parameter: Tissue Value: Aerial
  misc_feature: MA Experiment 108605 PARAMETER Experiment Name: At_100uM_ABA_cDNA_P Parameter: Treatment Value: 100uM ABA vs. No Treatment
  misc_feature: MA Experiment ID: 108609 Result: Up-regulated in Transcription
  misc_feature: MA Experiment 108609 PARAMETER Experiment Name: At_100uM_ABA_cDNA_P Parameter: Timepoint (hr) Value: 24
  misc_feature: MA Experiment 108609 PARAMETER Experiment Name: At_100uM_ABA_cDNA_P Parameter: Tissue Value: Aerial
  misc_feature: MA Experiment 108609 PARAMETER Experiment Name: At_100uM_ABA_cDNA_P Parameter: Treatment Value: 100uM ABA vs. No Treatment
  misc_feature: MA Experiment ID: 108668 Result: Up-regulated in Transcription
  misc_feature: MA Experiment 108668 PARAMETER Experiment Name: At_2mM_SA_cDNA_P Parameter: Plant Line Value: WS
  misc_feature: MA Experiment 108668 PARAMETER Experiment Name: At_2mM_SA_cDNA_P Parameter: Timepoint (hr) Value: 6
  misc_feature: MA Experiment 108668 PARAMETER Experiment Name: At_2mM_SA_cDNA_P Parameter: Treatment Value: 2mM SA vs. No Treatment
  misc_feature: MA Experiment ID: 20000069 Result: Up-regulated in Transcription
  misc_feature: MA Experiment 20000069 PARAMETER Experiment Name: At_100uM_ABA_Mutants_cDNA_P Parameter: Plant Line Value: CS23
  misc_feature: MA Experiment 20000069 PARAMETER Experiment Name: At_100uM_ABA_Mutants_cDNA_P Parameter: Timepoint (hr) Value: 6
  misc_feature: MA Experiment 20000069 PARAMETER Experiment Name: At_100uM_ABA_Mutants_cDNA_P Parameter: Tissue Value: Aerial
  misc_feature: MA Experiment 20000069 PARAMETER Experiment Name: At_100uM_ABA_Mutants_cDNA_P Parameter: Treatment Value: 100uM ABA vs. No Treatment
  misc_feature: MA Experiment ID: 20000086 Result: Up-regulated in Transcription
  misc_feature: MA Experiment 20000086 PARAMETER Experiment Name: At_100uM_ABA_Mutants_cDNA_P Parameter: Plant Line Value: CS22
  misc_feature: MA Experiment 20000086 PARAMETER Experiment Name: At_100uM_ABA_Mutants_cDNA_P Parameter: Timepoint (hr) Value: 6
  misc_feature: MA Experiment 20000086 PARAMETER Experiment Name: At_100uM_ABA_Mutants_cDNA_P Parameter: Tissue Value: Aerial
  misc_feature: MA Experiment 20000086 PARAMETER Experiment Name: At_100uM_ABA_Mutants_cDNA_P Parameter: Treatment Value: 100uM ABA vs. No Treatment
  misc_feature: MA Experiment ID: 20000088 Result: Up-regulated in Transcription
  misc_feature: MA Experiment 20000088 PARAMETER Experiment Name: At_100uM_ABA_Mutants_cDNA_P Parameter: Plant Line Value: Landsberg
  misc_feature: MA Experiment 20000088 PARAMETER Experiment Name: At_100uM_ABA_Mutants_cDNA_P Parameter: Timepoint (hr) Value: 6
  misc_feature: MA Experiment 20000088 PARAMETER Experiment Name: At_100uM_ABA_Mutants_cDNA_P Parameter: Tissue Value: Aerial
  misc_feature: MA Experiment 20000088 PARAMETER Experiment Name: At_100uM_ABA_Mutants_cDNA_P Parameter: Treatment Value: 100uM ABA vs. No Treatment
  misc_feature: MA Experiment ID: 20000090 Result: Up-regulated in Transcription
  misc_feature: MA Experiment ID: 20000117 Result: Up-regulated in Transcription
  misc_feature: MA Experiment 20000117 PARAMETER Experiment Name: At_100uM_ABA_Mutants_cDNA_P Parameter: Plant Line Value: Columbia
  misc_feature: MA Experiment 20000117 PARAMETER Experiment Name: At_100uM_ABA_Mutants_cDNA_P Parameter: Timepoint (hr) Value: 6
  misc_feature: MA Experiment 20000117 PARAMETER Experiment Name: At_100uM_ABA_Mutants_cDNA_P Parameter: Tissue Value: Aerial
  misc_feature: MA Experiment 20000117 PARAMETER Experiment Name: At_100uM_ABA_Mutants_cDNA_P Parameter: Treatment Value: 100uM ABA vs. No Treatment
  misc_feature: MA Experiment ID: 20000180 Result: Up-regulated in Transcription
  misc_feature: MA Experiment 20000180 PARAMETER Experiment Name: At_Germinating_Seeds_P Parameter: Age (hr) Value: 24 vs. 0
  misc_feature: MA Experiment 20000180 PARAMETER Experiment Name: At_Germinating_Seeds_P Parameter: Tissue Value: Germinating Seeds
  misc_feature: MA Experiment ID: 20000182 Result: Up-regulated in Transcription
  misc_feature: MA Experiment 20000182 PARAMETER Experiment Name: At_2mM_SA_P Parameter: Age (day) Value: 14
  misc_feature: MA Experiment 20000182 PARAMETER Experiment Name: At_2mM_SA_P Parameter: Organism Value: A. thaliana
  misc_feature: MA Experiment 20000182 PARAMETER Experiment Name: At_2mM_SA_P Parameter: Plant Line Value: WS
  misc_feature: MA Experiment 20000182 PARAMETER Experiment Name: At_2mM_SA_P Parameter: Timepoint (hr) Value: 6
  misc_feature: MA Experiment 20000182 PARAMETER Experiment Name: At_2mM_SA_P Parameter: Tissue Value: Aerial
  misc_feature: MA Experiment 20000182 PARAMETER Experiment Name: At_2mM_SA_P Parameter: Treatment Value: 2mM SA vs. No Treatment
  misc_feature: MA Experiment ID: 20000234 Result: Down-regulated in Transcription
  misc_feature: MA Experiment 20000234 PARAMETER Experiment Name: At_Siliques_P Parameter: Age (day) Value: 21
  misc_feature: MA Experiment 20000234 PARAMETER Experiment Name: At_Siliques_P Parameter: Organism Value: A. thaliana
  misc_feature: MA Experiment 20000234 PARAMETER Experiment Name: At_Siliques_P Parameter: Plant Line Value: WS
  misc_feature: MA Experiment 20000234 PARAMETER Experiment Name: At_Siliques_P Parameter: Tissue Value: Less Than 5mm Siliques vs. Whole Plant
  misc_feature: MA Experiment ID: 20000439 Result: Up-regulated in Transcription
  misc_feature: MA Experiment 20000439 PARAMETER Experiment Name: At_Roots__P Parameter: Age (day) Value: 14 vs. 21
  misc_feature: MA Experiment 20000439 PARAMETER Experiment Name: At_Roots__P Parameter: Organism Value: A. thaliana
  misc_feature: MA Experiment 20000439 PARAMETER Experiment Name: At_Roots__P Parameter: Tissue Value: Roots vs. Whole Plant
  misc_feature: MA Experiment ID: 20001904 Result: Up-regulated in Transcription
  misc_feature: MA Experiment 20001904 PARAMETER Experiment Name: At_Drought_Reproduction_P Parameter: Age (day) Value: 37
  misc_feature: MA Experiment 20001904 PARAMETER Experiment Name: At_Drought_Reproduction_P Parameter: Organism Value: A. thaliana
  misc_feature: MA Experiment 20001904 PARAMETER Experiment Name: At_Drought_Reproduction_P Parameter: Plant Line Value: WS
  misc_feature: MA Experiment 20001904 PARAMETER Experiment Name: At_Drought_Reproduction_P Parameter: Timepoint (day) Value: 7
  misc_feature: MA Experiment 20001904 PARAMETER Experiment Name: At_Drought_Reproduction_P Parameter: Tissue Value: Rosettes
  misc_feature: MA Experiment 20001904 PARAMETER Experiment Name: At_Drought_Reproduction_P Parameter: Treatment Value: Drought vs. No Drought
gcctaggatctgttcttcccaaaacgactcatgccgtccattcgattcggaatatagttgtagaggagatttcatttctaatcaatttcttcggtgatgagttccaccgcggcatcttccaccgtcggaggaggcggatcgtctgagatttccggtgtcaaaaaaacctccaagcgaccaaaatattctaggtttactcagcaagagcttccagcgtgcaagccaattcttactccaagatgggtgatcttgacatttcttgtcgctggggttgtcttcattccccttggagtgatctgcttatttgcttctcagggagtagtcgagattgttgatcgatatgacacagactgtattccaacatcttctagaaacaacatggtcgcttacatacagggtgaaggagataagatctgtaagagaacaataacggtgacaaaagctatgaagcatcctgtctatgtatactaccaacttgagaatttctaccaaaaccatagacggtatgtgaaaagtcgaaacgatgcacaactaagaagtccaaaagaagagcatgatgtgaagacctgtgcacctgaggataatgtgggtggagaaccaattgtgccatgtggtcttgttgcttggagtttgttcaacgatacttatagcttttcaagaaatagccaacaacttcttgtgaataagaaaggtatctcatggaagagtgacagagaaaacaagtttgggaaaaatgtcttccctaaaaattttcagaaaggagcaccaataggcggtggaactcttaatatttctaaaccgttgagtgagcaagaagacctcatagtctggatgcgaaccgcggctttgccaacgtttaggaagctgtatgggaagattgagacagacctacacgcgggtgataccataacggtcttgttgcagaacaactacaacacttacagcttcaatgggcagaagaagctagtgctgtcaacaactagctggctcggcggaaggaatgatttcctcgggattgcttatctgactgtaggcagtatttgcttgttcttggctgttacatttgccgtattgtatctagttaagccaaggcaactcggagacccctcgtacctttcgtggaacagaagtgctggaggtttacagtaatagagcccttcgagcatcaggcgttgatccctccatcgtcaaacggcgtggttttggcttagctaacaaaagagaaaaaacgaaaataagtatatagttcgtttataattttgatattgttgaaaacaaacgtttgtgttttgtcctgttgttgttaagatactagccagtaaatggtgtttagaaaataatgtaaatgaattacagttggaaattgcaaaataagcagagaattttgtcc

SEQ ID NO: 38176 - protein, 350 aa, Arabidopsis thaliana
  peptide (1)..(350): Ceres Seq. ID no. 12329135
  misc_feature (75)..(338): Pfam Name: LEM3 (ligand-effect modulator 3) family / CDC50 family Pfam Description: LEM3 (ligand-effect modulator 3) family / CDC50
  misc_feature (25)..(332): Homolog of NCBI NO: 9757735 NR Description: gb|AAD25612.1~gene_id:MCL19.21~similar to unknown
  misc_feature (25)..(346): Homolog of NCBI NO: 21554054 NR Description: unknown [Arabidopsis thaliana]
  misc_feature (25)..(346): Homolog of NCBI NO: 18422638 NR Description: membrane protein common family
  misc_feature (50)..(348): Homolog of NCBI NO: 15219220 NR Description: membrane protein common family; protein id:
  misc_feature (2)..(348): Homolog of NCBI NO: 18399730 NR Description: membrane protein common family
  misc_feature (1)..(348): Homolog of NCBI NO: 18404877 NR Description: membrane protein common family
  misc_feature (31)..(75): Homolog of NCBI NO: 25347303 NR Description: protein F3O9.16 [imported] - Arabidopsis thaliana
  misc_feature (44)..(348): Homolog of NCBI NO: 25347303 NR Description: protein F3O9.16 [imported] - Arabidopsis thaliana
  misc_feature (33)..(350): Homolog of NCBI NO: 25347301 NR Description: T8K14.13 [imported] - Arabidopsis thaliana
  misc_feature (1)..(350): Homolog of NCBI NO: 18412377 NR Description: membrane protein common family
MSSTAASSTVGGGGSSEISGVKKTSKRPKYSRFTQQELPACKPILTPRWVILTFLVAGVVFIPLGVICLFASQGVVEIVDRYDTDCIPTSSRNNMVAYIQGEGDKICKRTITVTKAMKHPVYVYYQLENFYQNHRRYVKSRNDAQLRSPKEEHDVKTCAPEDNVGGEPIVPCGLVAWSLFNDTYSFSRNSQQLLVNKKGISWKSDRENKFGKNVFPKNFQKGAPIGGGTLNISKPLSEQEDLIVWMRTAALPTFRKLYGKIETDLHAGDTITVLLQNNYNTYSFNGQKKLVLSTTSWLGGRNDFLGIAYLTVGSICLFLAVTFAVLYLVKPRQLGDPSYLSWNRSAGGLQ

SEQ ID NO: 38177 - protein, 256 aa, Arabidopsis thaliana
  peptide (1)..(256): Ceres Seq. ID no. 12329136
  misc_feature (1)..(244): Pfam Name: LEM3 (ligand-effect modulator 3) family / CDC50 family Pfam Description: LEM3 (ligand-effect modulator 3) family / CDC50
  misc_feature (1)..(247): Homolog of NCBI NO: 19570056 NR Description: similar to membrane protein common family
  misc_feature (1)..(238): Homolog of NCBI NO: 9757735 NR Description: gb|AAD25612.1~gene_id:MCL19.21~similar to unknown
  misc_feature (1)..(252): Homolog of NCBI NO: 21554054 NR Description: unknown [Arabidopsis thaliana]
  misc_feature (1)..(252): Homolog of NCBI NO: 18422638 NR Description: membrane protein common family
  misc_feature (1)..(254): Homolog of NCBI NO: 15219220 NR Description: membrane protein common family; protein id:
  misc_feature (1)..(254): Homolog of NCBI NO: 18399730 NR Description: membrane protein common family
  misc_feature (1)..(254): Homolog of NCBI NO: 18404877 NR Description: membrane protein common family
  misc_feature (1)..(254): Homolog of NCBI NO: 25347303 NR Description: protein F3O9.16 [imported] - Arabidopsis thaliana
  misc_feature (1)..(256): Homolog of NCBI NO: 25347301 NR Description: T8K14.13 [imported] - Arabidopsis thaliana
  misc_feature (1)..(256): Homolog of NCBI NO: 18412377 NR Description: membrane protein common family
MVAYIQGEGDKICKRTITVTKAMKHPVYVYYQLENFYQNHRRYVKSRNDAQLRSPKEEHDVKTCAPEDNVGGEPIVPCGLVAWSLFNDTYSFSRNSQQLLVNKKGISWKSDRENKFGKNVFPKNFQKGAPIGGGTLNISKPLSEQEDLIVWMRTAALPTFRKLYGKIETDLHAGDTITVLLQNNYNTYSFNGQKKLVLSTTSWLGGRNDFLGIAYLTVGSICLFLAVTFAVLYLVKPRQLGDPSYLSWNRSAGGLQ

SEQ ID NO: 38178 - protein, 234 aa, Arabidopsis thaliana
  peptide (1)..(234): Ceres Seq. ID no. 12329137
  misc_feature (1)..(222): Pfam Name: LEM3 (ligand-effect modulator 3) family / CDC50 family Pfam Description: LEM3 (ligand-effect modulator 3) family / CDC50
  misc_feature (1)..(225): Homolog of NCBI NO: 19570056 NR Description: similar to membrane protein common family
  misc_feature (1)..(216): Homolog of NCBI NO: 9757735 NR Description: gb|AAD25612.1~gene_id:MCL19.21~similar to unknown
  misc_feature (1)..(230): Homolog of NCBI NO: 21554054 NR Description: unknown [Arabidopsis thaliana]
  misc_feature (1)..(230): Homolog of NCBI NO: 18422638 NR Description: membrane protein common family
  misc_feature (1)..(232): Homolog of NCBI NO: 15219220 NR Description: membrane protein common family; protein id:
  misc_feature (1)..(232): Homolog of NCBI NO: 18399730 NR Description: membrane protein common family
  misc_feature (1)..(232): Homolog of NCBI NO: 18404877 NR Description: membrane protein common family
  misc_feature (1)..(232): Homolog of NCBI NO: 25347303 NR Description: protein F3O9.16 [imported] - Arabidopsis thaliana
  misc_feature (1)..(234): Homolog of NCBI NO: 25347301 NR Description: T8K14.13 [imported] - Arabidopsis thaliana
  misc_feature (1)..(234): Homolog of NCBI NO: 18412377 NR Description: membrane protein common family
MKHPVYVYYQLENFYQNHRRYVKSRNDAQLRSPKEEHDVKTCAPEDNVGGEPIVPCGLVAWSLFNDTYSFSRNSQQLLVNKKGISWKSDRENKFGKNVFPKNFQKGAPIGGGTLNISKPLSEQEDLIVWMRTAALPTFRKLYGKIETDLHAGDTITVLLQNNYNTYSFNGQKKLVLSTTSWLGGRNDFLGIAYLTVGSICLFLAVTFAVLYLVKPRQLGDPSYLSWNRSAGGLQ

SEQ ID NO: 38179 - DNA, 1284 bp, Arabidopsis thaliana
  misc_feature (1)..(1284): Ceres Seq. ID no. 12579452
  misc_feature: MA Experiment ID: 20000182 Result: Up-regulated in Transcription
  misc_feature: MA Experiment 20000182 PARAMETER Experiment Name: At_2mM_SA_P Parameter: Age (day) Value: 14
  misc_feature: MA Experiment 20000182 PARAMETER Experiment Name: At_2mM_SA_P Parameter: Organism Value: A. thaliana
  misc_feature: MA Experiment 20000182 PARAMETER Experiment Name: At_2mM_SA_P Parameter: Plant Line Value: WS
  misc_feature: MA Experiment 20000182 PARAMETER Experiment Name: At_2mM_SA_P Parameter: Timepoint (hr) Value: 6
  misc_feature: MA Experiment 20000182 PARAMETER Experiment Name: At_2mM_SA_P Parameter: Tissue Value: Aerial
  misc_feature: MA Experiment 20000182 PARAMETER Experiment Name: At_2mM_SA_P Parameter: Treatment Value: 2mM SA vs. No Treatment
  misc_feature: MA Experiment ID: 20000184 Result: Down-regulated in Transcription
  misc_feature: MA Experiment 20000184 PARAMETER Experiment Name: At_Shoots__P Parameter: Age (day) Value: 7
  misc_feature: MA Experiment 20000184 PARAMETER Experiment Name: At_Shoots__P Parameter: Tissue Value: Shoots vs. Whole Plant
  misc_feature: MA Experiment ID: 20000227 Result: Down-regulated in Transcription
  misc_feature: MA Experiment 20000227 PARAMETER Experiment Name: At_Root-Tips-vs-Tops_P Parameter: Tissue Value: Root Tips vs. Root Tops
  misc_feature: MA Experiment ID: 20000234 Result: Down-regulated in Transcription
  misc_feature: MA Experiment 20000234 PARAMETER Experiment Name: At_Siliques_P Parameter: Age (day) Value: 21
  misc_feature: MA Experiment 20000234 PARAMETER Experiment Name: At_Siliques_P Parameter: Organism Value: A. thaliana
  misc_feature: MA Experiment 20000234 PARAMETER Experiment Name: At_Siliques_P Parameter: Plant Line Value: WS
  misc_feature: MA Experiment 20000234 PARAMETER Experiment Name: At_Siliques_P Parameter: Tissue Value: Less Than 5mm Siliques vs. Whole Plant
  misc_feature: MA Experiment ID: 20000235 Result: Down-regulated in Transcription
  misc_feature: MA Experiment 20000235 PARAMETER Experiment Name: At_Siliques_P Parameter: Age (day) Value: 21
  misc_feature: MA Experiment 20000235 PARAMETER Experiment Name: At_Siliques_P Parameter: Organism Value: A. thaliana
  misc_feature: MA Experiment 20000235 PARAMETER Experiment Name: At_Siliques_P Parameter: Plant Line Value: WS
  misc_feature: MA Experiment 20000235 PARAMETER Experiment Name: At_Siliques_P Parameter: Tissue Value: 5-10mm Siliques vs. Whole Plant
  misc_feature: MA Experiment ID: 20000265 Result: Down-regulated in Transcription
  misc_feature: MA Experiment 20000265 PARAMETER Experiment Name: At_Open_Flower_P Parameter: Age (day) Value: 21
  misc_feature: MA Experiment 20000265 PARAMETER Experiment Name: At_Open_Flower_P Parameter: Plant Line Value: WS
  misc_feature: MA Experiment 20000265 PARAMETER Experiment Name: At_Open_Flower_P Parameter: Tissue Value: Closed Flower vs. Whole Plant
  misc_feature: MA Experiment ID: 20000286 Result: Down-regulated in Transcription
  misc_feature: MA Experiment 20000286 PARAMETER Experiment Name: At_Open_Flower_P Parameter: Age (day) Value: 21
  misc_feature: MA Experiment 20000286 PARAMETER Experiment Name: At_Open_Flower_P Parameter: Plant Line Value: WS
  misc_feature: MA Experiment 20000286 PARAMETER Experiment Name: At_Open_Flower_P Parameter: Tissue Value: Half Open vs. Whole Plant
  misc_feature: MA Experiment ID: 20000456 Result: Up-regulated in Transcription
  misc_feature: MA Experiment 20000456 PARAMETER Experiment Name: At_100uM_BA_P Parameter: Age (day) Value: 14
  misc_feature: MA Experiment 20000456 PARAMETER Experiment Name: At_100uM_BA_P Parameter: Organism Value: A. thaliana
  misc_feature: MA Experiment 20000456 PARAMETER Experiment Name: At_100uM_BA_P Parameter: Plant Line Value: WS
  misc_feature: MA Experiment 20000456 PARAMETER Experiment Name: At_100uM_BA_P Parameter: Timepoint (hr) Value: 6
  misc_feature: MA Experiment 20000456 PARAMETER Experiment Name: At_100uM_BA_P Parameter: Tissue Value: Aerial
  misc_feature: MA Experiment 20000456 PARAMETER Experiment Name: At_100uM_BA_P Parameter: Treatment Value: 100uM BA vs. No Treatment
  misc_feature: MA Experiment ID: 20000506 Result: Up-regulated in Transcription
  misc_feature: MA Experiment 20000506 PARAMETER Experiment Name: At_Wounding_P Parameter: Organism Value: A. thaliana
  misc_feature: MA Experiment 20000506 PARAMETER Experiment Name: At_Wounding_P Parameter: Plant Line Value: WS
  misc_feature: MA Experiment 20000506 PARAMETER Experiment Name: At_Wounding_P Parameter: Timepoint (hr) Value: 6
  misc_feature: MA Experiment 20000506 PARAMETER Experiment Name: At_Wounding_P Parameter: Tissue Value: Aerial
  misc_feature: MA Experiment 20000506 PARAMETER Experiment Name: At_Wounding_P Parameter: Treatment Value: Wounding vs. No Wounding
  misc_feature: MA Experiment ID: 20000709 Result: Up-regulated in Transcription
  misc_feature: MA Experiment 20000709 PARAMETER Experiment Name: At_15mM_NH4NO3_L-to-H_P Parameter: Age (hr) Value: 14
  misc_feature: MA Experiment 20000709 PARAMETER Experiment Name: At_15mM_NH4NO3_L-to-H_P Parameter: Organism Value: A. thaliana
  misc_feature: MA Experiment 20000709 PARAMETER Experiment Name: At_15mM_NH4NO3_L-to-H_P Parameter: Plant Line Value: WS
  misc_feature: MA Experiment 20000709 PARAMETER Experiment Name: At_15mM_NH4NO3_L-to-H_P Parameter: Timepoint (hr) Value: 4
  misc_feature: MA Experiment 20000709 PARAMETER Experiment Name: At_15mM_NH4NO3_L-to-H_P Parameter: Tissue Value: Aerial
  misc_feature: MA Experiment 20000709 PARAMETER Experiment Name: At_15mM_NH4NO3_L-to-H_P Parameter: Treatment Value: 15mM NH4NO3 vs. 30mM Mannitol
  misc_feature: MA Experiment ID: 20000794 Result: Down-regulated in Transcription
  misc_feature: MA Experiment 20000794 PARAMETER Experiment Name: At_Petals_P Parameter: Age (day) Value: 23-25 days
  misc_feature: MA Experiment 20000794 PARAMETER Experiment Name: At_Petals_P Parameter: Plant Line Value: WS
  misc_feature: MA Experiment 20000794 PARAMETER Experiment Name: At_Petals_P Parameter: Tissue Value: Petals vs. Whole plant
  misc_feature: MA Experiment ID: 20001248 Result: Down-regulated in Transcription
  misc_feature: MA Experiment 20001248 PARAMETER Experiment Name: At_Far-red-induction_P Parameter: Age (day) Value: 7
  misc_feature: MA Experiment 20001248 PARAMETER Experiment Name: At_Far-red-induction_P Parameter: Light Value: Far-red vs. White
  misc_feature: MA Experiment 20001248 PARAMETER Experiment Name: At_Far-red-induction_P Parameter: Organism Value: A. thaliana
  misc_feature: MA Experiment 20001248 PARAMETER Experiment Name: At_Far-red-induction_P Parameter: Plant Line Value: Columbia
  misc_feature: MA Experiment 20001248 PARAMETER Experiment Name: At_Far-red-induction_P Parameter: Timepoint (hr) Value: 4
  misc_feature: MA Experiment 20001248 PARAMETER Experiment Name: At_Far-red-induction_P Parameter: Tissue Value: Whole Plant
  misc_feature: MA Experiment ID: 20001450 Result: Down-regulated in Transcription
  misc_feature: MA Experiment 20001450 PARAMETER Experiment Name: At_Far-red-induction_P Parameter: Age (day) Value: 7
  misc_feature: MA Experiment 20001450 PARAMETER Experiment Name: At_Far-red-induction_P Parameter: Light Value: Far-red vs. White
  misc_feature: MA Experiment 20001450 PARAMETER Experiment Name: At_Far-red-induction_P Parameter: Organism Value: A. thaliana
  misc_feature: MA Experiment 20001450 PARAMETER Experiment Name: At_Far-red-induction_P Parameter: Plant Line Value: Columbia
  misc_feature: MA Experiment 20001450 PARAMETER Experiment Name: At_Far-red-induction_P Parameter: Timepoint (hr) Value: 8
  misc_feature: MA Experiment 20001450 PARAMETER Experiment Name: At_Far-red-induction_P Parameter: Tissue Value: Whole Plant
  misc_feature: MA Experiment ID: 20001451 Result: Down-regulated in Transcription
  misc_feature: MA Experiment 20001451 PARAMETER Experiment Name: At_Far-red-induction_P Parameter: Age (day) Value: 7
  misc_feature: MA Experiment 20001451 PARAMETER Experiment Name: At_Far-red-induction_P Parameter: Light Value: Far-red vs. White
  misc_feature: MA Experiment 20001451 PARAMETER Experiment Name: At_Far-red-induction_P Parameter: Organism Value: A. thaliana
  misc_feature: MA Experiment 20001451 PARAMETER Experiment Name: At_Far-red-induction_P Parameter: Plant Line Value: Columbia
  misc_feature: MA Experiment 20001451 PARAMETER Experiment Name: At_Far-red-induction_P Parameter: Timepoint (hr) Value: 24
  misc_feature: MA Experiment 20001451 PARAMETER Experiment Name: At_Far-red-induction_P Parameter: Tissue Value: Whole Plant
aagaataaaagaagtaacggaatatattgaactcatcagaagctgaatcggagaagaagaattaacgatgacggcgacgaacaagcaggtggtattgaaaaactacgtgagtggtttccctaaggaatccgatttcgatttcaaaaccaccaccgtcgaatttaaacttccgggagggtctaactcagttctggtgaagaatctctacttgtcatgcgatccttacatgaggattcgcatggggaaacctgatccttccactgctgctcttgctcaagcttacgctcccggcaagccaatctttgggtatggagtgtctagagttatagaatctgggcatccagattacaagaaaggtgacttactctgggggatagttggatgggaggagtatagtgttattactccaatgactcacatgcatttcaagatccaacataccgatattccattatcttactacactggacttctcggtatgcctggtatgactgcctatgctgggttttatgaagtttgttctccaaaggaaggagagacagtttatgtgtcagctgcatctggtgctgttggtcagcttgtgggacaatttgctaagatgatgggctgttatgttgttggaagcgccggaagtacagagaaggttgatcttctgaagaccaagtttgggtttgatgatgcatttaactacaaggaagaaccagaccttagtgctgccctcaaaaggtgtttccctacaggcattgacatatactttgaaaacgtaggaggcaaaatgctagacgcagtgctattaaacatgaacccacacggacgtatcgctgtgtgtggaatgatctcacagtacaatcttgaaaaccaagaaggtgtacacaacctatccaacataatctacaaaagaatccgcattcaaggctttgcagtgtttgatttctacgagaaatactcaaagttcttggattttgtgcttccgcacattaaagaagggaagatcacgtacgtggaagatgtagctgatgggcttgagaaaggtcctgaagctcttgtgggactcttccatggtaagaacgttggaaaacaagttgttgttattgctcgtgagtgaatatatatatctatgggagtaatgttgtatgtatccaaaagattttgtatgggtgttcgaatccaagcctgaggttttggtttataaatactagattactagtaattcaagtaattttttaatatgtatcaatttgttcgttcgttatggttttgaatcattttctgtgtgacttgttt

SEQ ID NO: 38180 - protein, 345 aa, Arabidopsis thaliana
  peptide (1)..(345): Ceres Seq. ID no. 12579453
  misc_feature (126)..(342): Pfam Name: Zinc-binding dehydrogenase Pfam Description: Zinc-binding dehydrogenase
  misc_feature (1)..(345): Homolog of NCBI NO: 21593645 NR Description: allyl alcohol dehydrogenase, putative
  misc_feature (2)..(345): Homolog of NCBI NO: 15228456 NR Description: putative NADP-dependent oxidoreductase; protein
  misc_feature (1)..(345): Homolog of NCBI NO: 1362014 NR Description: probable NADPH2:quinone reductase (EC 1.6.5.5) P2
  misc_feature (1)..(345): Homolog of NCBI NO: 21554121 NR Description: quinone oxidoreductase-like protein [Arabidopsis
  misc_feature (1)..(345): Homolog of NCBI NO: 15237890 NR Description: quinone oxidoreductase - like protein
  misc_feature (1)..(345): Homolog of NCBI NO: 21539447 NR Description: quinone oxidoreductase-like protein [Arabidopsis
  misc_feature (1)..(345): Homolog of NCBI NO: 15237888 NR Description: quinone oxidoreductase -like protein; protein id:
  misc_feature (1)..(345): Homolog of NCBI NO: 11358742 NR Description: quinone oxidoreductase-like protein - Arabidopsis
  misc_feature (1)..(345): Homolog of NCBI NO: 17529140 NR Description: putative quinone oxidoreductase [Arabidopsis
  misc_feature (1)..(345): Homolog of NCBI NO: 22326861 NR Description: quinone oxidoreductase - like protein
MTATNKQVVLKNYVSGFPKESDFDFKTTTVEFKLPGGSNSVLVKNLYLSCDPYMRIRMGKPDPSTAALAQAYAPGKPIFGYGVSRVIESGHPDYKKGDLLWGIVGWEEYSVITPMTHMHFKIQHTDIPLSYYTGLLGMPGMTAYAGFYEVCSPKEGETVYVSAASGAVGQLVGQFAKMMGCYVVGSAGSTEKVDLLKTKFGFDDAFNYKEEPDLSAALKRCFPTGIDIYFENVGGKMLDAVLLNMNPHGRIAVCGMISQYNLENQEGVHNLSNIIYKRIRIQGFAVFDFYEKYSKFLDFVLPHIKEGKITYVEDVADGLEKGPEALVGLFHGKNVGKQVVVIARE

SEQ ID NO: 38181 - protein, 292 aa, Arabidopsis thaliana
  peptide (1)..(292): Ceres Seq. ID no. 12579454
  misc_feature (73)..(289): Pfam Name: Zinc-binding dehydrogenase Pfam Description: Zinc-binding dehydrogenase
  misc_feature (1)..(292): Homolog of NCBI NO: 21593645 NR Description: allyl alcohol dehydrogenase, putative
  misc_feature (1)..(292): Homolog of NCBI NO: 15228456 NR Description: putative NADP-dependent oxidoreductase; protein
  misc_feature (1)..(292): Homolog of NCBI NO: 1362014 NR Description: probable NADPH2:quinone reductase (EC 1.6.5.5) P2
  misc_feature (1)..(292): Homolog of NCBI NO: 21554121 NR Description: quinone oxidoreductase-like protein [Arabidopsis
  misc_feature (1)..(292): Homolog of NCBI NO: 15237890 NR Description: quinone oxidoreductase - like protein
  misc_feature (1)..(292): Homolog of NCBI NO: 21539447 NR Description: quinone oxidoreductase-like protein [Arabidopsis
  misc_feature (1)..(292): Homolog of NCBI NO: 15237888 NR Description: quinone oxidoreductase -like protein; protein id:
  misc_feature (1)..(292): Homolog of NCBI NO: 11358742 NR Description: quinone oxidoreductase-like protein - Arabidopsis
  misc_feature (1)..(292): Homolog of NCBI NO: 17529140 NR Description: putative quinone oxidoreductase [Arabidopsis
  misc_feature (1)..(292): Homolog of NCBI NO: 22326861 NR Description: quinone oxidoreductase - like protein
MRIRMGKPDPSTAALAQAYAPGKPIFGYGVSRVIESGHPDYKKGDLLWGIVGWEEYSVITPMTHMHFKIQHTDIPLSYYTGLLGMPGMTAYAGFYEVCSPKEGETVYVSAASGAVGQLVGQFAKMMGCYVVGSAGSTEKVDLLKTKFGFDDAFNYKEEPDLSAALKRCFPTGIDIYFENVGGKMLDAVLLNMNPHGRIAVCGMISQYNLENQEGVHNLSNIIYKRIRIQGFAVFDFYEKYSKFLDFVLPHIKEGKITYVEDVADGLEKGPEALVGLFHGKNVGKQVVVIARE

SEQ ID NO: 38182 - protein, 288 aa, Arabidopsis thaliana
  peptide (1)..(288): Ceres Seq. ID no. 12579455
  misc_feature (69)..(285): Pfam Name: Zinc-binding dehydrogenase Pfam Description: Zinc-binding dehydrogenase
  misc_feature (1)..(288): Homolog of NCBI NO: 21593645 NR Description: allyl alcohol dehydrogenase, putative
  misc_feature (1)..(288): Homolog of NCBI NO: 15228456 NR Description: putative NADP-dependent oxidoreductase; protein
  misc_feature (1)..(288): Homolog of NCBI NO: 1362014 NR Description: probable NADPH2:quinone reductase (EC 1.6.5.5) P2
  misc_feature (1)..(288): Homolog of NCBI NO: 21554121 NR Description: quinone oxidoreductase-like protein [Arabidopsis
  misc_feature (1)..(288): Homolog of NCBI NO: 15237890 NR Description: quinone oxidoreductase - like protein
  misc_feature (1)..(288): Homolog of NCBI NO: 21539447 NR Description: quinone oxidoreductase-like protein [Arabidopsis
  misc_feature (1)..(288): Homolog of NCBI NO: 15237888 NR Description: quinone oxidoreductase -like protein; protein id:
  misc_feature (1)..(288): Homolog of NCBI NO: 11358742 NR Description: quinone oxidoreductase-like protein - Arabidopsis
  misc_feature (1)..(288): Homolog of NCBI NO: 17529140 NR Description: putative quinone oxidoreductase [Arabidopsis
  misc_feature (1)..(288): Homolog of NCBI NO: 22326861 NR Description: quinone oxidoreductase - like protein
MGKPDPSTAALAQAYAPGKPIFGYGVSRVIESGHPDYKKGDLLWGIVGWEEYSVITPMTHMHFKIQHTDIPLSYYTGLLGMPGMTAYAGFYEVCSPKEGETVYVSAASGAVGQLVGQFAKMMGCYVVGSAGSTEKVDLLKTKFGFDDAFNYKEEPDLSAALKRCFPTGIDIYFENVGGKMLDAVLLNMNPHGRIAVCGMISQYNLENQEGVHNLSNIIYKRIRIQGFAVFDFYEKYSKFLDFVLPHIKEGKITYVEDVADGLEKGPEALVGLFHGKNVGKQVVVIARE

SEQ ID NO: 38183 - DNA, 1458 bp, Arabidopsis thaliana
  misc_feature (1)..(1458): Ceres Seq. ID no. 13602851
  misc_feature: MA Experiment ID: 108434 Result: Down-regulated in Transcription
  misc_feature: MA Experiment 108434 PARAMETER Experiment Name: At_Root_Tips_cDNA_P Parameter: Tissue Value: Root Tips
  misc_feature: MA Experiment ID: 108435 Result: Down-regulated in Transcription
  misc_feature: MA Experiment 108435 PARAMETER Experiment Name: At_stm_Mutants_cDNA_P Parameter: Plant Line Value: wt Landsburg vs stm
  misc_feature: MA Experiment 108435 PARAMETER Experiment Name: At_stm_Mutants_cDNA_P Parameter: Tissue Value: Shoot Apical Meristem Region
  misc_feature: MA Experiment ID: 108464 Result: Up-regulated in Transcription
  misc_feature: MA Experiment 108464 PARAMETER Experiment Name: At_Germinating_Seeds_cDNA_P Parameter: Age (day) Value: 4 vs. 0
  misc_feature: MA Experiment 108464 PARAMETER Experiment Name: At_Germinating_Seeds_cDNA_P Parameter: Tissue Value: Germinating Seeds
  misc_feature: MA Experiment ID: 108561 Result: Down-regulated in Transcription
  misc_feature: MA Experiment 108561 PARAMETER Experiment Name: At_100uM_ABA_cDNA_P Parameter: Timepoint (hr) Value: 6
  misc_feature: MA Experiment 108561 PARAMETER Experiment Name: At_100uM_ABA_cDNA_P Parameter: Tissue Value: Aerial
  misc_feature: MA Experiment 108561 PARAMETER Experiment Name: At_100uM_ABA_cDNA_P Parameter: Treatment Value: 100uM ABA vs. No Treatment
  misc_feature: MA Experiment ID: 108576 Result: Down-regulated in Transcription
  misc_feature: MA Experiment 108576 PARAMETER Experiment Name: At_42deg_Heat_cDNA_P Parameter: Temperature (deg C) Value: 42 vs. 22
  misc_feature: MA Experiment 108576 PARAMETER Experiment Name: At_42deg_Heat_cDNA_P Parameter: Timepoint (hr) Value: 1
  misc_feature: MA Experiment 108576 PARAMETER Experiment Name: At_42deg_Heat_cDNA_P Parameter: Tissue Value: Aerial
  misc_feature: MA Experiment ID: 108579 Result: Up-regulated in Transcription
  misc_feature: MA Experiment 108579 PARAMETER Experiment Name: At_4deg_Cold_cDNA_P Parameter: Temperature (deg C) Value: 4 vs. 22
  misc_feature: MA Experiment 108579 PARAMETER Experiment Name: At_4deg_Cold_cDNA_P Parameter: Timepoint (hr) Value: 6
  misc_feature: MA Experiment 108579 PARAMETER Experiment Name: At_4deg_Cold_cDNA_P Parameter: Tissue Value: Aerial
  misc_feature: MA Experiment ID: 108595 Result: Down-regulated in Transcription
  misc_feature: MA Experiment 108595 PARAMETER Experiment Name: At_Ler-pi_Ovule_cDNA_P Parameter: Plant Line Value: null
  misc_feature: MA Experiment ID: 108605 Result: Down-regulated in Transcription
  misc_feature: MA Experiment 108605 PARAMETER Experiment Name: At_100uM_ABA_cDNA_P Parameter: Timepoint (hr) Value: 6
  misc_feature: MA Experiment 108605 PARAMETER Experiment Name: At_100uM_ABA_cDNA_P Parameter: Tissue Value: Aerial
  misc_feature: MA Experiment 108605 PARAMETER Experiment Name: At_100uM_ABA_cDNA_P Parameter: Treatment Value: 100uM ABA vs. No Treatment
  misc_feature: MA Experiment ID: 108607 Result: Down-regulated in Transcription
  misc_feature: MA Experiment 108607 PARAMETER Experiment Name: At_100uM_ABA_cDNA_P Parameter: Timepoint (hr) Value: 4
  misc_feature: MA Experiment 108607 PARAMETER Experiment Name: At_100uM_ABA_cDNA_P Parameter: Tissue Value: Aerial
  misc_feature: MA Experiment 108607 PARAMETER Experiment Name: At_100uM_ABA_cDNA_P Parameter: Treatment Value: 100uM ABA vs. No Treatment
  misc_feature: MA Experiment ID: 108668 Result: Down-regulated in Transcription
  misc_feature: MA Experiment 108668 PARAMETER Experiment Name: At_2mM_SA_cDNA_P Parameter: Plant Line Value: WS
  misc_feature: MA Experiment 108668 PARAMETER Experiment Name: At_2mM_SA_cDNA_P Parameter: Timepoint (hr) Value: 6
  misc_feature: MA Experiment 108668 PARAMETER Experiment Name: At_2mM_SA_cDNA_P Parameter: Treatment Value: 2mM SA vs. No Treatment
  misc_feature: MA Experiment ID: 20000069 Result: Down-regulated in Transcription
  misc_feature: MA Experiment 20000069 PARAMETER Experiment Name: At_100uM_ABA_Mutants_cDNA_P Parameter: Plant Line Value: CS23
  misc_feature: MA Experiment 20000069 PARAMETER Experiment Name: At_100uM_ABA_Mutants_cDNA_P Parameter: Timepoint (hr) Value: 6
  misc_feature: MA Experiment 20000069 PARAMETER Experiment Name: At_100uM_ABA_Mutants_cDNA_P Parameter: Tissue Value: Aerial
  misc_feature: MA Experiment 20000069 PARAMETER Experiment Name: At_100uM_ABA_Mutants_cDNA_P Parameter: Treatment Value: 100uM ABA vs. No Treatment
  misc_feature: MA Experiment ID: 20000070 Result: Down-regulated in Transcription
  misc_feature: MA Experiment 20000070 PARAMETER Experiment Name: At_100uM_ABA_Mutants_cDNA_P Parameter: Plant Line Value: CS24
  misc_feature: MA Experiment 20000070 PARAMETER Experiment Name: At_100uM_ABA_Mutants_cDNA_P Parameter: Timepoint (hr) Value: 6
  misc_feature: MA Experiment 20000070 PARAMETER Experiment Name: At_100uM_ABA_Mutants_cDNA_P Parameter: Tissue Value: Aerial
  misc_feature: MA Experiment 20000070 PARAMETER Experiment Name: At_100uM_ABA_Mutants_cDNA_P Parameter: Treatment Value: 100uM ABA vs. No Treatment
  misc_feature: MA Experiment ID: 20000087 Result: Down-regulated in Transcription
  misc_feature: MA Experiment 20000087 PARAMETER Experiment Name: At_100uM_ABA_Mutants_cDNA_P Parameter: Plant Line Value: WS
  misc_feature: MA Experiment 20000087 PARAMETER Experiment Name: At_100uM_ABA_Mutants_cDNA_P Parameter: Timepoint (hr) Value: 6
  misc_feature: MA Experiment 20000087 PARAMETER Experiment Name: At_100uM_ABA_Mutants_cDNA_P Parameter: Tissue Value: Aerial
  misc_feature: MA Experiment 20000087 PARAMETER Experiment Name: At_100uM_ABA_Mutants_cDNA_P Parameter: Treatment Value: 100uM ABA vs. No Treatment
  misc_feature: MA Experiment ID: 20000112 Result: Down-regulated in Transcription
  misc_feature: MA Experiment 20000112 PARAMETER Experiment Name: At_42deg_Heat_cDNA_P Parameter: Temperature (deg C) Value: 42 vs. 22
  misc_feature: MA Experiment 20000112 PARAMETER Experiment Name: At_42deg_Heat_cDNA_P Parameter: Timepoint (hr) Value: 2
  misc_feature: MA Experiment 20000112 PARAMETER Experiment Name: At_42deg_Heat_cDNA_P Parameter: Tissue Value: Aerial
  misc_feature: MA Experiment ID: 20000113 Result: Down-regulated in Transcription
  misc_feature: MA Experiment 20000113 PARAMETER Experiment Name: At_42deg_Heat_cDNA_P Parameter: Temperature (deg C) Value: 42 vs. 22
  misc_feature: MA Experiment 20000113 PARAMETER Experiment Name: At_42deg_Heat_cDNA_P Parameter: Timepoint (hr) Value: 8
  misc_feature: MA Experiment 20000113 PARAMETER Experiment Name: At_42deg_Heat_cDNA_P Parameter: Tissue Value: Aerial
  misc_feature: MA Experiment ID: 20000117 Result: Down-regulated in Transcription
  misc_feature: MA Experiment 20000117 PARAMETER Experiment Name: At_100uM_ABA_Mutants_cDNA_P Parameter: Plant Line Value: Columbia
  misc_feature: MA Experiment 20000117 PARAMETER Experiment Name: At_100uM_ABA_Mutants_cDNA_P Parameter: Timepoint (hr) Value: 6
  misc_feature: MA Experiment 20000117 PARAMETER Experiment Name: At_100uM_ABA_Mutants_cDNA_P Parameter: Tissue Value: Aerial
  misc_feature: MA Experiment 20000117 PARAMETER Experiment Name: At_100uM_ABA_Mutants_cDNA_P Parameter: Treatment Value: 100uM ABA vs. No Treatment
  misc_feature: MA Experiment ID: 20000144 Result: Down-regulated in Transcription
  misc_feature: MA Experiment 20000144 PARAMETER Experiment Name: At_42deg_Heat_cDNA_P Parameter: Temperature (deg C) Value: 42 vs. 22
  misc_feature: MA Experiment 20000144 PARAMETER Experiment Name: At_42deg_Heat_cDNA_P Parameter: Timepoint (hr) Value: 1
  misc_feature: MA Experiment 20000144 PARAMETER Experiment Name: At_42deg_Heat_cDNA_P Parameter: Tissue Value: Aerial
  misc_feature: MA Experiment ID: 20000169 Result: Down-regulated in Transcription
  misc_feature: MA Experiment 20000169 PARAMETER Experiment Name: At_100uM_ABA_P Parameter: Age (day) Value: 14
  misc_feature: MA Experiment 20000169 PARAMETER Experiment Name: At_100uM_ABA_P Parameter: Organism Value: A. thaliana
  misc_feature: MA Experiment 20000169 PARAMETER Experiment Name: At_100uM_ABA_P Parameter: Plant Line Value: WS
  misc_feature: MA Experiment 20000169 PARAMETER Experiment Name: At_100uM_ABA_P Parameter: Timepoint (hr) Value: 6
  misc_feature: MA Experiment 20000169 PARAMETER Experiment Name: At_100uM_ABA_P Parameter: Tissue Value: Aerial
  misc_feature: MA Experiment 20000169 PARAMETER Experiment Name: At_100uM_ABA_P Parameter: Treatment Value: 100uM ABA vs. No Treatment
  misc_feature: MA Experiment ID: 20000171 Result: Down-regulated in Transcription
  misc_feature: MA Experiment 20000171 PARAMETER Experiment Name: At_42deg_Heat_P Parameter: Age (day) Value: 14
  misc_feature: MA Experiment 20000171 PARAMETER Experiment Name: At_42deg_Heat_P Parameter: Organism Value: A. thaliana
  misc_feature: MA Experiment 20000171 PARAMETER Experiment Name: At_42deg_Heat_P Parameter: Plant Line Value: WS
  misc_feature: MA Experiment 20000171 PARAMETER Experiment Name: At_42deg_Heat_P Parameter: Temperature (deg C) Value: 42 vs. 22
  misc_feature: MA Experiment 20000171 PARAMETER Experiment Name: At_42deg_Heat_P Parameter: Timepoint (hr) Value: 1
  misc_feature: MA Experiment 20000171 PARAMETER Experiment Name: At_42deg_Heat_P Parameter: Tissue Value: Aerial
  misc_feature: MA Experiment ID: 20000182 Result: Down-regulated in Transcription
  misc_feature: MA Experiment 20000182 PARAMETER Experiment Name: At_2mM_SA_P Parameter: Age (day) Value: 14
  misc_feature: MA Experiment 20000182 PARAMETER Experiment Name: At_2mM_SA_P Parameter: Organism Value: A. thaliana
  misc_feature: MA Experiment 20000182 PARAMETER Experiment Name: At_2mM_SA_P Parameter: Plant Line Value: WS
  misc_feature: MA Experiment 20000182 PARAMETER Experiment Name: At_2mM_SA_P Parameter: Timepoint (hr) Value: 6
  misc_feature: MA Experiment 20000182 PARAMETER Experiment Name: At_2mM_SA_P Parameter: Tissue Value: Aerial
  misc_feature: MA Experiment 20000182 PARAMETER Experiment Name: At_2mM_SA_P Parameter: Treatment Value: 2mM SA vs. No Treatment
  misc_feature: MA Experiment ID: 20000185 Result: Down-regulated in Transcription
  misc_feature: MA Experiment 20000185 PARAMETER Experiment Name: At_Roots__P Parameter: Age (day) Value: 7 vs. 21
  misc_feature: MA Experiment 20000185 PARAMETER Experiment Name: At_Roots__P Parameter: Organism Value: A. thaliana
  misc_feature: MA Experiment 20000185 PARAMETER Experiment Name: At_Roots__P Parameter: Tissue Value: Roots vs. Whole Plant
  misc_feature: MA Experiment ID: 20000213 Result: Up-regulated in Transcription
  misc_feature: MA Experiment 20000213 PARAMETER Experiment Name: At_4deg_Cold_P Parameter: Timepoint (hr) Value: 2
  misc_feature: MA Experiment ID: 20000234 Result: Down-regulated in Transcription
  misc_feature: MA Experiment 20000234 PARAMETER Experiment Name: At_Siliques_P Parameter: Age (day) Value: 21
  misc_feature: MA Experiment 20000234 PARAMETER Experiment Name: At_Siliques_P Parameter: Organism Value: A. thaliana
  misc_feature: MA Experiment 20000234 PARAMETER Experiment Name: At_Siliques_P Parameter: Plant Line Value: WS
  misc_feature: MA Experiment 20000234 PARAMETER Experiment Name: At_Siliques_P Parameter: Tissue Value: Less Than 5mm Siliques vs. Whole Plant
  misc_feature: MA Experiment ID: 20000235 Result: Down-regulated in Transcription
  misc_feature: MA Experiment 20000235 PARAMETER Experiment Name: At_Siliques_P Parameter: Age (day) Value: 21
  misc_feature: MA Experiment 20000235 PARAMETER Experiment Name: At_Siliques_P Parameter: Organism Value: A. thaliana
  misc_feature: MA Experiment 20000235 PARAMETER Experiment Name: At_Siliques_P Parameter: Plant Line Value: WS
  misc_feature: MA Experiment 20000235 PARAMETER Experiment Name: At_Siliques_P Parameter: Tissue Value: 5-10mm Siliques vs. Whole Plant
  misc_feature: MA Experiment ID: 20000264 Result: Down-regulated in Transcription
  misc_feature: MA Experiment 20000264 PARAMETER Experiment Name: At_Open_Flower_P Parameter: Age (day) Value: 21
  misc_feature: MA Experiment 20000264 PARAMETER Experiment Name: At_Open_Flower_P Parameter: Plant Line Value: WS
  misc_feature: MA Experiment 20000264 PARAMETER Experiment Name: At_Open_Flower_P Parameter: Tissue Value: Open Flower vs. Whole Plant
  misc_feature: MA Experiment ID: 20000265 Result: Down-regulated in Transcription
  misc_feature: MA Experiment 20000265 PARAMETER Experiment Name: At_Open_Flower_P Parameter: Age (day) Value: 21
  misc_feature: MA Experiment 20000265 PARAMETER Experiment Name: At_Open_Flower_P Parameter: Plant Line Value: WS
  misc_feature: MA Experiment 20000265 PARAMETER Experiment Name: At_Open_Flower_P Parameter: Tissue Value: Closed Flower vs. Whole Plant
  misc_feature: MA Experiment ID: 20000268 Result: Down-regulated in Transcription
  misc_feature: MA Experiment 20000268 PARAMETER Experiment Name: At_100mM_NaCl__P Parameter: Age (day) Value: 14
  misc_feature: MA Experiment 20000268 PARAMETER Experiment Name: At_100mM_NaCl__P Parameter: Organism Value: A. thaliana
  misc_feature: MA Experiment 20000268 PARAMETER Experiment Name: At_100mM_NaCl__P Parameter: Plant Line Value: WS
  misc_feature: MA Experiment 20000268 PARAMETER Experiment Name: At_100mM_NaCl__P Parameter: Timepoint (hr) Value: 6
  misc_feature: MA Experiment 20000268 PARAMETER Experiment Name: At_100mM_NaCl__P Parameter: Tissue Value: Whole Plant
  misc_feature: MA Experiment 20000268 PARAMETER Experiment Name: At_100mM_NaCl__P Parameter: Treatment Value: 100mM NaCl vs. No Treatment
  misc_feature: MA Experiment ID: 20000286 Result: Down-regulated in Transcription
  misc_feature: MA Experiment 20000286 PARAMETER Experiment Name: At_Open_Flower_P Parameter: Age (day) Value: 21
  misc_feature: MA Experiment 20000286 PARAMETER Experiment Name: At_Open_Flower_P Parameter: Plant Line Value: WS
  misc_feature: MA Experiment 20000286 PARAMETER Experiment Name: At_Open_Flower_P Parameter: Tissue Value: Half Open vs. Whole Plant
  misc_feature: MA Experiment ID: 20000436 Result: Down-regulated in Transcription
  misc_feature: MA Experiment 20000436 PARAMETER Experiment Name: At_Drought_P Parameter: Age (day) Value: 7
  misc_feature: MA Experiment 20000436 PARAMETER Experiment Name: At_Drought_P Parameter: Organism Value: A. thaliana
  misc_feature: MA Experiment 20000436 PARAMETER Experiment Name: At_Drought_P Parameter: Plant Line Value: WS
  misc_feature: MA Experiment 20000436 PARAMETER Experiment Name: At_Drought_P Parameter: Timepoint (hr) Value: 12
  misc_feature: MA Experiment 20000436 PARAMETER Experiment Name: At_Drought_P Parameter: Tissue Value: Whole Plant
  misc_feature: MA Experiment 20000436 PARAMETER Experiment Name: At_Drought_P Parameter: Treatment Value: Drought vs. No Drought
  misc_feature: MA Experiment ID: 20000437 Result: Down-regulated in Transcription
  misc_feature: MA Experiment 20000437 PARAMETER Experiment Name: At_Drought_P Parameter: Age (day) Value: 8
  misc_feature: MA Experiment 20000437 PARAMETER Experiment Name: At_Drought_P Parameter: Organism Value: A. thaliana
  misc_feature: MA Experiment 20000437 PARAMETER Experiment Name: At_Drought_P Parameter: Plant Line Value: WS
  misc_feature: MA Experiment 20000437 PARAMETER Experiment Name: At_Drought_P Parameter: Timepoint (hr) Value: 24
  misc_feature: MA Experiment 20000437 PARAMETER Experiment Name: At_Drought_P Parameter: Tissue Value: Whole Plant
  misc_feature: MA Experiment 20000437 PARAMETER Experiment Name: At_Drought_P Parameter: Treatment Value: Drought vs. No Drought
  misc_feature: MA Experiment ID: 20000439 Result: Down-regulated in Transcription
  misc_feature: MA Experiment 20000439 PARAMETER Experiment Name: At_Roots__P Parameter: Age (day) Value: 14 vs. 21
  misc_feature: MA Experiment 20000439 PARAMETER Experiment Name: At_Roots__P Parameter: Organism Value: A. thaliana
  misc_feature: MA Experiment 20000439 PARAMETER Experiment Name: At_Roots__P Parameter: Tissue Value: Roots vs. Whole Plant
  misc_feature: MA Experiment ID: 20000451 Result: Down-regulated in Transcription
  misc_feature: MA Experiment 20000451 PARAMETER Experiment Name: At_CS6879_Shoots-Roots_P Parameter: Age (day) Value: 14
  misc_feature: MA Experiment 20000451 PARAMETER Experiment Name: At_CS6879_Shoots-Roots_P Parameter: Organism Value: A. thaliana
  misc_feature: MA Experiment 20000451 PARAMETER Experiment Name: At_CS6879_Shoots-Roots_P Parameter: Plant Line Value: CS6879 vs. WS
  misc_feature: MA Experiment 20000451 PARAMETER Experiment Name: At_CS6879_Shoots-Roots_P Parameter: Tissue Value: Roots
  misc_feature: MA Experiment ID: 20000573 Result: Down-regulated in Transcription
  misc_feature: MA Experiment 20000573 PARAMETER Experiment Name: At_100uM_ABA_Mutants__P Parameter: Organism Value: A. thaliana
  misc_feature: MA Experiment 20000573 PARAMETER Experiment Name: At_100uM_ABA_Mutants__P Parameter: Plant Line Value: CS22 vs. Ler wt
  misc_feature: MA Experiment 20000573 PARAMETER Experiment Name: At_100uM_ABA_Mutants__P Parameter: Timepoint (hr) Value: N/A
  misc_feature: MA Experiment 20000573 PARAMETER Experiment Name: At_100uM_ABA_Mutants__P Parameter: Tissue Value: Whole Plant
  misc_feature: MA Experiment 20000573 PARAMETER Experiment Name: At_100uM_ABA_Mutants__P Parameter: Treatment Value: None
  misc_feature: MA Experiment ID: 20000574 Result: Down-regulated in Transcription
  misc_feature: MA Experiment 20000574 PARAMETER Experiment Name: At_100uM_ABA_Mutants__P Parameter: Organism Value: A. thaliana
  misc_feature: MA Experiment 20000574 PARAMETER Experiment Name: At_100uM_ABA_Mutants__P Parameter: Plant Line Value: CS23 vs. Ler wt
  misc_feature: MA Experiment 20000574 PARAMETER Experiment Name: At_100uM_ABA_Mutants__P Parameter: Timepoint (hr) Value: N/A
  misc_feature: MA Experiment 20000574 PARAMETER Experiment Name: At_100uM_ABA_Mutants__P Parameter: Tissue Value: Whole Plant
  misc_feature: MA Experiment 20000574 PARAMETER Experiment Name: At_100uM_ABA_Mutants__P Parameter: Treatment Value: None
  misc_feature: MA Experiment ID: 20000709 Result: Up-regulated in Transcription
  misc_feature: MA Experiment 20000709 PARAMETER Experiment Name: At_15mM_NH4NO3_L-to-H_P Parameter: Age (hr) Value: 14
  misc_feature: MA Experiment 20000709 PARAMETER Experiment Name: At_15mM_NH4NO3_L-to-H_P Parameter: Organism Value: A. thaliana
  misc_feature: MA Experiment 20000709 PARAMETER Experiment Name: At_15mM_NH4NO3_L-to-H_P Parameter: Plant Line Value: WS
  misc_feature: MA Experiment 20000709 PARAMETER Experiment Name: At_15mM_NH4NO3_L-to-H_P Parameter: Timepoint (hr) Value: 4
  misc_feature: MA Experiment 20000709 PARAMETER Experiment Name: At_15mM_NH4NO3_L-to-H_P Parameter: Tissue Value: Aerial
  misc_feature: MA Experiment 20000709 PARAMETER Experiment Name: At_15mM_NH4NO3_L-to-H_P Parameter: Treatment Value: 15mM NH4NO3 vs. 30mM Mannitol
  misc_feature: MA Experiment ID: 20000794 Result: Down-regulated in Transcription
  misc_feature: MA Experiment 20000794 PARAMETER Experiment Name: At_Petals_P Parameter: Age (day) Value: 23-25 days
  misc_feature: MA Experiment 20000794 PARAMETER Experiment Name: At_Petals_P Parameter: Plant Line Value: WS
  misc_feature: MA Experiment 20000794 PARAMETER Experiment Name: At_Petals_P Parameter: Tissue Value: Petals vs. Whole plant
  misc_feature: MA Experiment ID: 20001247 Result: Up-regulated in Transcription
  misc_feature: MA Experiment 20001247 PARAMETER Experiment Name: At_Far-red-induction_P Parameter: Age (day) Value: 7
  misc_feature: MA Experiment 20001247 PARAMETER Experiment Name: At_Far-red-induction_P Parameter: Light Value: Far-red vs. White
  misc_feature: MA Experiment 20001247 PARAMETER Experiment Name: At_Far-red-induction_P Parameter: Organism Value: A. thaliana
  misc_feature: MA Experiment 20001247 PARAMETER Experiment Name: At_Far-red-induction_P Parameter: Plant Line Value: Columbia
  misc_feature: MA Experiment 20001247 PARAMETER Experiment Name: At_Far-red-induction_P Parameter: Timepoint (hr) Value: 1
  misc_feature: MA Experiment 20001247 PARAMETER Experiment Name: At_Far-red-induction_P Parameter: Tissue Value: Whole Plant
  misc_feature: MA Experiment ID: 20001554 Result: Down-regulated in Transcription
  misc_feature: MA Experiment 20001554 PARAMETER Experiment Name: At_Drought_Soil_Dry_P Parameter: Age (day) Value: 21
  misc_feature: MA Experiment 20001554 PARAMETER Experiment Name: At_Drought_Soil_Dry_P Parameter: Organism Value: A. thaliana
  misc_feature: MA Experiment 20001554 PARAMETER Experiment Name: At_Drought_Soil_Dry_P Parameter: Plant Line Value: WS
  misc_feature: MA Experiment 20001554 PARAMETER Experiment Name: At_Drought_Soil_Dry_P Parameter: Post Timepoint (hr) Value: None
  misc_feature: MA Experiment 20001554 PARAMETER Experiment Name: At_Drought_Soil_Dry_P Parameter: Post-Treatment Value: None
  misc_feature: MA Experiment 20001554 PARAMETER Experiment Name: At_Drought_Soil_Dry_P Parameter: Timepoint (day) Value: 7
  misc_feature: MA Experiment 20001554 PARAMETER Experiment Name: At_Drought_Soil_Dry_P Parameter: Treatment Value: Drought vs. No Drought
  misc_feature: MA Experiment ID: 20001757 Result: Up-regulated in Transcription
  misc_feature: MA Experiment 20001757 PARAMETER Experiment Name: At_50mM_NH4NO3_L-to-H_P Parameter: Timepoint (hr) Value: 6
  misc_feature: MA Experiment 20001757 PARAMETER Experiment Name: At_50mM_NH4NO3_L-to-H_P Parameter: Tissue Value: Leaf
  misc_feature: MA Experiment 20001757 PARAMETER Experiment Name: At_50mM_NH4NO3_L-to-H_P Parameter: Treatment Value: 50mM NH4NO3 vs 100mM Mannitol
  misc_feature: MA Experiment ID: 20001904 Result: Down-regulated in Transcription
  misc_feature: MA Experiment 20001904 PARAMETER Experiment Name: At_Drought_Reproduction_P Parameter: Age (day) Value: 37
  misc_feature: MA Experiment 20001904 PARAMETER Experiment Name: At_Drought_Reproduction_P Parameter: Organism Value: A. thaliana
  misc_feature: MA Experiment 20001904 PARAMETER Experiment Name: At_Drought_Reproduction_P Parameter: Plant Line Value: WS
  misc_feature: MA Experiment 20001904 PARAMETER Experiment Name: At_Drought_Reproduction_P Parameter: Timepoint (day) Value: 7
  misc_feature: MA Experiment 20001904 PARAMETER Experiment Name: At_Drought_Reproduction_P Parameter: Tissue Value: Rosettes
  misc_feature: MA Experiment 20001904 PARAMETER Experiment Name: At_Drought_Reproduction_P Parameter: Treatment Value: Drought vs. No Drought
  misc_feature: MA Experiment ID: 20001905 Result: Down-regulated in Transcription
  misc_feature: MA Experiment 20001905 PARAMETER Experiment Name: At_Drought_Reproduction_P Parameter: Age (day) Value: 40
  misc_feature: MA Experiment 20001905 PARAMETER Experiment Name: At_Drought_Reproduction_P Parameter: Organism Value: A. thaliana
  misc_feature: MA Experiment 20001905 PARAMETER Experiment Name: At_Drought_Reproduction_P Parameter: Plant Line Value: WS
  misc_feature: MA Experiment 20001905 PARAMETER Experiment Name: At_Drought_Reproduction_P Parameter: Timepoint (day) Value: 10
  misc_feature: MA Experiment 20001905 PARAMETER Experiment Name: At_Drought_Reproduction_P Parameter: Tissue Value: Rosettes
  misc_feature: MA Experiment 20001905 PARAMETER Experiment Name: At_Drought_Reproduction_P Parameter: Treatment Value: Drought vs. No Drought
  misc_feature: MA Experiment ID: 20001906 Result: Down-regulated in Transcription
  misc_feature: MA Experiment 20001906 PARAMETER Experiment Name: At_Drought_Reproduction_P Parameter: Age (day) Value: 35
  misc_feature: MA Experiment 20001906 PARAMETER Experiment Name: At_Drought_Reproduction_P Parameter: Organism Value: A. thaliana
  misc_feature: MA Experiment 20001906 PARAMETER Experiment Name: At_Drought_Reproduction_P Parameter: Plant Line Value: WS
  misc_feature: MA Experiment 20001906 PARAMETER Experiment Name: At_Drought_Reproduction_P Parameter: Timepoint (day) Value: 5
  misc_feature: MA Experiment 20001906 PARAMETER Experiment Name: At_Drought_Reproduction_P Parameter: Tissue Value: Siliques
  misc_feature: MA Experiment 20001906 PARAMETER Experiment Name: At_Drought_Reproduction_P Parameter: Treatment Value: Drought vs. No Drought
  misc_feature: MA Experiment ID: 20001907 Result: Down-regulated in Transcription
  misc_feature: MA Experiment 20001907 PARAMETER Experiment Name: At_Drought_Reproduction_P Parameter: Age (day) Value: 37
  misc_feature: MA Experiment 20001907 PARAMETER Experiment Name: At_Drought_Reproduction_P Parameter: Organism Value: A. thaliana
  misc_feature: MA Experiment 20001907 PARAMETER Experiment Name: At_Drought_Reproduction_P Parameter: Plant Line Value: WS
  misc_feature: MA Experiment 20001907 PARAMETER Experiment Name: At_Drought_Reproduction_P Parameter: Timepoint (day) Value: 7
  misc_feature: MA Experiment 20001907 PARAMETER Experiment Name: At_Drought_Reproduction_P Parameter: Tissue Value: Siliques
  misc_feature: MA Experiment 20001907 PARAMETER Experiment Name: At_Drought_Reproduction_P Parameter: Treatment Value: Drought vs. No Drought
  misc_feature: MA Experiment ID: 20001908 Result: Down-regulated in Transcription
  misc_feature: MA Experiment 20001908 PARAMETER Experiment Name: At_Drought_Reproduction_P Parameter: Age (day) Value: 40
  misc_feature: MA Experiment 20001908 PARAMETER Experiment Name: At_Drought_Reproduction_P Parameter: Organism Value: A. thaliana
  misc_feature: MA Experiment 20001908 PARAMETER Experiment Name: At_Drought_Reproduction_P Parameter: Plant Line Value: WS
  misc_feature: MA Experiment 20001908 PARAMETER Experiment Name: At_Drought_Reproduction_P Parameter: Timepoint (day) Value: 10
  misc_feature: MA Experiment 20001908 PARAMETER Experiment Name: At_Drought_Reproduction_P Parameter: Tissue Value: Siliques
  misc_feature: MA Experiment 20001908 PARAMETER Experiment Name: At_Drought_Reproduction_P Parameter: Treatment Value: Drought vs. No Drought
aaagtattattccgaatgtaaatagtggaacaaaaagaacagctgggaggattttgtttaaaaggacactacacttcccagctttccctcactgcccgaaaagaacactgcagaaacactttcctctgttcacagagaaagagagagatgatgctttacagcaacaatagttggagatcgaattccattttaatacttctacttggtctctccattgtggccgccgcagactccgccggcaaaacttcaccggtcgaagacggcttggtggttaacggcgactttgagacaccgccgtcaaacggcttccctgatgacgcaatcatcgaggacacctccgagatcccgagctggcgatccgatggtacggtggagctaatcaagtccggtcaaaaacaaggcgggatgatcttgatcgtgcctgagggccgtcacgctgttagattaggaaacgatgcagagatcagccaagaacttacggtggagaaaggctctatctactccgtcacgttcagtgcagcccgcacatgtgcacaactcgagtcgctgaatgtttcggtagcttcttctgatgaacctatcgcatcgcaaaccattgacttgcaaacggtgtacagcgttcaaggatgggatccatatgcatgggcgtttgaagcggttgtggatcgcgtccggttggtttttaagaaccctggcatggaggatgatcctacttgtggacctatcattgacgacattgccgttaagaagctctttactcctgataaacccaaaggcaatgcagtgattaatggagattttgaagaaggtccatggatgtttaggaacactaccttaggtgttctgcttccaacaaacctcgatgaagaaatatcgtctcttcctggatggaccgtcgaatcgaaccgagcagtacggtttattgactcagaccatttctcggtccccgaggggaagcgagctttggaacttttatcgggcaaagaaggcataatttctcaaatggttgagacaaaggcgaacattccgtacaagatgtctttctctttgggacacgcaggggacaagtgtaaggaacctttggctgtaatggcttttgctggagatcaagcacagaactttcattatatggcgcaagcaaactcgagtttcgaaagatcggagttgaacttcactgcgaaagctgaacgtacgaggatcgccttctacagcatttattacaatacgaggacggacgatatgacttcattgtgtggacctgtgattgatgacgttaaggtttggttctccgggtctagtagaattggatttagttttccgctttttattcttctttctttggttttcatctagattgttccggttcagaaattgtattggtagaccgggaattaagacgggattccacgttgtatgatgtatcgttgtatgatggatcggttcaaggtacaagaaatg

SEQ ID NO: 38184 - protein, 401 aa, Arabidopsis thaliana
  peptide (1)..(401): Ceres Seq. ID no. 13602852
  misc_feature (55)..(382): Pfam Name: Protein of unknown function, DUF642 Pfam Description: Protein of unknown function, DUF642
  misc_feature (38)..(378): Homolog of NCBI NO: 15239049 NR Description: expressed protein [Arabidopsis thaliana]
  misc_feature (38)..(378): Homolog of NCBI NO: 23397043 NR Description: unknown protein [Arabidopsis thaliana]
  misc_feature (14)..(378): Homolog of NCBI NO: 15809822 NR Description: AT5g25460/F18G18_200 [Arabidopsis thaliana]
  misc_feature (14)..(378): Homolog of NCBI NO: 15239438 NR Description: expressed protein [Arabidopsis thaliana]
  misc_feature (104)..(401): Homolog of NCBI NO: 34913458 NR Description: P0702H08.18 [Oryza sativa (japonica
  misc_feature (38)..(378): Homolog of NCBI NO: 18418018 NR Description: expressed protein [Arabidopsis thaliana]
  misc_feature (21)..(378): Homolog of NCBI NO: 7488898 NR Description: hypothetical protein - castor bean
  misc_feature (7)..(401): Homolog of NCBI NO: 34909656 NR Description: OJ1414_E05.5 [Oryza sativa (japonica
  misc_feature (2)..(396): Homolog of NCBI NO: 18397308 NR Description: expressed protein [Arabidopsis thaliana]
  misc_feature (1)..(401): Homolog of NCBI NO: 15226760 NR Description: expressed protein [Arabidopsis thaliana]
MMLYSNNSWRSNSILILLLGLSIVAAADSAGKTSPVEDGLVVNGDFETPPSNGFPDDAIIEDTSEIPSWRSDGTVELIKSGQKQGGMILIVPEGRHAVRLGNDAEISQELTVEKGSIYSVTFSAARTCAQLESLNVSVASSDEPIASQTIDLQTVYSVQGWDPYAWAFEAVVDRVRLVFKNPGMEDDPTCGPIIDDIAVKKLFTPDKPKGNAVINGDFEEGPWMFRNTTLGVLLPTNLDEEISSLPGWTVESNRAVRFIDSDHFSVPEGKRALELLSGKEGIISQMVETKANIPYKMSFSLGHAGDKCKEPLAVMAFAGDQAQNFHYMAQANSSFERSELNFTAKAERTRIAFYSIYYNTRTDDMTSLCGPVIDDVKVWFSGSSRIGFSFPLFILLSLVFI

SEQ ID NO: 38185 - protein, 400 aa, Arabidopsis thaliana
  peptide (1)..(400): Ceres Seq. ID no. 13602853
  misc_feature (54)..(381): Pfam Name: Protein of unknown function, DUF642 Pfam Description: Protein of unknown function, DUF642
  misc_feature (37)..(377): Homolog of NCBI NO: 15239049 NR Description: expressed protein [Arabidopsis thaliana]
  misc_feature (37)..(377): Homolog of NCBI NO: 23397043 NR Description: unknown protein [Arabidopsis thaliana]
  misc_feature (13)..(377): Homolog of NCBI NO: 15809822 NR Description: AT5g25460/F18G18_200 [Arabidopsis thaliana]
  misc_feature (13)..(377): Homolog of NCBI NO: 15239438 NR Description: expressed protein [Arabidopsis thaliana]
  misc_feature (103)..(400): Homolog of NCBI NO: 34913458 NR Description: P0702H08.18 [Oryza sativa (japonica
  misc_feature (37)..(377): Homolog of NCBI NO: 18418018 NR Description: expressed protein [Arabidopsis thaliana]
  misc_feature (20)..(377): Homolog of NCBI NO: 7488898 NR Description: hypothetical protein - castor bean
  misc_feature (6)..(400): Homolog of NCBI NO: 34909656 NR Description: OJ1414_E05.5 [Oryza sativa (japonica
  misc_feature (1)..(395): Homolog of NCBI NO: 18397308 NR Description: expressed protein [Arabidopsis thaliana]
  misc_feature (1)..(400): Homolog of NCBI NO: 15226760 NR Description: expressed protein [Arabidopsis thaliana]
MLYSNNSWRSNSILILLLGLSIVAAADSAGKTSPVEDGLVVNGDFETPPSNGFPDDAIIEDTSEIPSWRSDGTVELIKSGQKQGGMILIVPEGRHAVRLGNDAEISQELTVEKGSIYSVTFSAARTCAQLESLNVSVASSDEPIASQTIDLQTVYSVQGWDPYAWAFEAVVDRVRLVFKNPGMEDDPTCGPIIDDIAVKKLFTPDKPKGNAVINGDFEEGPWMFRNTTLGVLLPTNLDEEISSLPGWTVESNRAVRFIDSDHFSVPEGKRALELLSGKEGIISQMVETKANIPYKMSFSLGHAGDKCKEPLAVMAFAGDQAQNFHYMAQANSSFERSELNFTAKAERTRIAFYSIYYNTRTDDMTSLCGPVIDDVKVWFSGSSRIGFSFPLFILLSLVFI

SEQ ID NO: 38186 - protein, 315 aa, Arabidopsis thaliana
  peptide (1)..(315): Ceres Seq. ID no. 13602854
  misc_feature (1)..(296): Pfam Name: Protein of unknown function, DUF642 Pfam Description: Protein of unknown function, DUF642
  misc_feature (1)..(292): Homolog of NCBI NO: 15239049 NR Description: expressed protein [Arabidopsis thaliana]
  misc_feature (1)..(292): Homolog of NCBI NO: 23397043 NR Description: unknown protein [Arabidopsis thaliana]
  misc_feature (1)..(292): Homolog of NCBI NO: 15809822 NR Description: AT5g25460/F18G18_200 [Arabidopsis thaliana]
  misc_feature (1)..(292): Homolog of NCBI NO: 15239438 NR Description: expressed protein [Arabidopsis thaliana]
  misc_feature (18)..(315): Homolog of NCBI NO: 34913458 NR Description: P0702H08.18 [Oryza sativa (japonica
  misc_feature (1)..(292): Homolog of NCBI NO: 18418018 NR Description: expressed protein [Arabidopsis thaliana]
  misc_feature (1)..(292): Homolog of NCBI NO: 7488898 NR Description: hypothetical protein - castor bean
  misc_feature (1)..(315): Homolog of NCBI NO: 34909656 NR Description: OJ1414_E05.5 [Oryza sativa (japonica
  misc_feature (1)..(310): Homolog of NCBI NO: 18397308 NR Description: expressed protein [Arabidopsis thaliana]
  misc_feature (1)..(315): Homolog of NCBI NO: 15226760 NR Description: expressed protein [Arabidopsis thaliana]
MILIVPEGRHAVRLGNDAEISQELTVEKGSIYSVTFSAARTCAQLESLNVSVASSDEPIASQTIDLQTVYSVQGWDPYAWAFEAVVDRVRLVFKNPGMEDDPTCGPIIDDIAVKKLFTPDKPKGNAVINGDFEEGPWMFRNTTLGVLLPTNLDEEISSLPGWTVESNRAVRFIDSDHFSVPEGKRALELLSGKEGIISQMVETKANIPYKMSFSLGHAGDKCKEPLAVMAFAGDQAQNFHYMAQANSSFERSELNFTAKAERTRIAFYSIYYNTRTDDMTSLCGPVIDDVKVWFSGSSRIGFSFPLFILLSLVFI

SEQ ID NO: 38187 - DNA, 2400 bp, Arabidopsis thaliana
  misc_feature (1)..(2400): Ceres Seq. ID no. 12330240
  misc_feature: MA Experiment ID: 108434 Result: Down-regulated in Transcription
  misc_feature: MA Experiment 108434 PARAMETER Experiment Name: At_Root_Tips_cDNA_P Parameter: Tissue Value: Root Tips
  misc_feature: MA Experiment ID: 108461 Result: Down-regulated in Transcription
  misc_feature: MA Experiment 108461 PARAMETER Experiment Name: At_Germinating_Seeds_cDNA_P Parameter: Age (day) Value: 1 vs. 0
  misc_feature: MA Experiment 108461 PARAMETER Experiment Name: At_Germinating_Seeds_cDNA_P Parameter: Tissue Value: Germinating Seeds
  misc_feature: MA Experiment ID: 108573 Result: Up-regulated in Transcription
  misc_feature: MA Experiment 108573 PARAMETER Experiment Name: At_Drought_cDNA_P Parameter: Timepoint (hr) Value: 6
  misc_feature: MA Experiment 108573 PARAMETER Experiment Name: At_Drought_cDNA_P Parameter: Tissue Value: Aerial
  misc_feature: MA Experiment 108573 PARAMETER Experiment Name: At_Drought_cDNA_P Parameter: Treatment Value: Drought vs. No Drought
  misc_feature: MA Experiment ID: 108585 Result: Up-regulated in Transcription
  misc_feature: MA Experiment 108585 PARAMETER Experiment Name: At_5mM_NaNP_cDNA_P Parameter: Timepoint (hr) Value: 6
  misc_feature: MA Experiment 108585 PARAMETER Experiment Name: At_5mM_NaNP_cDNA_P Parameter: Tissue Value: Aerial
  misc_feature: MA Experiment 108585 PARAMETER Experiment Name: At_5mM_NaNP_cDNA_P Parameter: Treatment Value: null
  misc_feature: MA Experiment ID: 108668 Result: Up-regulated in Transcription
  misc_feature: MA Experiment 108668 PARAMETER Experiment Name: At_2mM_SA_cDNA_P Parameter: Plant Line Value: WS
  misc_feature: MA Experiment 108668 PARAMETER Experiment Name: At_2mM_SA_cDNA_P Parameter: Timepoint (hr) Value: 6
  misc_feature: MA Experiment 108668 PARAMETER Experiment Name: At_2mM_SA_cDNA_P Parameter: Treatment Value: 2mM SA vs. No Treatment
  misc_feature: MA Experiment ID: 20000072 Result: Up-regulated in Transcription
  misc_feature: MA Experiment 20000072 PARAMETER Experiment Name: At_100uM_ABA_Mutants_cDNA_P Parameter: Plant Line Value: CS8105
  misc_feature: MA Experiment 20000072 PARAMETER Experiment Name: At_100uM_ABA_Mutants_cDNA_P Parameter: Timepoint (hr) Value: 6
  misc_feature: MA Experiment 20000072 PARAMETER Experiment Name: At_100uM_ABA_Mutants_cDNA_P Parameter: Tissue Value: Aerial
  misc_feature: MA Experiment 20000072 PARAMETER Experiment Name: At_100uM_ABA_Mutants_cDNA_P Parameter: Treatment Value: 100uM ABA vs. No Treatment
  misc_feature: MA Experiment ID: 20000179 Result: Down-regulated in Transcription
  misc_feature: MA Experiment 20000179 PARAMETER Experiment Name: At_Germinating_Seeds_P Parameter: Age (hr) Value: 6 vs. 0
  misc_feature: MA Experiment 20000179 PARAMETER Experiment Name: At_Germinating_Seeds_P Parameter: Tissue Value: Germinating Seeds
  misc_feature: MA Experiment ID: 20000180 Result: Down-regulated in Transcription
  misc_feature: MA Experiment 20000180 PARAMETER Experiment Name: At_Germinating_Seeds_P Parameter: Age (hr) Value: 24 vs. 0
  misc_feature: MA Experiment 20000180 PARAMETER Experiment Name: At_Germinating_Seeds_P Parameter: Tissue Value: Germinating Seeds
  misc_feature: MA Experiment ID: 20000182 Result: Up-regulated in Transcription
  misc_feature: MA Experiment 20000182 PARAMETER Experiment Name: At_2mM_SA_P Parameter: Age (day) Value: 14
  misc_feature: MA Experiment 20000182 PARAMETER Experiment Name: At_2mM_SA_P Parameter: Organism Value: A. thaliana
  misc_feature: MA Experiment 20000182 PARAMETER Experiment Name: At_2mM_SA_P Parameter: Plant Line Value: WS
  misc_feature: MA Experiment 20000182 PARAMETER Experiment Name: At_2mM_SA_P Parameter: Timepoint (hr) Value: 6
  misc_feature: MA Experiment 20000182 PARAMETER Experiment Name: At_2mM_SA_P Parameter: Tissue Value: Aerial
  misc_feature: MA Experiment 20000182 PARAMETER Experiment Name: At_2mM_SA_P Parameter: Treatment Value: 2mM SA vs. No Treatment
  misc_feature: MA Experiment ID: 20000437 Result: Up-regulated in Transcription
  misc_feature: MA Experiment 20000437 PARAMETER Experiment Name: At_Drought_P Parameter: Age (day) Value: 8
  misc_feature: MA Experiment 20000437 PARAMETER Experiment Name: At_Drought_P Parameter: Organism Value: A. thaliana
  misc_feature: MA Experiment 20000437 PARAMETER Experiment Name: At_Drought_P Parameter: Plant Line Value: WS
  misc_feature: MA Experiment 20000437 PARAMETER Experiment Name: At_Drought_P Parameter: Timepoint (hr) Value: 24
  misc_feature: MA Experiment 20000437 PARAMETER Experiment Name: At_Drought_P Parameter: Tissue Value: Whole Plant
  misc_feature: MA Experiment 20000437 PARAMETER Experiment Name: At_Drought_P Parameter: Treatment Value: Drought vs. No Drought
  misc_feature: MA Experiment ID: 20000495 Result: Up-regulated in Transcription
  misc_feature: MA Experiment 20000495 PARAMETER Experiment Name: At_Guard_Cells_P Parameter: Harvest Date Value: 8/2/2002
  misc_feature: MA Experiment 20000495 PARAMETER Experiment Name: At_Guard_Cells_P Parameter: Organism Value: A. thaliana
  misc_feature: MA Experiment 20000495 PARAMETER Experiment Name: At_Guard_Cells_P Parameter: Tissue Value: Guard Cells vs. Leaves
  misc_feature: MA Experiment ID: 20001905 Result: Up-regulated in Transcription
  misc_feature: MA Experiment 20001905 PARAMETER Experiment Name: At_Drought_Reproduction_P Parameter: Age (day) Value: 40
  misc_feature: MA Experiment 20001905 PARAMETER Experiment Name: At_Drought_Reproduction_P Parameter: Organism Value: A. thaliana
  misc_feature: MA Experiment 20001905 PARAMETER Experiment Name: At_Drought_Reproduction_P Parameter: Plant Line Value: WS
  misc_feature: MA Experiment 20001905 PARAMETER Experiment Name: At_Drought_Reproduction_P Parameter: Timepoint (day) Value: 10
  misc_feature: MA Experiment 20001905 PARAMETER Experiment Name: At_Drought_Reproduction_P Parameter: Tissue Value: Rosettes
  misc_feature: MA Experiment 20001905 PARAMETER Experiment Name: At_Drought_Reproduction_P Parameter: Treatment Value: Drought vs. No Drought
  misc_feature: MA Experiment ID: 20001911 Result: Up-regulated in Transcription
  misc_feature: MA Experiment 20001911 PARAMETER Experiment Name: At_Drought_Reproduction_P Parameter: Age (day) Value: 40
  misc_feature: MA Experiment 20001911 PARAMETER Experiment Name: At_Drought_Reproduction_P Parameter: Organism Value: A. thaliana
  misc_feature: MA Experiment 20001911 PARAMETER Experiment Name: At_Drought_Reproduction_P Parameter: Plant Line Value: WS
  misc_feature: MA Experiment 20001911 PARAMETER Experiment Name: At_Drought_Reproduction_P Parameter: Timepoint (day) Value: 10
  misc_feature: MA Experiment 20001911 PARAMETER Experiment Name: At_Drought_Reproduction_P Parameter: Tissue Value: Flowers
  misc_feature: MA Experiment 20001911 PARAMETER Experiment Name: At_Drought_Reproduction_P Parameter: Treatment Value: Drought vs. No Drought
acgtctgagaaaacaactcattcaaagtttgaaaactcatgggctcgctggagccgacccaggaacggcaaaaatctagaagcgccaagttttcttcaactctttaacgtcgttgttgtcttcgtcaccaagtaaaccctagatccacaatttcaacggaaatttcattcttcttcttcttcctcgcgaatctgttttttttttgatattcgattctactttccctttccatcaaaaaacatttcgtcgacgatttcacgcgatgtccttctccgattctggatcgtcctcttatggcggagattacaagaatttcagacaaatcaccagagaaagattactttgtgaaatgcttaggccagaaagaaatggaagctctaaattaacttggaaggtacttgtaatggacaagttcactgtgaagataatgtcatctgcttgcaaaatgtctgagatcacacaaggaggcatttctttggttgaggttataactaaacataggcaacctatgacagcaatggaagtcatatactttattcaaccgaccgaagagaatgtcactgcgtttttatcagatatgactggaaaatcaccactttacaagaaggcttttgttttctttagttctcctgtttcgagaagcttagttaatgtcattaagaaggacatgagagcaatgaaacgaattgggggattgaaagagatgaacttggagtatattagcatggacatccagggctttgttacaaataatgaaaatgctttagaagagcttttctgtgacgacgaaaaccatcaaagagcagatgcttgcttaaatgtggtagctaaaagaattgctacagttttggcctcactaaaggaatatccctttgttcgctaccgcggagccaaagctcttgatgccacaacaatgacaacttaccgagagttgattcctacaaagcttgctgctagtgtatggaattgtcttgcaagatacaaacagacaatcgaagattttcctcagactgaaacatgcgaactacttatcttggatcgatccatagaccagatcgcacctctcattcatgagtggacatatgatgcgatgtgccacgatttgcttaatatggaaggaaataaatacacacacgaggttccgagtaaaactggtgataaacctgagaagaaagaggttcttctagatgaggaagattccatttgggtggagcttcgtgatgctcatattgcagatgcaagtgaaagattgcatgaaaagatgacaaacttcgtgtcgaagaacaaagctgcgcaattgaaacacagttcaaaagactttggtgacctttcatcaaaagacttgcagaagatggttcacgctttgcctcagtacagtgagcaaattgacaagctttctctacatgttgagatcgctagaacgataaacagaactatcatggaacaaggtctaagagatctcgggcagctcgagcaggaccttgtttttggggatgctggaagaaaggacgttatcaaatttctgagcaccaaccatattataagccacgaaagcaagctgaggttaattatgattgttgctgcaatatatcccaagaagttcgaaggtgaaaagggacgtaagatgatggagctagcaaaattgtcgggcgatgatgtagtagctgtgaacaatatgagattacttggaccagtacatacggagtgcaaaaagagcacaacaggatcttttcctctcaagtttgatgtccttaagacgaagcgagctgctcgaagagaccgagttggtgaaactcaaacatggcaactgtctcgtttttacccgattgttgaggaacttgttgagaaacttagcaaaggtcatttgccaaaacaagattacccttgtatgaatgaaccaaagccaaccttttattctggctctctgtctccatcagcgagtccggtattgcctcattcaagacgaacaccaacatgggcaagacgccatctttctgatgatggatatttcagtgactcggttctaggacgagcatctagtgggttcaagagaaagggacagcggattttcgtgttcatagtaggaggagcaacgagatcagagttaagggtttgccacaaacttacggagaagctcgacagagaagtgatcttaggctcctccagcttccttgatcccctaactttcctcactaaaatgaaacaactaaacgaagaagaggaaatctcacttgatgatattgtcatttgattagcaacttggtatcgaattttgttttggtaataaaatgatgggacggacatatgttccctatgtaaataaatacaatttatttgttcctttggtttgactaactaacggggttgctttatttaattgaatacttcatggttcttact

SEQ ID NO: 38188 - protein, 662 aa, Arabidopsis thaliana
  peptide (1)..(662): Ceres Seq. ID no. 12330241
  misc_feature (158)..(644): Homolog of NCBI NO: 28201892 NR Description: Protein transport Sec1a (AtSec1a)
  misc_feature (158)..(644): Homolog of NCBI NO: 13195580 NR Description: AtSec1a [Arabidopsis thaliana]
  misc_feature (1)..(653): Homolog of NCBI NO: 18378910 NR Description: hypothetical protein; protein id: At1g02010.1
  misc_feature (1)..(662): Homolog of NCBI NO: 38345989 NR Description: OSJNBa0032B23.7 [Oryza sativa (japonica
  misc_feature (1)..(25): Homolog of NCBI NO: 25402721 NR Description: protein F5O11.8 [imported] - Arabidopsis thaliana
  misc_feature (601)..(662): Homolog of NCBI NO: 25402721 NR Description: protein F5O11.8 [imported] - Arabidopsis thaliana
  misc_feature (35)..(616): Homolog of NCBI NO: 25402721 NR Description: protein F5O11.8 [imported] - Arabidopsis thaliana
  misc_feature (1)..(662): Homolog of NCBI NO: 28201820 NR Description: SNARE-interacting protein KEULE
  misc_feature (1)..(662): Homolog of NCBI NO: 18391384 NR Description: expressed protein
  misc_feature (32)..(644): Homolog of NCBI NO: 7485573 NR Description: hypothetical protein F16J13.190 - Arabidopsis
MSFSDSGSSSYGGDYKNFRQITRERLLCEMLRPERNGSSKLTWKVLVMDKFTVKIMSSACKMSEITQGGISLVEVITKHRQPMTAMEVIYFIQPTEENVTAFLSDMTGKSPLYKKAFVFFSSPVSRSLVNVIKKDMRAMKRIGGLKEMNLEYISMDIQGFVTNNENALEELFCDDENHQRADACLNVVAKRIATVLASLKEYPFVRYRGAKALDATTMTTYRELIPTKLAASVWNCLARYKQTIEDFPQTETCELLILDRSIDQIAPLIHEWTYDAMCHDLLNMEGNKYTHEVPSKTGDKPEKKEVLLDEEDSIWVELRDAHIADASERLHEKMTNFVSKNKAAQLKHSSKDFGDLSSKDLQKMVHALPQYSEQIDKLSLHVEIARTINRTIMEQGLRDLGQLEQDLVFGDAGRKDVIKFLSTNHIISHESKLRLIMIVAAIYPKKFEGEKGRKMMELAKLSGDDVVAVNNMRLLGPVHTECKKSTTGSFPLKFDVLKTKRAARRDRVGETQTWQLSRFYPIVEELVEKLSKGHLPKQDYPCMNEPKPTFYSGSLSPSASPVLPHSRRTPTWARRHLSDDGYFSDSVLGRASSGFKRKGQRIFVFIVGGATRSELRVCHKLTEKLDREVILGSSSFLDPLTFLTKMKQLNEEEEISLDDIVI

SEQ ID NO: 38189 - protein, 633 aa, Arabidopsis thaliana
  peptide (1)..(633): Ceres Seq. ID no. 12330242
  misc_feature (1)..(62): Homolog of NCBI NO: 13195580 NR Description: AtSec1a [Arabidopsis thaliana]
  misc_feature (129)..(615): Homolog of NCBI NO: 28201892 NR Description: Protein transport Sec1a (AtSec1a)
  misc_feature (129)..(615): Homolog of NCBI NO: 13195580 NR Description: AtSec1a [Arabidopsis thaliana]
  misc_feature (1)..(624): Homolog of NCBI NO: 18378910 NR Description: hypothetical protein; protein id: At1g02010.1
  misc_feature (1)..(633): Homolog of NCBI NO: 38345989 NR Description: OSJNBa0032B23.7 [Oryza sativa (japonica
  misc_feature (572)..(633): Homolog of NCBI NO: 25402721 NR Description: protein F5O11.8 [imported] - Arabidopsis thaliana
  misc_feature (6)..(587): Homolog of NCBI NO: 25402721 NR Description: protein F5O11.8 [imported] - Arabidopsis thaliana
  misc_feature (1)..(633): Homolog of NCBI NO: 28201820 NR Description: SNARE-interacting protein KEULE
  misc_feature (1)..(633): Homolog of NCBI NO: 18391384 NR Description: expressed protein
  misc_feature (3)..(615): Homolog of NCBI NO: 7485573 NR Description: hypothetical protein F16J13.190 - Arabidopsis
MLRPERNGSSKLTWKVLVMDKFTVKIMSSACKMSEITQGGISLVEVITKHRQPMTAMEVIYFIQPTEENVTAFLSDMTGKSPLYKKAFVFFSSPVSRSLVNVIKKDMRAMKRIGGLKEMNLEYISMDIQGFVTNNENALEELFCDDENHQRADACLNVVAKRIATVLASLKEYPFVRYRGAKALDATTMTTYRELIPTKLAASVWNCLARYKQTIEDFPQTETCELLILDRSIDQIAPLIHEWTYDAMCHDLLNMEGNKYTHEVPSKTGDKPEKKEVLLDEEDSIWVELRDAHIADASERLHEKMTNFVSKNKAAQLKHSSKDFGDLSSKDLQKMVHALPQYSEQIDKLSLHVEIARTINRTIMEQGLRDLGQLEQDLVFGDAGRKDVIKFLSTNHIISHESKLRLIMIVAAIYPKKFEGEKGRKMMELAKLSGDDVVAVNNMRLLGPVHTECKKSTTGSFPLKFDVLKTKRAARRDRVGETQTWQLSRFYPIVEELVEKLSKGHLPKQDYPCMNEPKPTFYSGSLSPSASPVLPHSRRTPTWARRHLSDDGYFSDSVLGRASSGFKRKGQRIFVFIVGGATRSELRVCHKLTEKLDREVILGSSSFLDPLTFLTKMKQLNEEEEISLDDIVI

SEQ ID NO: 38190 - protein, 615 aa, Arabidopsis thaliana
  peptide (1)..(615): Ceres Seq. ID no. 12330243
  misc_feature (1)..(44): Homolog of NCBI NO: 13195580 NR Description: AtSec1a [Arabidopsis thaliana]
  misc_feature (111)..(597): Homolog of NCBI NO: 28201892 NR Description: Protein transport Sec1a (AtSec1a)
  misc_feature (111)..(597): Homolog of NCBI NO: 13195580 NR Description: AtSec1a [Arabidopsis thaliana]
  misc_feature (1)..(606): Homolog of NCBI NO: 18378910 NR Description: hypothetical protein; protein id: At1g02010.1
  misc_feature (1)..(615): Homolog of NCBI NO: 38345989 NR Description: OSJNBa0032B23.7 [Oryza sativa (japonica
  misc_feature (554)..(615): Homolog of NCBI NO: 25402721 NR Description: protein F5O11.8 [imported] - Arabidopsis thaliana
  misc_feature (1)..(569): Homolog of NCBI NO: 25402721 NR Description: protein F5O11.8 [imported] - Arabidopsis thaliana
  misc_feature (1)..(615): Homolog of NCBI NO: 28201820 NR Description: SNARE-interacting protein KEULE
  misc_feature (1)..(615): Homolog of NCBI NO: 18391384 NR Description: expressed protein
  misc_feature (1)..(597): Homolog of NCBI NO: 7485573 NR Description: hypothetical protein F16J13.190 - Arabidopsis
MDKFTVKIMSSACKMSEITQGGISLVEVITKHRQPMTAMEVIYFIQPTEENVTAFLSDMTGKSPLYKKAFVFFSSPVSRSLVNVIKKDMRAMKRIGGLKEMNLEYISMDIQGFVTNNENALEELFCDDENHQRADACLNVVAKRIATVLASLKEYPFVRYRGAKALDATTMTTYRELIPTKLAASVWNCLARYKQTIEDFPQTETCELLILDRSIDQIAPLIHEWTYDAMCHDLLNMEGNKYTHEVPSKTGDKPEKKEVLLDEEDSIWVELRDAHIADASERLHEKMTNFVSKNKAAQLKHSSKDFGDLSSKDLQKMVHALPQYSEQIDKLSLHVEIARTINRTIMEQGLRDLGQLEQDLVFGDAGRKDVIKFLSTNHIISHESKLRLIMIVAAIYPKKFEGEKGRKMMELAKLSGDDVVAVNNMRLLGPVHTECKKSTTGSFPLKFDVLKTKRAARRDRVGETQTWQLSRFYPIVEELVEKLSKGHLPKQDYPCMNEPKPTFYSGSLSPSASPVLPHSRRTPTWARRHLSDDGYFSDSVLGRASSGFKRKGQRIFVFIVGGATRSELRVCHKLTEKLDREVILGSSSFLDPLTFLTKMKQLNEEEEISLDDIVI

SEQ ID NO: 38191 - DNA, 1905 bp, Arabidopsis thaliana
  misc_feature (1)..(1905): Ceres Seq. ID no. 12328270
  misc_feature: MA Experiment ID: 108434 Result: Down-regulated in Transcription
  misc_feature: MA Experiment 108434 PARAMETER Experiment Name: At_Root_Tips_cDNA_P Parameter: Tissue Value: Root Tips
  misc_feature: MA Experiment ID: 108461 Result: Down-regulated in Transcription
  misc_feature: MA Experiment 108461 PARAMETER Experiment Name: At_Germinating_Seeds_cDNA_P Parameter: Age (day) Value: 1 vs. 0
  misc_feature: MA Experiment 108461 PARAMETER Experiment Name: At_Germinating_Seeds_cDNA_P Parameter: Tissue Value: Germinating Seeds
  misc_feature: MA Experiment ID: 108462 Result: Down-regulated in Transcription
  misc_feature: MA Experiment 108462 PARAMETER Experiment Name: At_Germinating_Seeds_cDNA_P Parameter: Age (day) Value: 2 vs. 0
  misc_feature: MA Experiment 108462 PARAMETER Experiment Name: At_Germinating_Seeds_cDNA_P Parameter: Tissue Value: Germinating Seeds
  misc_feature: MA Experiment ID: 108463 Result: Down-regulated in Transcription
  misc_feature: MA Experiment 108463 PARAMETER Experiment Name: At_Germinating_Seeds_cDNA_P Parameter: Age (day) Value: 3 vs. 0
  misc_feature: MA Experiment 108463 PARAMETER Experiment Name: At_Germinating_Seeds_cDNA_P Parameter: Tissue Value: Germinating Seeds
  misc_feature: MA Experiment ID: 108464 Result: Down-regulated in Transcription
  misc_feature: MA Experiment 108464 PARAMETER Experiment Name: At_Germinating_Seeds_cDNA_P Parameter: Age (day) Value: 4 vs. 0
  misc_feature: MA Experiment 108464 PARAMETER Experiment Name: At_Germinating_Seeds_cDNA_P Parameter: Tissue Value: Germinating Seeds
  misc_feature: MA Experiment ID: 108488 Result: Down-regulated in Transcription
  misc_feature: MA Experiment ID: 108501 Result: Up-regulated in Transcription
  misc_feature: MA Experiment 108501 PARAMETER Experiment Name: At_ap2_floral_buds_cDNA_P Parameter: Plant Line Value: ap2 (Ler.)
  misc_feature: MA Experiment 108501 PARAMETER Experiment Name: At_ap2_floral_buds_cDNA_P Parameter: Tissue Value: Closed Flower
  misc_feature: MA Experiment ID: 108561 Result: Up-regulated in Transcription
  misc_feature: MA Experiment 108561 PARAMETER Experiment Name: At_100uM_ABA_cDNA_P Parameter: Timepoint (hr) Value: 6
  misc_feature: MA Experiment 108561 PARAMETER Experiment Name: At_100uM_ABA_cDNA_P Parameter: Tissue Value: Aerial
  misc_feature: MA Experiment 108561 PARAMETER Experiment Name: At_100uM_ABA_cDNA_P Parameter: Treatment Value: 100uM ABA vs. No Treatment
  misc_feature: MA Experiment ID: 108577 Result: Up-regulated in Transcription
  misc_feature: MA Experiment 108577 PARAMETER Experiment Name: At_42deg_Heat_cDNA_P Parameter: Temperature (deg C) Value: 42 vs. 22
  misc_feature: MA Experiment 108577 PARAMETER Experiment Name: At_42deg_Heat_cDNA_P Parameter: Timepoint (hr) Value: 6
  misc_feature: MA Experiment 108577 PARAMETER Experiment Name: At_42deg_Heat_cDNA_P Parameter: Tissue Value: Aerial
  misc_feature: MA Experiment ID: 108595 Result: Up-regulated in Transcription
  misc_feature: MA Experiment 108595 PARAMETER Experiment Name: At_Ler-pi_Ovule_cDNA_P Parameter: Plant Line Value: null
  misc_feature: MA Experiment ID: 20000071 Result: Up-regulated in Transcription
  misc_feature: MA Experiment 20000071 PARAMETER Experiment Name: At_100uM_ABA_Mutants_cDNA_P Parameter: Plant Line Value: CS8104
  misc_feature: MA Experiment 20000071 PARAMETER Experiment Name: At_100uM_ABA_Mutants_cDNA_P Parameter: Timepoint (hr) Value: 6
  misc_feature: MA Experiment 20000071 PARAMETER Experiment Name: At_100uM_ABA_Mutants_cDNA_P Parameter: Tissue Value: Aerial
  misc_feature: MA Experiment 20000071 PARAMETER Experiment Name: At_100uM_ABA_Mutants_cDNA_P Parameter: Treatment Value: 100uM ABA vs. No Treatment
  misc_feature: MA Experiment ID: 20000117 Result: Up-regulated in Transcription
  misc_feature: MA Experiment 20000117 PARAMETER Experiment Name: At_100uM_ABA_Mutants_cDNA_P Parameter: Plant Line Value: Columbia
  misc_feature: MA Experiment 20000117 PARAMETER Experiment Name: At_100uM_ABA_Mutants_cDNA_P Parameter: Timepoint (hr) Value: 6
  misc_feature: MA Experiment 20000117 PARAMETER Experiment Name: At_100uM_ABA_Mutants_cDNA_P Parameter: Tissue Value: Aerial
  misc_feature: MA Experiment 20000117 PARAMETER Experiment Name: At_100uM_ABA_Mutants_cDNA_P Parameter: Treatment Value: 100uM ABA vs. No Treatment
  misc_feature: MA Experiment ID: 20000307 Result: Down-regulated in Transcription
  misc_feature: MA Experiment 20000307 PARAMETER Experiment Name: At_Germinating_Seeds_Sub_P Parameter: Age (hr) Value: 24 vs. 0
  misc_feature: MA Experiment 20000307 PARAMETER Experiment Name: At_Germinating_Seeds_Sub_P Parameter: Organism Value: A. thaliana
  misc_feature: MA Experiment 20000307 PARAMETER Experiment Name: At_Germinating_Seeds_Sub_P Parameter: Plant Line Value: WS
  misc_feature: MA Experiment 20000307 PARAMETER Experiment Name: At_Germinating_Seeds_Sub_P Parameter: Tissue Value: Germinating Seeds
  misc_feature: MA Experiment ID: 20000314 Result: Down-regulated in Transcription
  misc_feature: MA Experiment 20000314 PARAMETER Experiment Name: At_14day_Shoots-Roots_Sub_P Parameter: Age (day) Value: 14
  misc_feature: MA Experiment 20000314 PARAMETER Experiment Name: At_14day_Shoots-Roots_Sub_P Parameter: Organism Value: A. thaliana
  misc_feature: MA Experiment 20000314 PARAMETER Experiment Name: At_14day_Shoots-Roots_Sub_P Parameter: Plant Line Value: WS
  misc_feature: MA Experiment 20000314 PARAMETER Experiment Name: At_14day_Shoots-Roots_Sub_P Parameter: Tissue Value: Roots vs. Whole Plant
  misc_feature: MA Experiment ID: 20000315 Result: Down-regulated in Transcription
  misc_feature: MA Experiment 20000315 PARAMETER Experiment Name: At_14day_Shoots-Roots_Sub_P Parameter: Age (day) Value: 14
  misc_feature: MA Experiment 20000315 PARAMETER Experiment Name: At_14day_Shoots-Roots_Sub_P Parameter: Organism Value: A. thaliana
  misc_feature: MA Experiment 20000315 PARAMETER Experiment Name: At_14day_Shoots-Roots_Sub_P Parameter: Plant Line Value: WS
  misc_feature: MA Experiment 20000315 PARAMETER Experiment Name: At_14day_Shoots-Roots_Sub_P Parameter: Tissue Value: Shoots vs. Whole Plant
  misc_feature: MA Experiment ID: 20000355 Result: Up-regulated in Transcription
  misc_feature: MA Experiment 20000355 PARAMETER Experiment Name: At_Siliques_Sub_P Parameter: Age (day) Value: 21
  misc_feature: MA Experiment 20000355 PARAMETER Experiment Name: At_Siliques_Sub_P Parameter: Organism Value: A. thaliana
  misc_feature: MA Experiment 20000355 PARAMETER Experiment Name: At_Siliques_Sub_P Parameter: Plant Line Value: WS
  misc_feature: MA Experiment 20000355 PARAMETER Experiment Name: At_Siliques_Sub_P Parameter: Tissue Value: Less Than 5mm Siliques vs. Whole Plant
ccaacacatttacttttcttcttcttctctctctacgccatagctatggttttaccagagcttctcgtgattctagcagaatgggttctttaccgtcttcttgctaattcatgttacagagctgctagaaagctcagaggctatggtttccagttaaaaaatctcctaagcctctccaaaacacaatctctacacaacaattctcagcatcatcttcataaccatcatcaacaaaatcaccctaaccaaacccttcaagattctctagaccctctgttcccaagccttacaaaataccaagaacttcttctagacaaaaacagagcatgctctgtttcgtctgatcattatcgtgatacctttttctgcgatatcgatggtgttttattaagacaacattcgagcaaacatttccacacgttcttcccttacttcatgctcgtggcttttgaaggaggatcgatcatcagagcgatccttctcttgctctcctgttctttcctttggactctgcaacaagaaaccaaactcagagttctctctttcataaccttctctggtcttagagtcaaagacatggacaacgtttctagatcggttctaccaaaattcttcctcgagaacttgaatatccaagtttacgacatctgggctcgaactgagtactccaaagttgtgttcacgagcttgccgcaagtgctggtggagaggttcctcagagaacatctcaacgctgatgatgtgattgggactaaactgcaagaaataaaagtcatgggaaggaaattctacacaggcctagcttctggttctggtttcgtcctgaaacataaatcagctgaagactactttcttgatagcaagaagaagcctgcacttggaattggaagctcttcaagcccacaagatcacatcttcatctccatttgcaaagaagcttatttttggaatgaagaagagtccatgagcaagaacaacgcattgcctagagaaagatacccaaagccactgatattccacgacgggagattggctttcttgccaacaccattagctacattagctatgttcatatggctccctatcggatttttactcgctgtcttcaggatctcggtaggagtctttcttccttaccatgtagccaatttcttggcttctatgtccggtgttaggatcactttcaagacccataatttgaataacggtcgtccagagaaaggtaatagtggagtcttgtatgtatgcaaccataggaccctcctcgacccagttttcctcaccacttcgctgggcaagcccttgaccgcggttacttacagcctaagcaagttctccgagttcatagcacctctcaagacggttagccttaaaagagataggaagaaagacggtgaggcaatgcagagactattaagcaaaggagatctagtggtttgtccggagggaaccacatgtagagagccttatctactaaggttcagtcctttgttcgctgagttaactgaagacattgttcccgtggctgtagatgctcgagtgagcatgttctatgggacaactgcgagcgggctcaagtgtttagaccctatcttcttcctcatgaaccctaggccggtttattgtcttgagattttaaagaagttgccaaaagagatgacttgtgcaggaggcaagtcaagctttgaagttgcgaatttcatacagggagaacttgctagggttttgggatttgaatgcactaatctcacaaggagggataagtacttggttcttgctggaaatgaaggcattgtcagataaactattccgaattttcattagtttttttgtttgtttgaaaagctaaatattattgttatttcaggacttagatgtttaattctatatggttgattcattggc

SEQ ID NO: 38192 - protein, 600 aa, Arabidopsis thaliana
  peptide (1)..(600): Ceres Seq. ID no. 12328271
  misc_feature (148)..(599): Homolog of NCBI NO: 29788867 NR Description: hypothetical protein [Oryza sativa (japonica
  misc_feature (119)..(599): Homolog of NCBI NO: 17064780 NR Description: Unknown protein [Arabidopsis thaliana]
  misc_feature (119)..(599): Homolog of NCBI NO: 15223437 NR Description: hypothetical protein
  misc_feature (124)..(599): Homolog of NCBI NO: 37534314 NR Description: hypothetical protein [Oryza sativa (japonica
  misc_feature (112)..(600): Homolog of NCBI NO: 15235185 NR Description: unknown protein
  misc_feature (110)..(599): Homolog of NCBI NO: 38000002 NR Description: unknown protein [Oryza sativa (japonica
  misc_feature (110)..(599): Homolog of NCBI NO: 15224445 NR Description: unknown protein
  misc_feature (106)..(600): Homolog of NCBI NO: 18378959 NR Description: expressed protein
  misc_feature (16)..(600): Homolog of NCBI NO: 18390661 NR Description: expressed protein
  misc_feature (16)..(600): Homolog of NCBI NO: 21618047 NR Description: unknown [Arabidopsis thaliana]
PTHLLFFFFSLYAIAMVLPELLVILAEWVLYRLLANSCYRAARKLRGYGFQLKNLLSLSKTQSLHNNSQHHLHNHHQQNHPNQTLQDSLDPLFPSLTKYQELLLDKNRACSVSSDHYRDTFFCDIDGVLLRQHSSKHFHTFFPYFMLVAFEGGSIIRAILLLLSCSFLWTLQQETKLRVLSFITFSGLRVKDMDNVSRSVLPKFFLENLNIQVYDIWARTEYSKVVFTSLPQVLVERFLREHLNADDVIGTKLQEIKVMGRKFYTGLASGSGFVLKHKSAEDYFLDSKKKPALGIGSSSSPQDHIFISICKEAYFWNEEESMSKNNALPRERYPKPLIFHDGRLAFLPTPLATLAMFIWLPIGFLLAVFRISVGVFLPYHVANFLASMSGVRITFKTHNLNNGRPEKGNSGVLYVCNHRTLLDPVFLTTSLGKPLTAVTYSLSKFSEFIAPLKTVSLKRDRKKDGEAMQRLLSKGDLVVCPEGTTCREPYLLRFSPLFAELTEDIVPVAVDARVSMFYGTTASGLKCLDPIFFLMNPRPVYCLEILKKLPKEMTCAGGKSSFEVANFIQGELARVLGFECTNLTRRDKYLVLAGNEGIVR

SEQ ID NO: 38193 - protein, 585 aa, Arabidopsis thaliana
  peptide (1)..(585): Ceres Seq. ID no. 12328272
  misc_feature (133)..(584): Homolog of NCBI NO: 29788867 NR Description: hypothetical protein [Oryza sativa (japonica
  misc_feature (104)..(584): Homolog of NCBI NO: 17064780 NR Description: Unknown protein [Arabidopsis thaliana]
  misc_feature (104)..(584): Homolog of NCBI NO: 15223437 NR Description: hypothetical protein
  misc_feature (109)..(584): Homolog of NCBI NO: 37534314 NR Description: hypothetical protein [Oryza sativa (japonica
  misc_feature (97)..(585): Homolog of NCBI NO: 15235185 NR Description: unknown protein
  misc_feature (95)..(584): Homolog of NCBI NO: 38000002 NR Description: unknown protein [Oryza sativa (japonica
  misc_feature (95)..(584): Homolog of NCBI NO: 15224445 NR Description: unknown protein
  misc_feature (91)..(585): Homolog of NCBI NO: 18378959 NR Description: expressed protein
  misc_feature (1)..(585): Homolog of NCBI NO: 18390661 NR Description: expressed protein
  misc_feature (1)..(585): Homolog of NCBI NO: 21618047 NR Description: unknown [Arabidopsis thaliana]
MVLPELLVILAEWVLYRLLANSCYRAARKLRGYGFQLKNLLSLSKTQSLHNNSQHHLHNHHQQNHPNQTLQDSLDPLFPSLTKYQELLLDKNRACSVSSDHYRDTFFCDIDGVLLRQHSSKHFHTFFPYFMLVAFEGGSIIRAILLLLSCSFLWTLQQETKLRVLSFITFSGLRVKDMDNVSRSVLPKFFLENLNIQVYDIWARTEYSKVVFTSLPQVLVERFLREHLNADDVIGTKLQEIKVMGRKFYTGLASGSGFVLKHKSAEDYFLDSKKKPALGIGSSSSPQDHIFISICKEAYFWNEEESMSKNNALPRERYPKPLIFHDGRLAFLPTPLATLAMFIWLPIGFLLAVFRISVGVFLPYHVANFLASMSGVRITFKTHNLNNGRPEKGNSGVLYVCNHRTLLDPVFLTTSLGKPLTAVTYSLSKFSEFIAPLKTVSLKRDRKKDGEAMQRLLSKGDLVVCPEGTTCREPYLLRFSPLFAELTEDIVPVAVDARVSMFYGTTASGLKCLDPIFFLMNPRPVYCLEILKKLPKEMTCAGGKSSFEVANFIQGELARVLGFECTNLTRRDKYLVLAGNEGIVR

SEQ ID NO: 38194 - protein, 455 aa, Arabidopsis thaliana
  peptide (1)..(455): Ceres Seq. ID no. 12328273
  misc_feature (3)..(454): Homolog of NCBI NO: 29788867 NR Description: hypothetical protein [Oryza sativa (japonica
  misc_feature (1)..(454): Homolog of NCBI NO: 17064780 NR Description: Unknown protein [Arabidopsis thaliana]
  misc_feature (1)..(454): Homolog of NCBI NO: 15223437 NR Description: hypothetical protein
  misc_feature (1)..(454): Homolog of NCBI NO: 37534314 NR Description: hypothetical protein [Oryza sativa (japonica
  misc_feature (1)..(455): Homolog of NCBI NO: 15235185 NR Description: unknown protein
  misc_feature (1)..(454): Homolog of NCBI NO: 38000002 NR Description: unknown protein [Oryza sativa (japonica
  misc_feature (1)..(454): Homolog of NCBI NO: 15224445 NR Description: unknown protein
  misc_feature (1)..(455): Homolog of NCBI NO: 18378959 NR Description: expressed protein
  misc_feature (1)..(455): Homolog of NCBI NO: 18390661 NR Description: expressed protein
  misc_feature (1)..(455): Homolog of NCBI NO: 21618047 NR Description: unknown [Arabidopsis thaliana]
MLVAFEGGSIIRAILLLLSCSFLWTLQQETKLRVLSFITFSGLRVKDMDNVSRSVLPKFFLENLNIQVYDIWARTEYSKVVFTSLPQVLVERFLREHLNADDVIGTKLQEIKVMGRKFYTGLASGSGFVLKHKSAEDYFLDSKKKPALGIGSSSSPQDHIFISICKEAYFWNEEESMSKNNALPRERYPKPLIFHDGRLAFLPTPLATLAMFIWLPIGFLLAVFRISVGVFLPYHVANFLASMSGVRITFKTHNLNNGRPEKGNSGVLYVCNHRTLLDPVFLTTSLGKPLTAVTYSLSKFSEFIAPLKTVSLKRDRKKDGEAMQRLLSKGDLVVCPEGTTCREPYLLRFSPLFAELTEDIVPVAVDARVSMFYGTTASGLKCLDPIFFLMNPRPVYCLEILKKLPKEMTCAGGKSSFEVANFIQGELARVLGFECTNLTRRDKYLVLAGNEGIVR

SEQ ID NO: 38195 - DNA, 2450 bp, Arabidopsis thaliana
  misc_feature (1)..(2450): Ceres Seq. ID no. 12329669
  misc_feature: MA Experiment ID: 108434 Result: Down-regulated in Transcription
  misc_feature: MA Experiment 108434 PARAMETER Experiment Name: At_Root_Tips_cDNA_P Parameter: Tissue Value: Root Tips
  misc_feature: MA Experiment ID: 108463 Result: Up-regulated in Transcription
  misc_feature: MA Experiment 108463 PARAMETER Experiment Name: At_Germinating_Seeds_cDNA_P Parameter: Age (day) Value: 3 vs. 0
  misc_feature: MA Experiment 108463 PARAMETER Experiment Name: At_Germinating_Seeds_cDNA_P Parameter: Tissue Value: Germinating Seeds
  misc_feature: MA Experiment ID: 108464 Result: Up-regulated in Transcription
  misc_feature: MA Experiment 108464 PARAMETER Experiment Name: At_Germinating_Seeds_cDNA_P Parameter: Age (day) Value: 4 vs. 0
  misc_feature: MA Experiment 108464 PARAMETER Experiment Name: At_Germinating_Seeds_cDNA_P Parameter: Tissue Value: Germinating Seeds
  misc_feature: MA Experiment ID: 108474 Result: Down-regulated in Transcription
  misc_feature: MA Experiment 108474 PARAMETER Experiment Name: At_Drought_Flowers_cDNA_P Parameter: Timepoint (hr) Value: null
  misc_feature: MA Experiment 108474 PARAMETER Experiment Name: At_Drought_Flowers_cDNA_P Parameter: Treatment Value: Drought vs. No Drought
  misc_feature: MA Experiment ID: 108573 Result: Up-regulated in Transcription
  misc_feature: MA Experiment 108573 PARAMETER Experiment Name: At_Drought_cDNA_P Parameter: Timepoint (hr) Value: 6
  misc_feature: MA Experiment 108573 PARAMETER Experiment Name: At_Drought_cDNA_P Parameter: Tissue Value: Aerial
  misc_feature: MA Experiment 108573 PARAMETER Experiment Name: At_Drought_cDNA_P Parameter: Treatment Value: Drought vs. No Drought
  misc_feature: MA Experiment ID: 108577 Result: Up-regulated in Transcription
  misc_feature: MA Experiment 108577 PARAMETER Experiment Name: At_42deg_Heat_cDNA_P Parameter: Temperature (deg C) Value: 42 vs. 22
  misc_feature: MA Experiment 108577 PARAMETER Experiment Name: At_42deg_Heat_cDNA_P Parameter: Timepoint (hr) Value: 6
  misc_feature: MA Experiment 108577 PARAMETER Experiment Name: At_42deg_Heat_cDNA_P Parameter: Tissue Value: Aerial
  misc_feature: MA Experiment ID: 108595 Result: Down-regulated in Transcription
  misc_feature: MA Experiment 108595 PARAMETER Experiment Name: At_Ler-pi_Ovule_cDNA_P Parameter: Plant Line Value: null
  misc_feature: MA Experiment ID: 108605 Result: Up-regulated in Transcription
  misc_feature: MA Experiment 108605 PARAMETER Experiment Name: At_100uM_ABA_cDNA_P Parameter: Timepoint (hr) Value: 6
  misc_feature: MA Experiment 108605 PARAMETER Experiment Name: At_100uM_ABA_cDNA_P Parameter: Tissue Value: Aerial
  misc_feature: MA Experiment 108605 PARAMETER Experiment Name: At_100uM_ABA_cDNA_P Parameter: Treatment Value: 100uM ABA vs. No Treatment
  misc_feature: MA Experiment ID: 108607 Result: Up-regulated in Transcription
  misc_feature: MA Experiment 108607 PARAMETER Experiment Name: At_100uM_ABA_cDNA_P Parameter: Timepoint (hr) Value: 4
  misc_feature: MA Experiment 108607 PARAMETER Experiment Name: At_100uM_ABA_cDNA_P Parameter: Tissue Value: Aerial
  misc_feature: MA Experiment 108607 PARAMETER Experiment Name: At_100uM_ABA_cDNA_P Parameter: Treatment Value: 100uM ABA vs. No Treatment
  misc_feature: MA Experiment ID: 108668 Result: Up-regulated in Transcription
  misc_feature: MA Experiment 108668 PARAMETER Experiment Name: At_2mM_SA_cDNA_P Parameter: Plant Line Value: WS
  misc_feature: MA Experiment 108668 PARAMETER Experiment Name: At_2mM_SA_cDNA_P Parameter: Timepoint (hr) Value: 6
  misc_feature: MA Experiment 108668 PARAMETER Experiment Name: At_2mM_SA_cDNA_P Parameter: Treatment Value: 2mM SA vs. No Treatment
  misc_feature: MA Experiment ID: 20000089 Result: Down-regulated in Transcription
  misc_feature: MA Experiment ID: 20000090 Result: Down-regulated in Transcription
  misc_feature: MA Experiment ID: 20000169 Result: Up-regulated in Transcription
  misc_feature: MA Experiment 20000169 PARAMETER Experiment Name: At_100uM_ABA_P Parameter: Age (day) Value: 14
  misc_feature: MA Experiment 20000169 PARAMETER Experiment Name: At_100uM_ABA_P Parameter: Organism Value: A. thaliana
  misc_feature: MA Experiment 20000169 PARAMETER Experiment Name: At_100uM_ABA_P Parameter: Plant Line Value: WS
  misc_feature: MA Experiment 20000169 PARAMETER Experiment Name: At_100uM_ABA_P Parameter: Timepoint (hr) Value: 6
  misc_feature: MA Experiment 20000169 PARAMETER Experiment Name: At_100uM_ABA_P Parameter: Tissue Value: Aerial
  misc_feature: MA Experiment 20000169 PARAMETER Experiment Name: At_100uM_ABA_P Parameter: Treatment Value: 100uM ABA vs. No Treatment
  misc_feature: MA Experiment ID: 20000182 Result: Up-regulated in Transcription
  misc_feature: MA Experiment 20000182 PARAMETER Experiment Name: At_2mM_SA_P Parameter: Age (day) Value: 14
  misc_feature: MA Experiment 20000182 PARAMETER Experiment Name: At_2mM_SA_P Parameter: Organism Value: A. thaliana
  misc_feature: MA Experiment 20000182 PARAMETER Experiment Name: At_2mM_SA_P Parameter: Plant Line Value: WS
  misc_feature: MA Experiment 20000182 PARAMETER Experiment Name: At_2mM_SA_P Parameter: Timepoint (hr) Value: 6
  misc_feature: MA Experiment 20000182 PARAMETER Experiment Name: At_2mM_SA_P Parameter: Tissue Value: Aerial
  misc_feature: MA Experiment 20000182 PARAMETER Experiment Name: At_2mM_SA_P Parameter: Treatment Value: 2mM SA vs. No Treatment
  misc_feature: MA Experiment ID: 20000185 Result: Down-regulated in Transcription
  misc_feature: MA Experiment 20000185 PARAMETER Experiment Name: At_Roots__P Parameter: Age (day) Value: 7 vs. 21
  misc_feature: MA Experiment 20000185 PARAMETER Experiment Name: At_Roots__P Parameter: Organism Value: A. thaliana
  misc_feature: MA Experiment 20000185 PARAMETER Experiment Name: At_Roots__P Parameter: Tissue Value: Roots vs. Whole Plant
  misc_feature: MA Experiment ID: 20000234 Result: Down-regulated in Transcription
  misc_feature: MA Experiment 20000234 PARAMETER Experiment Name: At_Siliques_P Parameter: Age (day) Value: 21
  misc_feature: MA Experiment 20000234 PARAMETER Experiment Name: At_Siliques_P Parameter: Organism Value: A. thaliana
  misc_feature: MA Experiment 20000234 PARAMETER Experiment Name: At_Siliques_P Parameter: Plant Line Value: WS
  misc_feature: MA Experiment 20000234 PARAMETER Experiment Name: At_Siliques_P Parameter: Tissue Value: Less Than 5mm Siliques vs. Whole Plant
  misc_feature: MA Experiment ID: 20000265 Result: Up-regulated in Transcription
  misc_feature: MA Experiment 20000265 PARAMETER Experiment Name: At_Open_Flower_P Parameter: Age (day) Value: 21
  misc_feature: MA Experiment 20000265 PARAMETER Experiment Name: At_Open_Flower_P Parameter: Plant Line Value: WS
  misc_feature: MA Experiment 20000265 PARAMETER Experiment Name: At_Open_Flower_P Parameter: Tissue Value: Closed Flower vs. Whole Plant
  misc_feature: MA Experiment ID: 20000439 Result: Down-regulated in Transcription
  misc_feature: MA Experiment 20000439 PARAMETER Experiment Name: At_Roots__P Parameter: Age (day) Value: 14 vs. 21
  misc_feature: MA Experiment 20000439 PARAMETER Experiment Name: At_Roots__P Parameter: Organism Value: A. thaliana
  misc_feature: MA Experiment 20000439 PARAMETER Experiment Name: At_Roots__P Parameter: Tissue Value: Roots vs. Whole Plant
  misc_feature: MA Experiment ID: 20000445 Result: Up-regulated in Transcription
  misc_feature: MA Experiment 20000445 PARAMETER Experiment Name: At_100uM_NAA__P Parameter: Age (day) Value: 14
  misc_feature: MA Experiment 20000445 PARAMETER Experiment Name: At_100uM_NAA__P Parameter: Organism Value: A. thaliana
  misc_feature: MA Experiment 20000445 PARAMETER Experiment Name: At_100uM_NAA__P Parameter: Plant Line Value: WS
  misc_feature: MA Experiment 20000445 PARAMETER Experiment Name: At_100uM_NAA__P Parameter: Timepoint (hr) Value: 6
  misc_feature: MA Experiment 20000445 PARAMETER Experiment Name: At_100uM_NAA__P Parameter: Tissue Value: Aerial
  misc_feature: MA Experiment 20000445 PARAMETER Experiment Name: At_100uM_NAA__P Parameter: Treatment Value: 100uM NAA vs. No Treatment
  misc_feature: MA Experiment ID: 20000495 Result: Down-regulated in Transcription
  misc_feature: MA Experiment 20000495 PARAMETER Experiment Name: At_Guard_Cells_P Parameter: Harvest Date Value: 8/2/2002
  misc_feature: MA Experiment 20000495 PARAMETER Experiment Name: At_Guard_Cells_P Parameter: Organism Value: A. thaliana
  misc_feature: MA Experiment 20000495 PARAMETER Experiment Name: At_Guard_Cells_P Parameter: Tissue Value: Guard Cells vs. Leaves
  misc_feature: MA Experiment ID: 20000794 Result: Up-regulated in Transcription
  misc_feature: MA Experiment 20000794 PARAMETER Experiment Name: At_Petals_P Parameter: Age (day) Value: 23-25 days
  misc_feature: MA Experiment 20000794 PARAMETER Experiment Name: At_Petals_P Parameter: Plant Line Value: WS
  misc_feature: MA Experiment 20000794 PARAMETER Experiment Name: At_Petals_P Parameter: Tissue Value: Petals vs. Whole plant
  misc_feature: MA Experiment ID: 20001560 Result: Down-regulated in Transcription
  misc_feature: MA Experiment 20001560 PARAMETER Experiment Name: At_Drought_Soil_Dry_P Parameter: Age (day) Value: 28
  misc_feature: MA Experiment 20001560 PARAMETER Experiment Name: At_Drought_Soil_Dry_P Parameter: Organism Value: A. thaliana
  misc_feature: MA Experiment 20001560 PARAMETER Experiment Name: At_Drought_Soil_Dry_P Parameter: Plant Line Value: WS
  misc_feature: MA Experiment 20001560 PARAMETER Experiment Name: At_Drought_Soil_Dry_P Parameter: Post Timepoint (hr) Value: None
  misc_feature: MA Experiment 20001560 PARAMETER Experiment Name: At_Drought_Soil_Dry_P Parameter: Post-Treatment Value: None
  misc_feature: MA Experiment 20001560 PARAMETER Experiment Name: At_Drought_Soil_Dry_P Parameter: Timepoint (day) Value: 14
  misc_feature: MA Experiment 20001560 PARAMETER Experiment Name: At_Drought_Soil_Dry_P Parameter: Treatment Value: Drought vs. No Drought
ataagtcataaggacgacaccattacgcaacttagtcctcttacctctctctctctcgactctgttccaagaaattcctctacttaatacagctgattctacagattcctgctacgaaatttctgggtctgggttgatctttgtctcaccagtcaacccaattcaggactttgataaaggtggaaatggtggctttattagcttctcagagctgctgctatggcggtgagaccgcaagagtcaccaaagctattggtttcagtagctctttggagaatcatttcactggggaagccactcagtgttatggcagcaagtctaagagatttcgtattgagatgagacagtcggaattgccctctaaggttggaatcaatggacgttcagtcaaaatggttcctgcgagtgaggtggtgaagaggaaagatggtgtgaatggatcggctgggaaaggtgttaatggagcgagtttggttagtagtagaaacattaatggtgcggcgtcaactttggttaaggcaccaaagaaaacaacagaatcgtaccttcctccaccggttgaaggagttagggttcttccttctgatgaaggttttagctgggctgatgagaattatagctcacttcaacgcagtattgatgtttggtcatttgttatttccctgaggattcgtatcttgttcgataattcgaaatgggcttatgttggaggattcacagaagaaaaacagaaaagcagaagaagagaaacagcttcatggttgagagagagtgtattgcagcttggtccaacgtttatcaaactgggacagttgtcttcaactaggtcagacttgtttccgcgcgaattcgtggatgagctttccaagttgcaggacagagtccccgctttttctccagagaaagcaaagcgcttcattgaggctgaacttggggctcctattagtgtaatgtataaagaatttgaagagcaacccatagctgcagctagccttggtcaggtacacagagctgttttgcacaatggcgagaaagtggtagtaaaagtacaaagacccggactaaagaaacttttcgatattgatctacgaaatctgaagctgattgccgagtatttccagaaaagtgaatcatttggtacaaacgattgggttggtatctatgaagaatgtgccttaattttgtatcaagagattgactacataaacgaagctaagaacgctgacagattccggagagacttccggaatataaactgggtccgcgtacctttggtttattgggattactctgccatgaaggtcttgactttggagtatgtaccaggtgttaagatcaacaacttggacgccttagctgcacggggttttaaccgttctagaatcgcatcacgggccattgaagcttatcttatacagatactcaaaaccggcttctttcatgcggatccgcacccaggaaaccttgcaattgatgtagatgaatcaatcatctactatgacttcggcatgatgggagagatcaaaacatttactcggaagagattacttgatctcttctattctgtttatgaaaaagatgcaaaaaaggtcatgcaaaaccttatagaccttgaagcacttcaacccactggagatctttcatcggtaaggagatctgttcagtttttcttggacaacctattaagccaatcaccagatcagcaacagactttggcagctattggagaggatctgtttgcaatttcccaggatcagccattccgtttcccatcaactttcacctttgtcatccgagcattttccacacttgagggtattggttacatccttgatccagaattttcctttgtgaaggttgcggctccttatgcgcaggaactcctggatctaaaacaaaggcaacgctcgggaactcagcttgtccaagaaataagaaagcaggctgatgatgccaggtcttctactctgtctatgccatatcgagtgcagcgaatagaagagtttgtgaaagaactcgattcaggcgatctgaaactccgtgttcgggttcttgagtcggaaagagcagcccggaaagcgacaatactgcagatggcgacgatgtatacagttcttggaggaactctacttaatattggggttacatttagcaaccaaggaagtcagcttgttgccaatggatccttcattggagcagggatattcatgttattggtactgaggtctatgcaaagggtaaataagcttgataaatttgagaagatgatatgatgatgactggtggtctggtggatagtttattcttttaaagctccaaatatcagatatagaatttgtgatgtataggtatagcatgtatctttagctcccatacacaatatttataaattgtataaaaactgtttctaaggaaaggaaagtcaaagatataatatgagactgagtttc

SEQ ID NO: 38196 - protein, 695 aa, Arabidopsis thaliana
  peptide (1)..(695): Ceres Seq. ID no. 12329670
  misc_feature (247)..(365): Pfam Name: ABC1 family Pfam Description: ABC1 family
  misc_feature (399)..(512): Homolog of NCBI NO: 8843758 NR Description: ABC transporter-like [Arabidopsis thaliana]
  misc_feature (506)..(695): Homolog of NCBI NO: 8843758 NR Description: ABC transporter-like [Arabidopsis thaliana]
  misc_feature (79)..(415): Homolog of NCBI NO: 8843758 NR Description: ABC transporter-like [Arabidopsis thaliana]
  misc_feature (506)..(695): Homolog of NCBI NO: 22328063 NR Description: ABC transporter-like
  misc_feature (79)..(512): Homolog of NCBI NO: 22328063 NR Description: ABC transporter-like
  misc_feature (105)..(679): Homolog of NCBI NO: 16330264 NR Description: ABC1-like [Synechocystis sp. PCC 6803]
  misc_feature (133)..(690): Homolog of NCBI NO: 17232007 NR Description: hypothetical protein [Nostoc sp. PCC 7120]
  misc_feature (133)..(690): Homolog of NCBI NO: 23130618 NR Description: hypothetical protein [Nostoc punctiforme]
  misc_feature (133)..(690): Homolog of NCBI NO: 23039589 NR Description: hypothetical protein [Trichodesmium erythraeum
  misc_feature (130)..(695): Homolog of NCBI NO: 19424003 NR Description: unknown protein [Arabidopsis thaliana]
MVALLASQSCCYGGETARVTKAIGFSSSLENHFTGEATQCYGSKSKRFRIEMRQSELPSKVGINGRSVKMVPASEVVKRKDGVNGSAGKGVNGASLVSSRNINGAASTLVKAPKKTTESYLPPPVEGVRVLPSDEGFSWADENYSSLQRSIDVWSFVISLRIRILFDNSKWAYVGGFTEEKQKSRRRETASWLRESVLQLGPTFIKLGQLSSTRSDLFPREFVDELSKLQDRVPAFSPEKAKRFIEAELGAPISVMYKEFEEQPIAAASLGQVHRAVLHNGEKVVVKVQRPGLKKLFDIDLRNLKLIAEYFQKSESFGTNDWVGIYEECALILYQEIDYINEAKNADRFRRDFRNINWVRVPLVYWDYSAMKVLTLEYVPGVKINNLDALAARGFNRSRIASRAIEAYLIQILKTGFFHADPHPGNLAIDVDESIIYYDFGMMGEIKTFTRKRLLDLFYSVYEKDAKKVMQNLIDLEALQPTGDLSSVRRSVQFFLDNLLSQSPDQQQTLAAIGEDLFAISQDQPFRFPSTFTFVIRAFSTLEGIGYILDPEFSFVKVAAPYAQELLDLKQRQRSGTQLVQEIRKQADDARSSTLSMPYRVQRIEEFVKELDSGDLKLRVRVLESERAARKATILQMATMYTVLGGTLLNIGVTFSNQGSQLVANGSFIGAGIFMLLVLRSMQRVNKLDKFEKMI

SEQ ID NO: 38197 - protein, 644 aa, Arabidopsis thaliana
  peptide (1)..(644): Ceres Seq. ID no. 12329671
  misc_feature (196)..(314): Pfam Name: ABC1 family Pfam Description: ABC1 family
  misc_feature (348)..(461): Homolog of NCBI NO: 8843758 NR Description: ABC transporter-like [Arabidopsis thaliana]
  misc_feature (455)..(644): Homolog of NCBI NO: 8843758 NR Description: ABC transporter-like [Arabidopsis thaliana]
  misc_feature (28)..(364): Homolog of NCBI NO: 8843758 NR Description: ABC transporter-like [Arabidopsis thaliana]
  misc_feature (455)..(644): Homolog of NCBI NO: 22328063 NR Description: ABC transporter-like
  misc_feature (28)..(461): Homolog of NCBI NO: 22328063 NR Description: ABC transporter-like
  misc_feature (54)..(628): Homolog of NCBI NO: 16330264 NR Description: ABC1-like [Synechocystis sp. PCC 6803]
  misc_feature (82)..(639): Homolog of NCBI NO: 17232007 NR Description: hypothetical protein [Nostoc sp. PCC 7120]
  misc_feature (82)..(639): Homolog of NCBI NO: 23130618 NR Description: hypothetical protein [Nostoc punctiforme]
  misc_feature (82)..(639): Homolog of NCBI NO: 23039589 NR Description: hypothetical protein [Trichodesmium erythraeum
  misc_feature (79)..(644): Homolog of NCBI NO: 19424003 NR Description: unknown protein [Arabidopsis thaliana]
MRQSELPSKVGINGRSVKMVPASEVVKRKDGVNGSAGKGVNGASLVSSRNINGAASTLVKAPKKTTESYLPPPVEGVRVLPSDEGFSWADENYSSLQRSIDVWSFVISLRIRILFDNSKWAYVGGFTEEKQKSRRRETASWLRESVLQLGPTFIKLGQLSSTRSDLFPREFVDELSKLQDRVPAFSPEKAKRFIEAELGAPISVMYKEFEEQPIAAASLGQVHRAVLHNGEKVVVKVQRPGLKKLFDIDLRNLKLIAEYFQKSESFGTNDWVGIYEECALILYQEIDYINEAKNADRFRRDFRNINWVRVPLVYWDYSAMKVLTLEYVPGVKINNLDALAARGFNRSRIASRAIEAYLIQILKTGFFHADPHPGNLAIDVDESIIYYDFGMMGEIKTFTRKRLLDLFYSVYEKDAKKVMQNLIDLEALQPTGDLSSVRRSVQFFLDNLLSQSPDQQQTLAAIGEDLFAISQDQPFRFPSTFTFVIRAFSTLEGIGYILDPEFSFVKVAAPYAQELLDLKQRQRSGTQLVQEIRKQADDARSSTLSMPYRVQRIEEFVKELDSGDLKLRVRVLESERAARKATILQMATMYTVLGGTLLNIGVTFSNQGSQLVANGSFIGAGIFMLLVLRSMQRVNKLDKFEKMI

SEQ ID NO: 38198 - protein, 626 aa, Arabidopsis thaliana
  peptide (1)..(626): Ceres Seq. ID no. 12329672
  misc_feature (178)..(296): Pfam Name: ABC1 family Pfam Description: ABC1 family
  misc_feature (330)..(443): Homolog of NCBI NO: 8843758 NR Description: ABC transporter-like [Arabidopsis thaliana]
  misc_feature (437)..(626): Homolog of NCBI NO: 8843758 NR Description: ABC transporter-like [Arabidopsis thaliana]
  misc_feature (10)..(346): Homolog of NCBI NO: 8843758 NR Description: ABC transporter-like [Arabidopsis thaliana]
  misc_feature (437)..(626): Homolog of NCBI NO: 22328063 NR Description: ABC transporter-like
  misc_feature (10)..(443): Homolog of NCBI NO: 22328063 NR Description: ABC transporter-like
  misc_feature (36)..(610): Homolog of NCBI NO: 16330264 NR Description: ABC1-like [Synechocystis sp. PCC 6803]
  misc_feature (64)..(621): Homolog of NCBI NO: 17232007 NR Description: hypothetical protein [Nostoc sp. PCC 7120]
  misc_feature (64)..(621): Homolog of NCBI NO: 23130618 NR Description: hypothetical protein [Nostoc punctiforme]
  misc_feature (64)..(621): Homolog of NCBI NO: 23039589 NR Description: hypothetical protein [Trichodesmium erythraeum
  misc_feature (61)..(626): Homolog of NCBI NO: 19424003 NR Description: unknown protein [Arabidopsis thaliana]
MVPASEVVKRKDGVNGSAGKGVNGASLVSSRNINGAASTLVKAPKKTTESYLPPPVEGVRVLPSDEGFSWADENYSSLQRSIDVWSFVISLRIRILFDNSKWAYVGGFTEEKQKSRRRETASWLRESVLQLGPTFIKLGQLSSTRSDLFPREFVDELSKLQDRVPAFSPEKAKRFIEAELGAPISVMYKEFEEQPIAAASLGQVHRAVLHNGEKVVVKVQRPGLKKLFDIDLRNLKLIAEYFQKSESFGTNDWVGIYEECALILYQEIDYINEAKNADRFRRDFRNINWVRVPLVYWDYSAMKVLTLEYVPGVKINNLDALAARGFNRSRIASRAIEAYLIQILKTGFFHADPHPGNLAIDVDESIIYYDFGMMGEIKTFTRKRLLDLFYSVYEKDAKKVMQNLIDLEALQPTGDLSSVRRSVQFFLDNLLSQSPDQQQTLAAIGEDLFAISQDQPFRFPSTFTFVIRAFSTLEGIGYILDPEFSFVKVAAPYAQELLDLKQRQRSGTQLVQEIRKQADDARSSTLSMPYRVQRIEEFVKELDSGDLKLRVRVLESERAARKATILQMATMYTVLGGTLLNIGVTFSNQGSQLVANGSFIGAGIFMLLVLRSMQRVNKLDKFEKMI

SEQ ID NO: 38199 - DNA, 1202 bp, Arabidopsis thaliana
  misc_feature (1)..(1202): Ceres Seq. ID no. 13576721
  misc_feature: MA Experiment ID: 108501 Result: Down-regulated in Transcription
  misc_feature: MA Experiment 108501 PARAMETER Experiment Name: At_ap2_floral_buds_cDNA_P Parameter: Plant Line Value: ap2 (Ler.)
  misc_feature: MA Experiment 108501 PARAMETER Experiment Name: At_ap2_floral_buds_cDNA_P Parameter: Tissue Value: Closed Flower
  misc_feature: MA Experiment ID: 20000173 Result: Down-regulated in Transcription
  misc_feature: MA Experiment 20000173 PARAMETER Experiment Name: At_42deg_Heat_P Parameter: Age (day) Value: 14
  misc_feature: MA Experiment 20000173 PARAMETER Experiment Name: At_42deg_Heat_P Parameter: Organism Value: A. thaliana
  misc_feature: MA Experiment 20000173 PARAMETER Experiment Name: At_42deg_Heat_P Parameter: Plant Line Value: WS
  misc_feature: MA Experiment 20000173 PARAMETER Experiment Name: At_42deg_Heat_P Parameter: Temperature (deg C) Value: 42 vs. 22
  misc_feature: MA Experiment 20000173 PARAMETER Experiment Name: At_42deg_Heat_P Parameter: Timepoint (hr) Value: 6
  misc_feature: MA Experiment 20000173 PARAMETER Experiment Name: At_42deg_Heat_P Parameter: Tissue Value: Aerial
  misc_feature: MA Experiment ID: 20000184 Result: Up-regulated in Transcription
  misc_feature: MA Experiment 20000184 PARAMETER Experiment Name: At_Shoots__P Parameter: Age (day) Value: 7
  misc_feature: MA Experiment 20000184 PARAMETER Experiment Name: At_Shoots__P Parameter: Tissue Value: Shoots vs. Whole Plant
  misc_feature: MA Experiment ID: 20000227 Result: Up-regulated in Transcription
  misc_feature: MA Experiment 20000227 PARAMETER Experiment Name: At_Root-Tips-vs-Tops_P Parameter: Tissue Value: Root Tips vs. Root Tops
  misc_feature: MA Experiment ID: 20000264 Result: Up-regulated in Transcription
  misc_feature: MA Experiment 20000264 PARAMETER Experiment Name: At_Open_Flower_P Parameter: Age (day) Value: 21
  misc_feature: MA Experiment 20000264 PARAMETER Experiment Name: At_Open_Flower_P Parameter: Plant Line Value: WS
  misc_feature: MA Experiment 20000264 PARAMETER Experiment Name: At_Open_Flower_P Parameter: Tissue Value: Open Flower vs. Whole Plant
  misc_feature: MA Experiment ID: 20000286 Result: Up-regulated in Transcription
  misc_feature: MA Experiment 20000286 PARAMETER Experiment Name: At_Open_Flower_P Parameter: Age (day) Value: 21
  misc_feature: MA Experiment 20000286 PARAMETER Experiment Name: At_Open_Flower_P Parameter: Plant Line Value: WS
  misc_feature: MA Experiment 20000286 PARAMETER Experiment Name: At_Open_Flower_P Parameter: Tissue Value: Half Open vs. Whole Plant
  misc_feature: MA Experiment ID: 20000436 Result: Down-regulated in Transcription
  misc_feature: MA Experiment 20000436 PARAMETER Experiment Name: At_Drought_P Parameter: Age (day) Value: 7
  misc_feature: MA Experiment 20000436 PARAMETER Experiment Name: At_Drought_P Parameter: Organism Value: A. thaliana
  misc_feature: MA Experiment 20000436 PARAMETER Experiment Name: At_Drought_P Parameter: Plant Line Value: WS
  misc_feature: MA Experiment 20000436 PARAMETER Experiment Name: At_Drought_P Parameter: Timepoint (hr) Value: 12
  misc_feature: MA Experiment 20000436 PARAMETER Experiment Name: At_Drought_P Parameter: Tissue Value: Whole Plant
  misc_feature: MA Experiment 20000436 PARAMETER Experiment Name: At_Drought_P Parameter: Treatment Value: Drought vs. No Drought
  misc_feature: MA Experiment ID: 20000437 Result: Down-regulated in Transcription
  misc_feature: MA Experiment 20000437 PARAMETER Experiment Name: At_Drought_P Parameter: Age (day) Value: 8
  misc_feature: MA Experiment 20000437 PARAMETER Experiment Name: At_Drought_P Parameter: Organism Value: A. thaliana
  misc_feature: MA Experiment 20000437 PARAMETER Experiment Name: At_Drought_P Parameter: Plant Line Value: WS
  misc_feature: MA Experiment 20000437 PARAMETER Experiment Name: At_Drought_P Parameter: Timepoint (hr) Value: 24
  misc_feature: MA Experiment 20000437 PARAMETER Experiment Name: At_Drought_P Parameter: Tissue Value: Whole Plant
  misc_feature: MA Experiment 20000437 PARAMETER Experiment Name: At_Drought_P Parameter: Treatment Value: Drought vs. No Drought
  misc_feature: MA Experiment ID: 20000438 Result: Up-regulated in Transcription
  misc_feature: MA Experiment 20000438 PARAMETER Experiment Name: At_Shoots__P Parameter: Age (day) Value: 14
  misc_feature: MA Experiment 20000438 PARAMETER Experiment Name: At_Shoots__P Parameter: Tissue Value: Shoots vs. Whole Plant
  misc_feature: MA Experiment ID: 20000794 Result: Up-regulated in Transcription
  misc_feature: MA Experiment 20000794 PARAMETER Experiment Name: At_Petals_P Parameter: Age (day) Value: 23-25 days
  misc_feature: MA Experiment 20000794 PARAMETER Experiment Name: At_Petals_P Parameter: Plant Line Value: WS
  misc_feature: MA Experiment 20000794 PARAMETER Experiment Name: At_Petals_P Parameter: Tissue Value: Petals vs. Whole plant
  misc_feature: MA Experiment ID: 20001555 Result: Down-regulated in Transcription
  misc_feature: MA Experiment 20001555 PARAMETER Experiment Name: At_Drought_Soil_Dry_P Parameter: Age (day) Value: 24
  misc_feature: MA Experiment 20001555 PARAMETER Experiment Name: At_Drought_Soil_Dry_P Parameter: Organism Value: A. thaliana
  misc_feature: MA Experiment 20001555 PARAMETER Experiment Name: At_Drought_Soil_Dry_P Parameter: Plant Line Value: WS
  misc_feature: MA Experiment 20001555 PARAMETER Experiment Name: At_Drought_Soil_Dry_P Parameter: Post Timepoint (hr) Value: None
  misc_feature: MA Experiment 20001555 PARAMETER Experiment Name: At_Drought_Soil_Dry_P Parameter: Post-Treatment Value: None
  misc_feature: MA Experiment 20001555 PARAMETER Experiment Name: At_Drought_Soil_Dry_P Parameter: Timepoint (day) Value: 10
  misc_feature: MA Experiment 20001555 PARAMETER Experiment Name: At_Drought_Soil_Dry_P Parameter: Treatment Value: Drought vs. No Drought
  misc_feature: MA Experiment ID: 20001556 Result: Down-regulated in Transcription
  misc_feature: MA Experiment 20001556 PARAMETER Experiment Name: At_Drought_Soil_Dry_P Parameter: Age (day) Value: 26
  misc_feature: MA Experiment 20001556 PARAMETER Experiment Name: At_Drought_Soil_Dry_P Parameter: Organism Value: A. thaliana
  misc_feature: MA Experiment 20001556 PARAMETER Experiment Name: At_Drought_Soil_Dry_P Parameter: Plant Line Value: WS
  misc_feature: MA Experiment 20001556 PARAMETER Experiment Name: At_Drought_Soil_Dry_P Parameter: Post Timepoint (hr) Value: None
  misc_feature: MA Experiment 20001556 PARAMETER Experiment Name: At_Drought_Soil_Dry_P Parameter: Post-Treatment Value: None
  misc_feature: MA Experiment 20001556 PARAMETER Experiment Name: At_Drought_Soil_Dry_P Parameter: Timepoint (day) Value: 12
  misc_feature: MA Experiment 20001556 PARAMETER Experiment Name: At_Drought_Soil_Dry_P Parameter: Treatment Value: Drought vs. No Drought
  misc_feature: MA Experiment ID: 20001557 Result: Down-regulated in Transcription
  misc_feature: MA Experiment 20001557 PARAMETER Experiment Name: At_Drought_Soil_Dry_P Parameter: Age (day) Value: 27
  misc_feature: MA Experiment 20001557 PARAMETER Experiment Name: At_Drought_Soil_Dry_P Parameter: Organism Value: A. thaliana
  misc_feature: MA Experiment 20001557 PARAMETER Experiment Name: At_Drought_Soil_Dry_P Parameter: Plant Line Value: WS
  misc_feature: MA Experiment 20001557 PARAMETER Experiment Name: At_Drought_Soil_Dry_P Parameter: Post Timepoint (hr) Value: 3
  misc_feature: MA Experiment 20001557 PARAMETER Experiment Name: At_Drought_Soil_Dry_P Parameter: Post-Treatment Value: Re-Water vs. No Drought
  misc_feature: MA Experiment 20001557 PARAMETER Experiment Name: At_Drought_Soil_Dry_P Parameter: Timepoint (day) Value: 13
  misc_feature: MA Experiment 20001557 PARAMETER Experiment Name: At_Drought_Soil_Dry_P Parameter: Treatment Value: Drought vs. No Drought
  misc_feature: MA Experiment ID: 20001560 Result: Down-regulated in Transcription
  misc_feature: MA Experiment 20001560 PARAMETER Experiment Name: At_Drought_Soil_Dry_P Parameter: Age (day) Value: 28
  misc_feature: MA Experiment 20001560 PARAMETER Experiment Name: At_Drought_Soil_Dry_P Parameter: Organism Value: A. thaliana
  misc_feature: MA Experiment 20001560 PARAMETER Experiment Name: At_Drought_Soil_Dry_P Parameter: Plant Line Value: WS
  misc_feature: MA Experiment 20001560 PARAMETER Experiment Name: At_Drought_Soil_Dry_P Parameter: Post Timepoint (hr) Value: None
  misc_feature: MA Experiment 20001560 PARAMETER Experiment Name: At_Drought_Soil_Dry_P Parameter: Post-Treatment Value: None
  misc_feature: MA Experiment 20001560 PARAMETER Experiment Name: At_Drought_Soil_Dry_P Parameter: Timepoint (day) Value: 14
  misc_feature: MA Experiment 20001560 PARAMETER Experiment Name: At_Drought_Soil_Dry_P Parameter: Treatment Value: Drought vs. No Drought
acatgaaccataactttctctaacatcactctcctttacacaaccccaaaaatagacctcacctctctcgtcttctctattctctccgctccttaatttccaattccaaccttctctgttttgccttgatggaaaagatagctccggagctcttcctcgtcgccggtaacccggactctttcgtcgtcgacgacctcctcgacttctctaacgacgacggcgaagttgacgacggcttaaacactcttcccgattcttcaacactctccaccggcactctcaccgacagttccaactcctcctcgcttttcaccgacggcactggcttctccgacctatatattccgaatgacgatatagcagaattagaatggttatcaaattttgtggaagaatcattcgcaggagaagaccaagacaagcttcacttattttccggtttaaaaaaccctcaaaccaccgggtcgaccctgacccacttaattaaacccgaacccgaacttgatcatcaattcatcgacatcgatgaatccaacgtcgccgttcctgccaaggccagaagcaagagatcacgttctgcagcctccacgtgggcttcccgtcttttatccttagccgattccgacgaaaccaatcccaagaagaaacaacgaagagtgaaagaacaagacttcgccggagatatggacgtggattgcggagaaagcggaggaggacgacgttgtttgcactgcgcgacggagaagacgccgcaatggaggacgggacctatgggtccgaagacgctttgtaacgcttgcggagtgaggtacaaatcagggaggctcgtgccggagtatagaccggcgtcgagtccgacgttcgtgatggcgaggcactcgaactctcaccggaaagtgatggagctccggcgacagaaggagatgagagacgagcatttgctgagtcagcttaggtgtgagaatctactgatggatatcagatccaacggtgaagatttcttaatgcataataatactaaccacgtggctcctgattttagacacttaatctagttttctatttccacgtggataatttcgcaataatttgttcgtttcgtttagctttatttttttttttttcctttttaacatttgtttttcattttctgcagactacttctagtactattgatatatttgatagcttttgtttttgct

SEQ ID NO: 38200 - protein, 308 aa, Arabidopsis thaliana
  peptide (1)..(308): Ceres Seq. ID no. 13576722
  misc_feature (14)..(266): Homolog of NCBI NO: 15225399 NR Description: GATA zinc finger protein [Arabidopsis thaliana]
  misc_feature (52)..(92): Homolog of NCBI NO: 37536778 NR Description: putative transcription factor
  misc_feature (184)..(266): Homolog of NCBI NO: 37536778 NR Description: putative transcription factor
  misc_feature (15)..(92): Homolog of NCBI NO: 37572447 NR Description: AG-motif binding protein-3 [Nicotiana tabacum]
  misc_feature (135)..(266): Homolog of NCBI NO: 37572447 NR Description: AG-motif binding protein-3 [Nicotiana tabacum]
  misc_feature (193)..(269): Homolog of NCBI NO: 34909448 NR Description: OSJNBa0014K08.18 [Oryza sativa (japonica
  misc_feature (10)..(170): Homolog of NCBI NO: 34909448 NR Description: OSJNBa0014K08.18 [Oryza sativa (japonica
  misc_feature (187)..(308): Homolog of NCBI NO: 15239503 NR Description: GATA zinc finger protein [Arabidopsis thaliana]
  misc_feature (1)..(158): Homolog of NCBI NO: 15239503 NR Description: GATA zinc finger protein [Arabidopsis thaliana]
  misc_feature (1)..(308): Homolog of NCBI NO: 15233971 NR Description: GATA zinc finger protein [Arabidopsis thaliana]
MEKIAPELFLVAGNPDSFVVDDLLDFSNDDGEVDDGLNTLPDSSTLSTGTLTDSSNSSSLFTDGTGFSDLYIPNDDIAELEWLSNFVEESFAGEDQDKLHLFSGLKNPQTTGSTLTHLIKPEPELDHQFIDIDESNVAVPAKARSKRSRSAASTWASRLLSLADSDETNPKKKQRRVKEQDFAGDMDVDCGESGGGRRCLHCATEKTPQWRTGPMGPKTLCNACGVRYKSGRLVPEYRPASSPTFVMARHSNSHRKVMELRRQKEMRDEHLLSQLRCENLLMDIRSNGEDFLMHNNTNHVAPDFRHLI

SEQ ID NO: 38201 - DNA, 1661 bp, Arabidopsis thaliana
  misc_feature (1)..(1661): Ceres Seq. ID no. 12326924
  misc_feature: MA Experiment ID: 108434 Result: Down-regulated in Transcription
  misc_feature: MA Experiment 108434 PARAMETER Experiment Name: At_Root_Tips_cDNA_P Parameter: Tissue Value: Root Tips
  misc_feature: MA Experiment ID: 108463 Result: Up-regulated in Transcription
  misc_feature: MA Experiment 108463 PARAMETER Experiment Name: At_Germinating_Seeds_cDNA_P Parameter: Age (day) Value: 3 vs. 0
  misc_feature: MA Experiment 108463 PARAMETER Experiment Name: At_Germinating_Seeds_cDNA_P Parameter: Tissue Value: Germinating Seeds
  misc_feature: MA Experiment ID: 108572 Result: Up-regulated in Transcription
  misc_feature: MA Experiment 108572 PARAMETER Experiment Name: At_Drought_cDNA_P Parameter: Timepoint (hr) Value: 1
  misc_feature: MA Experiment 108572 PARAMETER Experiment Name: At_Drought_cDNA_P Parameter: Tissue Value: Aerial
  misc_feature: MA Experiment 108572 PARAMETER Experiment Name: At_Drought_cDNA_P Parameter: Treatment Value: Drought vs. No Drought
  misc_feature: MA Experiment ID: 108573 Result: Up-regulated in Transcription
  misc_feature: MA Experiment 108573 PARAMETER Experiment Name: At_Drought_cDNA_P Parameter: Timepoint (hr) Value: 6
  misc_feature: MA Experiment 108573 PARAMETER Experiment Name: At_Drought_cDNA_P Parameter: Tissue Value: Aerial
  misc_feature: MA Experiment 108573 PARAMETER Experiment Name: At_Drought_cDNA_P Parameter: Treatment Value: Drought vs. No Drought
  misc_feature: MA Experiment ID: 108577 Result: Down-regulated in Transcription
  misc_feature: MA Experiment 108577 PARAMETER Experiment Name: At_42deg_Heat_cDNA_P Parameter: Temperature (deg C) Value: 42 vs. 22
  misc_feature: MA Experiment 108577 PARAMETER Experiment Name: At_42deg_Heat_cDNA_P Parameter: Timepoint (hr) Value: 6
  misc_feature: MA Experiment 108577 PARAMETER Experiment Name: At_42deg_Heat_cDNA_P Parameter: Tissue Value: Aerial
  misc_feature: MA Experiment ID: 20000171 Result: Down-regulated in Transcription
  misc_feature: MA Experiment 20000171 PARAMETER Experiment Name: At_42deg_Heat_P Parameter: Age (day) Value: 14
  misc_feature: MA Experiment 20000171 PARAMETER Experiment Name: At_42deg_Heat_P Parameter: Organism Value: A. thaliana
  misc_feature: MA Experiment 20000171 PARAMETER Experiment Name: At_42deg_Heat_P Parameter: Plant Line Value: WS
  misc_feature: MA Experiment 20000171 PARAMETER Experiment Name: At_42deg_Heat_P Parameter: Temperature (deg C) Value: 42 vs. 22
  misc_feature: MA Experiment 20000171 PARAMETER Experiment Name: At_42deg_Heat_P Parameter: Timepoint (hr) Value: 1
  misc_feature: MA Experiment 20000171 PARAMETER Experiment Name: At_42deg_Heat_P Parameter: Tissue Value: Aerial
  misc_feature: MA Experiment ID: 20000173 Result: Down-regulated in Transcription
  misc_feature: MA Experiment 20000173 PARAMETER Experiment Name: At_42deg_Heat_P Parameter: Age (day) Value: 14
  misc_feature: MA Experiment 20000173 PARAMETER Experiment Name: At_42deg_Heat_P Parameter: Organism Value: A. thaliana
  misc_feature: MA Experiment 20000173 PARAMETER Experiment Name: At_42deg_Heat_P Parameter: Plant Line Value: WS
  misc_feature: MA Experiment 20000173 PARAMETER Experiment Name: At_42deg_Heat_P Parameter: Temperature (deg C) Value: 42 vs. 22
  misc_feature: MA Experiment 20000173 PARAMETER Experiment Name: At_42deg_Heat_P Parameter: Timepoint (hr) Value: 6
  misc_feature: MA Experiment 20000173 PARAMETER Experiment Name: At_42deg_Heat_P Parameter: Tissue Value: Aerial
  misc_feature: MA Experiment ID: 20000184 Result: Down-regulated in Transcription
  misc_feature: MA Experiment 20000184 PARAMETER Experiment Name: At_Shoots__P Parameter: Age (day) Value: 7
  misc_feature: MA Experiment 20000184 PARAMETER Experiment Name: At_Shoots__P Parameter: Tissue Value: Shoots vs. Whole Plant
  misc_feature: MA Experiment ID: 20000794 Result: Up-regulated in Transcription
  misc_feature: MA Experiment 20000794 PARAMETER Experiment Name: At_Petals_P Parameter: Age (day) Value: 23-25 days
  misc_feature: MA Experiment 20000794 PARAMETER Experiment Name: At_Petals_P Parameter: Plant Line Value: WS
  misc_feature: MA Experiment 20000794 PARAMETER Experiment Name: At_Petals_P Parameter: Tissue Value: Petals vs. Whole plant
  misc_feature: MA Experiment ID: 20001560 Result: Down-regulated in Transcription
  misc_feature: MA Experiment 20001560 PARAMETER Experiment Name: At_Drought_Soil_Dry_P Parameter: Age (day) Value: 28
  misc_feature: MA Experiment 20001560 PARAMETER Experiment Name: At_Drought_Soil_Dry_P Parameter: Organism Value: A. thaliana
  misc_feature: MA Experiment 20001560 PARAMETER Experiment Name: At_Drought_Soil_Dry_P Parameter: Plant Line Value: WS
  misc_feature: MA Experiment 20001560 PARAMETER Experiment Name: At_Drought_Soil_Dry_P Parameter: Post Timepoint (hr) Value: None
  misc_feature: MA Experiment 20001560 PARAMETER Experiment Name: At_Drought_Soil_Dry_P Parameter: Post-Treatment Value: None
  misc_feature: MA Experiment 20001560 PARAMETER Experiment Name: At_Drought_Soil_Dry_P Parameter: Timepoint (day) Value: 14
  misc_feature: MA Experiment 20001560 PARAMETER Experiment Name: At_Drought_Soil_Dry_P Parameter: Treatment Value: Drought vs. No Drought
aatcaaacccaaaagcccaaaacccagaaaagaaaaatctctcttttgaaaattctccttttgcaaatcattcaagtgaagcagaatcatctccttcttcttcttctccagcttcatcaatctcttctaaactttttgcgtttacctgaaaaactgttttgatcggaagaatctgattgcttcgatgtcgctgtcgaatcagattcccgtttactctcgatgaccctctgcatcttcttccactttttttccccagttttctgataacttttctcagatgagaagttctacgttacttcttctcaagttcttcttcttcttcttcaatctgacttcgcttgagtatcaagttgatggagcatttgttggaacatatgggataaattatggaaggatagctgacaacataccatctccggagaaagtagttttacttctaaagcaagctaaaattcggaatgtgcgtatatacgatgtagatcacactgttcttgaagcttttagtggaactggtttagaccttgttgttggacttcctaatgggtttttaaaagagatgagttcaaatgctgatcatgctttcacttgggttaaagaaaatatccagtctttcttacccaagactcggattcgcggtatcgctataggtaacgaagttcttggaggcggtgattctgagctcgcgggagctttacttggtgctgctaaaaatgtgtacaatgcgttgaagaaaatgaatctggaggacactgtgcagatcactacggctcattcacaggctgtgttttctgattcctacccgccttcgtcttgtgtgtttaaagagaatgttgttcagttcatgaagccattgttggagttttttcagcagattgggtctcctttttgtttgaatgcttacccttttttggcgtacacttataatccgaaggagattgatatcaactatgctcttttcaagccaacggaagggatatatgacccgaaaaccgatttgcattacgataacatgcttgatgctcagattgatgctgcttacatggcgttgcaagatgctgggtttaagaagatggaggttatgatcactgaaactgggtgggcttctaaaggggattcagatgaacctgcagcaacaccagagaacgcaagaacgtataactataacctcaggaagaggcttgctaagaagaaagggacacctcttagaccaaaaacggtgcttaaagcctatatctttgcattgttcaatgaaaactcaaaaccgggcaagagttctgagacacactttggactttttaaacctgatggaaccatatcatatgacattggattcaacagtctaaagtctgattctcccaagtcactcatttcatcatcaaagtcagctcgttactatgtggcattggtcatctctgtctcggctttcctcttgatgatataaatgcggaaatggtgtgagctttgacgatcctcggatttggtcgtacattcgtagcactataatatatattactagggttgggacgctaacgaaatggtaggagcacaaatttactgcaattctcatatatgtagccaagagatatccagaaaagatatcaccagacactatcatatatacacatcttatgtaaaacaaatctaatacataaatttgggcc

SEQ ID NO: 38202 - protein, 387 aa, Arabidopsis thaliana
  peptide (1)..(387): Ceres Seq. ID no. 12326925
  misc_feature (33)..(352): Pfam Name: Glycosyl hydrolases family 17 Pfam Description: Glycosyl hydrolases family 17
  misc_feature (34)..(352): Homolog of NCBI NO: 25316443 NR Description: CDS protein F9L11.6 [imported] - Arabidopsis
  misc_feature (3)..(362): Homolog of NCBI NO: 419789 NR Description: hypothetical protein - potato
  misc_feature (31)..(359): Homolog of NCBI NO: 15209173 NR Description: putative elicitor inducible chitinase [Solanum
  misc_feature (21)..(387): Homolog of NCBI NO: 11994352 NR Description: beta-1,3-glucanase-like protein [Arabidopsis
  misc_feature (3)..(387): Homolog of NCBI NO: 15232696 NR Description: glycosyl hydrolase family 17; protein id:
  misc_feature (94)..(387): Homolog of NCBI NO: 26452328 NR Description: putative beta-1,3-glucanase [Arabidopsis
  misc_feature (94)..(387): Homolog of NCBI NO: 30683187 NR Description: glycosyl hydrolase family 17 [Arabidopsis
  misc_feature (28)..(368): Homolog of NCBI NO: 7447981 NR Description: probable beta-1,3-glucanase At2g26600
  misc_feature (1)..(387): Homolog of NCBI NO: 18401187 NR Description: glycosyl hydrolase family 17
  misc_feature (1)..(387): Homolog of NCBI NO: 21618052 NR Description: putative beta-1,3-glucanase [Arabidopsis thaliana]
MRSSTLLLLKFFFFFFNLTSLEYQVDGAFVGTYGINYGRIADNIPSPEKVVLLLKQAKIRNVRIYDVDHTVLEAFSGTGLDLVVGLPNGFLKEMSSNADHAFTWVKENIQSFLPKTRIRGIAIGNEVLGGGDSELAGALLGAAKNVYNALKKMNLEDTVQITTAHSQAVFSDSYPPSSCVFKENVVQFMKPLLEFFQQIGSPFCLNAYPFLAYTYNPKEIDINYALFKPTEGIYDPKTDLHYDNMLDAQIDAAYMALQDAGFKKMEVMITETGWASKGDSDEPAATPENARTYNYNLRKRLAKKKGTPLRPKTVLKAYIFALFNENSKPGKSSETHFGLFKPDGTISYDIGFNSLKSDSPKSLISSSKSARYYVALVISVSAFLLMI

SEQ ID NO: 38203 - protein, 294 aa, Arabidopsis thaliana
  peptide (1)..(294): Ceres Seq. ID no. 12326926
  misc_feature (1)..(259): Pfam Name: Glycosyl hydrolases family 17 Pfam Description: Glycosyl hydrolases family 17
  misc_feature (1)..(259): Homolog of NCBI NO: 25316443 NR Description: CDS protein F9L11.6 [imported] - Arabidopsis
  misc_feature (1)..(269): Homolog of NCBI NO: 419789 NR Description: hypothetical protein - potato
  misc_feature (1)..(266): Homolog of NCBI NO: 15209173 NR Description: putative elicitor inducible chitinase [Solanum
  misc_feature (1)..(294): Homolog of NCBI NO: 11994352 NR Description: beta-1,3-glucanase-like protein [Arabidopsis
  misc_feature (1)..(294): Homolog of NCBI NO: 15232696 NR Description: glycosyl hydrolase family 17; protein id:
  misc_feature (1)..(294): Homolog of NCBI NO: 26452328 NR Description: putative beta-1,3-glucanase [Arabidopsis
  misc_feature (1)..(294): Homolog of NCBI NO: 30683187 NR Description: glycosyl hydrolase family 17 [Arabidopsis
  misc_feature (1)..(275): Homolog of NCBI NO: 7447981 NR Description: probable beta-1,3-glucanase At2g26600
  misc_feature (1)..(294): Homolog of NCBI NO: 18401187 NR Description: glycosyl hydrolase family 17
  misc_feature (1)..(294): Homolog of NCBI NO: 21618052 NR Description: putative beta-1,3-glucanase [Arabidopsis thaliana]
MSSNADHAFTWVKENIQSFLPKTRIRGIAIGNEVLGGGDSELAGALLGAAKNVYNALKKMNLEDTVQITTAHSQAVFSDSYPPSSCVFKENVVQFMKPLLEFFQQIGSPFCLNAYPFLAYTYNPKEIDINYALFKPTEGIYDPKTDLHYDNMLDAQIDAAYMALQDAGFKKMEVMITETGWASKGDSDEPAATPENARTYNYNLRKRLAKKKGTPLRPKTVLKAYIFALFNENSKPGKSSETHFGLFKPDGTISYDIGFNSLKSDSPKSLISSSKSARYYVALVISVSAFLLMI

SEQ ID NO: 38204 - protein, 235 aa, Arabidopsis thaliana
  peptide (1)..(235): Ceres Seq. ID no. 12326927
  misc_feature (1)..(200): Pfam Name: Glycosyl hydrolases family 17 Pfam Description: Glycosyl hydrolases family 17
  misc_feature (1)..(200): Homolog of NCBI NO: 25316443 NR Description: CDS protein F9L11.6 [imported] - Arabidopsis
  misc_feature (1)..(210): Homolog of NCBI NO: 419789 NR Description: hypothetical protein - potato
  misc_feature (1)..(207): Homolog of NCBI NO: 15209173 NR Description: putative elicitor inducible chitinase [Solanum
  misc_feature (1)..(235): Homolog of NCBI NO: 11994352 NR Description: beta-1,3-glucanase-like protein [Arabidopsis
  misc_feature (1)..(235): Homolog of NCBI NO: 15232696 NR Description: glycosyl hydrolase family 17; protein id:
  misc_feature (1)..(235): Homolog of NCBI NO: 26452328 NR Description: putative beta-1,3-glucanase [Arabidopsis
  misc_feature (1)..(235): Homolog of NCBI NO: 30683187 NR Description: glycosyl hydrolase family 17 [Arabidopsis
  misc_feature (1)..(216): Homolog of NCBI NO: 7447981 NR Description: probable beta-1,3-glucanase At2g26600
  misc_feature (1)..(235): Homolog of NCBI NO: 18401187 NR Description: glycosyl hydrolase family 17
  misc_feature (1)..(235): Homolog of NCBI NO: 21618052 NR Description: putative beta-1,3-glucanase [Arabidopsis thaliana]
MNLEDTVQITTAHSQAVFSDSYPPSSCVFKENVVQFMKPLLEFFQQIGSPFCLNAYPFLAYTYNPKEIDINYALFKPTEGIYDPKTDLHYDNMLDAQIDAAYMALQDAGFKKMEVMITETGWASKGDSDEPAATPENARTYNYNLRKRLAKKKGTPLRPKTVLKAYIFALFNENSKPGKSSETHFGLFKPDGTISYDIGFNSLKSDSPKSLISSSKSARYYVALVISVSAFLLMI

SEQ ID NO: 38205 - DNA, 909 bp, Arabidopsis thaliana
  misc_feature (1)..(909): Ceres Seq. ID no. 12578703
  misc_feature: MA Experiment ID: 108461 Result: Down-regulated in Transcription
  misc_feature: MA Experiment 108461 PARAMETER Experiment Name: At_Germinating_Seeds_cDNA_P Parameter: Age (day) Value: 1 vs. 0
  misc_feature: MA Experiment 108461 PARAMETER Experiment Name: At_Germinating_Seeds_cDNA_P Parameter: Tissue Value: Germinating Seeds
  misc_feature: MA Experiment ID: 108462 Result: Down-regulated in Transcription
  misc_feature: MA Experiment 108462 PARAMETER Experiment Name: At_Germinating_Seeds_cDNA_P Parameter: Age (day) Value: 2 vs. 0
  misc_feature: MA Experiment 108462 PARAMETER Experiment Name: At_Germinating_Seeds_cDNA_P Parameter: Tissue Value: Germinating Seeds
  misc_feature: MA Experiment ID: 108464 Result: Down-regulated in Transcription
  misc_feature: MA Experiment 108464 PARAMETER Experiment Name: At_Germinating_Seeds_cDNA_P Parameter: Age (day) Value: 4 vs. 0
  misc_feature: MA Experiment 108464 PARAMETER Experiment Name: At_Germinating_Seeds_cDNA_P Parameter: Tissue Value: Germinating Seeds
  misc_feature: MA Experiment ID: 108473 Result: Up-regulated in Transcription
  misc_feature: MA Experiment 108473 PARAMETER Experiment Name: At_Drought_Flowers_cDNA_P Parameter: Timepoint (hr) Value: 7 d
  misc_feature: MA Experiment 108473 PARAMETER Experiment Name: At_Drought_Flowers_cDNA_P Parameter: Tissue Value: Flower
  misc_feature: MA Experiment 108473 PARAMETER Experiment Name: At_Drought_Flowers_cDNA_P Parameter: Treatment Value: Drought vs. No Drought
  misc_feature: MA Experiment ID: 108488 Result: Down-regulated in Transcription
  misc_feature: MA Experiment ID: 108561 Result: Up-regulated in Transcription
  misc_feature: MA Experiment 108561 PARAMETER Experiment Name: At_100uM_ABA_cDNA_P Parameter: Timepoint (hr) Value: 6
  misc_feature: MA Experiment 108561 PARAMETER Experiment Name: At_100uM_ABA_cDNA_P Parameter: Tissue Value: Aerial
  misc_feature: MA Experiment 108561 PARAMETER Experiment Name: At_100uM_ABA_cDNA_P Parameter: Treatment Value: 100uM ABA vs. No Treatment
  misc_feature: MA Experiment ID: 108573 Result: Up-regulated in Transcription
  misc_feature: MA Experiment 108573 PARAMETER Experiment Name: At_Drought_cDNA_P Parameter: Timepoint (hr) Value: 6
  misc_feature: MA Experiment 108573 PARAMETER Experiment Name: At_Drought_cDNA_P Parameter: Tissue Value: Aerial
  misc_feature: MA Experiment 108573 PARAMETER Experiment Name: At_Drought_cDNA_P Parameter: Treatment Value: Drought vs. No Drought
  misc_feature: MA Experiment ID: 108574 Result: Up-regulated in Transcription
  misc_feature: MA Experiment 108574 PARAMETER Experiment Name: At_Wounding__cDNA_P Parameter: Timepoint (hr) Value: 1
  misc_feature: MA Experiment 108574 PARAMETER Experiment Name: At_Wounding__cDNA_P Parameter: Tissue Value: Aerial
  misc_feature: MA Experiment 108574 PARAMETER Experiment Name: At_Wounding__cDNA_P Parameter: Treatment Value: Wounding vs. No Wounding
  misc_feature: MA Experiment ID: 108595 Result: Up-regulated in Transcription
  misc_feature: MA Experiment 108595 PARAMETER Experiment Name: At_Ler-pi_Ovule_cDNA_P Parameter: Plant Line Value: null
  misc_feature: MA Experiment ID: 108605 Result: Up-regulated in Transcription
  misc_feature: MA Experiment 108605 PARAMETER Experiment Name: At_100uM_ABA_cDNA_P Parameter: Timepoint (hr) Value: 6
  misc_feature: MA Experiment 108605 PARAMETER Experiment Name: At_100uM_ABA_cDNA_P Parameter: Tissue Value: Aerial
  misc_feature: MA Experiment 108605 PARAMETER Experiment Name: At_100uM_ABA_cDNA_P Parameter: Treatment Value: 100uM ABA vs. No Treatment
  misc_feature: MA Experiment ID: 20000030 Result: Down-regulated in Transcription
  misc_feature: MA Experiment 20000030 PARAMETER Experiment Name: At_CS6630_Roots_cDNA_P Parameter: Plant Line Value: CS6630 vs. WS
  misc_feature: MA Experiment 20000030 PARAMETER Experiment Name: At_CS6630_Roots_cDNA_P Parameter: Tissue Value: Roots
  misc_feature: MA Experiment ID: 20000069 Result: Up-regulated in Transcription
  misc_feature: MA Experiment 20000069 PARAMETER Experiment Name: At_100uM_ABA_Mutants_cDNA_P Parameter: Plant Line Value: CS23
  misc_feature: MA Experiment 20000069 PARAMETER Experiment Name: At_100uM_ABA_Mutants_cDNA_P Parameter: Timepoint (hr) Value: 6
  misc_feature: MA Experiment 20000069 PARAMETER Experiment Name: At_100uM_ABA_Mutants_cDNA_P Parameter: Tissue Value: Aerial
  misc_feature: MA Experiment 20000069 PARAMETER Experiment Name: At_100uM_ABA_Mutants_cDNA_P Parameter: Treatment Value: 100uM ABA vs. No Treatment
  misc_feature: MA Experiment ID: 20000070 Result: Up-regulated in Transcription
  misc_feature: MA Experiment 20000070 PARAMETER Experiment Name: At_100uM_ABA_Mutants_cDNA_P Parameter: Plant Line Value: CS24
  misc_feature: MA Experiment 20000070 PARAMETER Experiment Name: At_100uM_ABA_Mutants_cDNA_P Parameter: Timepoint (hr) Value: 6
  misc_feature: MA Experiment 20000070 PARAMETER Experiment Name: At_100uM_ABA_Mutants_cDNA_P Parameter: Tissue Value: Aerial
  misc_feature: MA Experiment 20000070 PARAMETER Experiment Name: At_100uM_ABA_Mutants_cDNA_P Parameter: Treatment Value: 100uM ABA vs. No Treatment
  misc_feature: MA Experiment ID: 20000071 Result: Up-regulated in Transcription
  misc_feature: MA Experiment 20000071 PARAMETER Experiment Name: At_100uM_ABA_Mutants_cDNA_P Parameter: Plant Line Value: CS8104
  misc_feature: MA Experiment 20000071 PARAMETER Experiment Name: At_100uM_ABA_Mutants_cDNA_P Parameter: Timepoint (hr) Value: 6
  misc_feature: MA Experiment 20000071 PARAMETER Experiment Name: At_100uM_ABA_Mutants_cDNA_P Parameter: Tissue Value: Aerial
  misc_feature: MA Experiment 20000071 PARAMETER Experiment Name: At_100uM_ABA_Mutants_cDNA_P Parameter: Treatment Value: 100uM ABA vs. No Treatment
  misc_feature: MA Experiment ID: 20000072 Result: Up-regulated in Transcription
  misc_feature: MA Experiment 20000072 PARAMETER Experiment Name: At_100uM_ABA_Mutants_cDNA_P Parameter: Plant Line Value: CS8105
  misc_feature: MA Experiment 20000072 PARAMETER Experiment Name: At_100uM_ABA_Mutants_cDNA_P Parameter: Timepoint (hr) Value: 6
  misc_feature: MA Experiment 20000072 PARAMETER Experiment Name: At_100uM_ABA_Mutants_cDNA_P Parameter: Tissue Value: Aerial
  misc_feature: MA Experiment 20000072 PARAMETER Experiment Name: At_100uM_ABA_Mutants_cDNA_P Parameter: Treatment Value: 100uM ABA vs. No Treatment
  misc_feature: MA Experiment ID: 20000086 Result: Up-regulated in Transcription
  misc_feature: MA Experiment 20000086 PARAMETER Experiment Name: At_100uM_ABA_Mutants_cDNA_P Parameter: Plant Line Value: CS22
  misc_feature: MA Experiment 20000086 PARAMETER Experiment Name: At_100uM_ABA_Mutants_cDNA_P Parameter: Timepoint (hr) Value: 6
  misc_feature: MA Experiment 20000086 PARAMETER Experiment Name: At_100uM_ABA_Mutants_cDNA_P Parameter: Tissue Value: Aerial
  misc_feature: MA Experiment 20000086 PARAMETER Experiment Name: At_100uM_ABA_Mutants_cDNA_P Parameter: Treatment Value: 100uM ABA vs. No Treatment
  misc_feature: MA Experiment ID: 20000088 Result: Up-regulated in Transcription
  misc_feature: MA Experiment 20000088 PARAMETER Experiment Name: At_100uM_ABA_Mutants_cDNA_P Parameter: Plant Line Value: Landsberg
  misc_feature: MA Experiment 20000088 PARAMETER Experiment Name: At_100uM_ABA_Mutants_cDNA_P Parameter: Timepoint (hr) Value: 6
  misc_feature: MA Experiment 20000088 PARAMETER Experiment Name: At_100uM_ABA_Mutants_cDNA_P Parameter: Tissue Value: Aerial
  misc_feature: MA Experiment 20000088 PARAMETER Experiment Name: At_100uM_ABA_Mutants_cDNA_P Parameter: Treatment Value: 100uM ABA vs. No Treatment
  misc_feature: MA Experiment ID: 20000117 Result: Up-regulated in Transcription
  misc_feature: MA Experiment 20000117 PARAMETER Experiment Name: At_100uM_ABA_Mutants_cDNA_P Parameter: Plant Line Value: Columbia
  misc_feature: MA Experiment 20000117 PARAMETER Experiment Name: At_100uM_ABA_Mutants_cDNA_P Parameter: Timepoint (hr) Value: 6
  misc_feature: MA Experiment 20000117 PARAMETER Experiment Name: At_100uM_ABA_Mutants_cDNA_P Parameter: Tissue Value: Aerial
  misc_feature: MA Experiment 20000117 PARAMETER Experiment Name: At_100uM_ABA_Mutants_cDNA_P Parameter: Treatment Value: 100uM ABA vs. No Treatment
  misc_feature: MA Experiment ID: 20000436 Result: Up-regulated in Transcription
  misc_feature: MA Experiment 20000436 PARAMETER Experiment Name: At_Drought_P Parameter: Age (day) Value: 7
  misc_feature: MA Experiment 20000436 PARAMETER Experiment Name: At_Drought_P Parameter: Organism Value: A. thaliana
  misc_feature: MA Experiment 20000436 PARAMETER Experiment Name: At_Drought_P Parameter: Plant Line Value: WS
  misc_feature: MA Experiment 20000436 PARAMETER Experiment Name: At_Drought_P Parameter: Timepoint (hr) Value: 12
  misc_feature: MA Experiment 20000436 PARAMETER Experiment Name: At_Drought_P Parameter: Tissue Value: Whole Plant
  misc_feature: MA Experiment 20000436 PARAMETER Experiment Name: At_Drought_P Parameter: Treatment Value: Drought vs. No Drought
  misc_feature: MA Experiment ID: 20000437 Result: Up-regulated in Transcription
  misc_feature: MA Experiment 20000437 PARAMETER Experiment Name: At_Drought_P Parameter: Age (day) Value: 8
  misc_feature: MA Experiment 20000437 PARAMETER Experiment Name: At_Drought_P Parameter: Organism Value: A. thaliana
  misc_feature: MA Experiment 20000437 PARAMETER Experiment Name: At_Drought_P Parameter: Plant Line Value: WS
  misc_feature: MA Experiment 20000437 PARAMETER Experiment Name: At_Drought_P Parameter: Timepoint (hr) Value: 24
  misc_feature: MA Experiment 20000437 PARAMETER Experiment Name: At_Drought_P Parameter: Tissue Value: Whole Plant
  misc_feature: MA Experiment 20000437 PARAMETER Experiment Name: At_Drought_P Parameter: Treatment Value: Drought vs. No Drought
  misc_feature: MA Experiment ID: 20000438 Result: Down-regulated in Transcription
  misc_feature: MA Experiment 20000438 PARAMETER Experiment Name: At_Shoots__P Parameter: Age (day) Value: 14
  misc_feature: MA Experiment 20000438 PARAMETER Experiment Name: At_Shoots__P Parameter: Tissue Value: Shoots vs. Whole Plant
  misc_feature: MA Experiment ID: 20000794 Result: Up-regulated in Transcription
  misc_feature: MA Experiment 20000794 PARAMETER Experiment Name: At_Petals_P Parameter: Age (day) Value: 23-25 days
  misc_feature: MA Experiment 20000794 PARAMETER Experiment Name: At_Petals_P Parameter: Plant Line Value: WS
  misc_feature: MA Experiment 20000794 PARAMETER Experiment Name: At_Petals_P Parameter: Tissue Value: Petals vs. Whole plant
  misc_feature: MA Experiment ID: 20001555 Result: Up-regulated in Transcription
  misc_feature: MA Experiment 20001555 PARAMETER Experiment Name: At_Drought_Soil_Dry_P Parameter: Age (day) Value: 24
  misc_feature: MA Experiment 20001555 PARAMETER Experiment Name: At_Drought_Soil_Dry_P Parameter: Organism Value: A. thaliana
  misc_feature: MA Experiment 20001555 PARAMETER Experiment Name: At_Drought_Soil_Dry_P Parameter: Plant Line Value: WS
  misc_feature: MA Experiment 20001555 PARAMETER Experiment Name: At_Drought_Soil_Dry_P Parameter: Post Timepoint (hr) Value: None
  misc_feature: MA Experiment 20001555 PARAMETER Experiment Name: At_Drought_Soil_Dry_P Parameter: Post-Treatment Value: None
  misc_feature: MA Experiment 20001555 PARAMETER Experiment Name: At_Drought_Soil_Dry_P Parameter: Timepoint (day) Value: 10
  misc_feature: MA Experiment 20001555 PARAMETER Experiment Name: At_Drought_Soil_Dry_P Parameter: Treatment Value: Drought vs. No Drought
  misc_feature: MA Experiment ID: 20001556 Result: Up-regulated in Transcription
  misc_feature: MA Experiment 20001556 PARAMETER Experiment Name: At_Drought_Soil_Dry_P Parameter: Age (day) Value: 26
  misc_feature: MA Experiment 20001556 PARAMETER Experiment Name: At_Drought_Soil_Dry_P Parameter: Organism Value: A. thaliana
  misc_feature: MA Experiment 20001556 PARAMETER Experiment Name: At_Drought_Soil_Dry_P Parameter: Plant Line Value: WS
  misc_feature: MA Experiment 20001556 PARAMETER Experiment Name: At_Drought_Soil_Dry_P Parameter: Post Timepoint (hr) Value: None
  misc_feature: MA Experiment 20001556 PARAMETER Experiment Name: At_Drought_Soil_Dry_P Parameter: Post-Treatment Value: None
  misc_feature: MA Experiment 20001556 PARAMETER Experiment Name: At_Drought_Soil_Dry_P Parameter: Timepoint (day) Value: 12
  misc_feature: MA Experiment 20001556 PARAMETER Experiment Name: At_Drought_Soil_Dry_P Parameter: Treatment Value: Drought vs. No Drought
  misc_feature: MA Experiment ID: 20001559 Result: Up-regulated in Transcription
  misc_feature: MA Experiment 20001559 PARAMETER Experiment Name: At_Drought_Soil_Dry_P Parameter: Age (day) Value: 28
  misc_feature: MA Experiment 20001559 PARAMETER Experiment Name: At_Drought_Soil_Dry_P Parameter: Organism Value: A. thaliana
  misc_feature: MA Experiment 20001559 PARAMETER Experiment Name: At_Drought_Soil_Dry_P Parameter: Plant Line Value: WS
  misc_feature: MA Experiment 20001559 PARAMETER Experiment Name: At_Drought_Soil_Dry_P Parameter: Post Timepoint (hr) Value: 29
  misc_feature: MA Experiment 20001559 PARAMETER Experiment Name: At_Drought_Soil_Dry_P Parameter: Post-Treatment Value: Re-Water vs. No Drought
  misc_feature: MA Experiment 20001559 PARAMETER Experiment Name: At_Drought_Soil_Dry_P Parameter: Timepoint (day) Value: 14
  misc_feature: MA Experiment 20001559 PARAMETER Experiment Name: At_Drought_Soil_Dry_P Parameter: Treatment Value: Drought vs. No Drought
  misc_feature: MA Experiment ID: 20001904 Result: Up-regulated in Transcription
  misc_feature: MA Experiment 20001904 PARAMETER Experiment Name: At_Drought_Reproduction_P Parameter: Age (day) Value: 37
  misc_feature: MA Experiment 20001904 PARAMETER Experiment Name: At_Drought_Reproduction_P Parameter: Organism Value: A. thaliana
  misc_feature: MA Experiment 20001904 PARAMETER Experiment Name: At_Drought_Reproduction_P Parameter: Plant Line Value: WS
  misc_feature: MA Experiment 20001904 PARAMETER Experiment Name: At_Drought_Reproduction_P Parameter: Timepoint (day) Value: 7
  misc_feature: MA Experiment 20001904 PARAMETER Experiment Name: At_Drought_Reproduction_P Parameter: Tissue Value: Rosettes
  misc_feature: MA Experiment 20001904 PARAMETER Experiment Name: At_Drought_Reproduction_P Parameter: Treatment Value: Drought vs. No Drought
  misc_feature: MA Experiment ID: 20001905 Result: Up-regulated in Transcription
  misc_feature: MA Experiment 20001905 PARAMETER Experiment Name: At_Drought_Reproduction_P Parameter: Age (day) Value: 40
  misc_feature: MA Experiment 20001905 PARAMETER Experiment Name: At_Drought_Reproduction_P Parameter: Organism Value: A. thaliana
  misc_feature: MA Experiment 20001905 PARAMETER Experiment Name: At_Drought_Reproduction_P Parameter: Plant Line Value: WS
  misc_feature: MA Experiment 20001905 PARAMETER Experiment Name: At_Drought_Reproduction_P Parameter: Timepoint (day) Value: 10
  misc_feature: MA Experiment 20001905 PARAMETER Experiment Name: At_Drought_Reproduction_P Parameter: Tissue Value: Rosettes
  misc_feature: MA Experiment 20001905 PARAMETER Experiment Name: At_Drought_Reproduction_P Parameter: Treatment Value: Drought vs. No Drought
  misc_feature: MA Experiment ID: 20001906 Result: Up-regulated in Transcription
  misc_feature: MA Experiment 20001906 PARAMETER Experiment Name: At_Drought_Reproduction_P Parameter: Age (day) Value: 35
  misc_feature: MA Experiment 20001906 PARAMETER Experiment Name: At_Drought_Reproduction_P Parameter: Organism Value: A. thaliana
  misc_feature: MA Experiment 20001906 PARAMETER Experiment Name: At_Drought_Reproduction_P Parameter: Plant Line Value: WS
  misc_feature: MA Experiment 20001906 PARAMETER Experiment Name: At_Drought_Reproduction_P Parameter: Timepoint (day) Value: 5
  misc_feature: MA Experiment 20001906 PARAMETER Experiment Name: At_Drought_Reproduction_P Parameter: Tissue Value: Siliques
  misc_feature: MA Experiment 20001906 PARAMETER Experiment Name: At_Drought_Reproduction_P Parameter: Treatment Value: Drought vs. No Drought
  misc_feature: MA Experiment ID: 20001910 Result: Up-regulated in Transcription
  misc_feature: MA Experiment 20001910 PARAMETER Experiment Name: At_Drought_Reproduction_P Parameter: Age (day) Value: 37
  misc_feature: MA Experiment 20001910 PARAMETER Experiment Name: At_Drought_Reproduction_P Parameter: Organism Value: A. thaliana
  misc_feature: MA Experiment 20001910 PARAMETER Experiment Name: At_Drought_Reproduction_P Parameter: Plant Line Value: WS
  misc_feature: MA Experiment 20001910 PARAMETER Experiment Name: At_Drought_Reproduction_P Parameter: Timepoint (day) Value: 7
  misc_feature: MA Experiment 20001910 PARAMETER Experiment Name: At_Drought_Reproduction_P Parameter: Tissue Value: Flowers
  misc_feature: MA Experiment 20001910 PARAMETER Experiment Name: At_Drought_Reproduction_P Parameter: Treatment Value: Drought vs. No Drought
  misc_feature: MA Experiment ID: 20001911 Result: Up-regulated in Transcription
  misc_feature: MA Experiment 20001911 PARAMETER Experiment Name: At_Drought_Reproduction_P Parameter: Age (day) Value: 40
  misc_feature: MA Experiment 20001911 PARAMETER Experiment Name: At_Drought_Reproduction_P Parameter: Organism Value: A. thaliana
  misc_feature: MA Experiment 20001911 PARAMETER Experiment Name: At_Drought_Reproduction_P Parameter: Plant Line Value: WS
  misc_feature: MA Experiment 20001911 PARAMETER Experiment Name: At_Drought_Reproduction_P Parameter: Timepoint (day) Value: 10
  misc_feature: MA Experiment 20001911 PARAMETER Experiment Name: At_Drought_Reproduction_P Parameter: Tissue Value: Flowers
  misc_feature: MA Experiment 20001911 PARAMETER Experiment Name: At_Drought_Reproduction_P Parameter: Treatment Value: Drought vs. No Drought
aactttataacgctattctcaaacaagcaaagaaccttaaccaaaaagaaaacgtctacggagacatatggagaggaaacatcacttcgtgttagttcacaacgcttatcatggagcctggatctggtacaagctcaagcccctccttgaatcagccggccaccgcgttactgctgtcgaactcgccgcctccgggatcgacccacgaccaatccaggccgttgaaaccgtcgacgaatactccaaaccgttgatcgaaaccctcaaatctcttccagagaacgaagaggtaattctggttggattcagcttcggaggcatcaacatcgctctcgccgccgacatatttccggcgaagattaaggttcttgtgttcctcaacgccttcttgcccgacacaacccacgtgccttctcacgttctggacaagtatatggagatgcctggaggtttgggagattgtgagttttcatctcatgaaacaagaaatgggacgatgagtttattgaagatgggaccaaaattcatgaaggcacgtctttaccaaaattgtcccatagaggattacgagctggcaaaaatgttgcataggcaagggtcatttttcacagaggatctatcaaagaaagaaaagtttagcgaggaaggatatggttcggtgcaacgagtttacgtaatgagtagtgaagacaaagccatcccctgcgatttcattcgttggatgattgataatttcaacgtctcgaaagtctacgagatcgatggcggagatcacatggtgatgctctccaaaccccaaaaactctttgactctctctctgctattgccaccgattatatgtaataatcttaaagtctgttttacttttttctcatcgttactaataaaacaaacccctttttccgggc

SEQ ID NO: 38206 - protein, 258 aa, Arabidopsis thaliana; identical to SEQ ID NO: 34831
  peptide (1)..(258): Ceres Seq. ID no. 12578704
  misc_feature (32)..(252): Pfam Name: alpha/beta hydrolase fold Pfam Description: alpha/beta hydrolase fold
  misc_feature (2)..(254): Homolog of NCBI NO: 6651393 NR Description: polyneuridine aldehyde esterase [Rauvolfia
  misc_feature (2)..(257): Homolog of NCBI NO: 21554666 NR Description: putative acetone-cyanohydrin lyase [Arabidopsis
  misc_feature (2)..(257): Homolog of NCBI NO: 15227863 NR Description: putative acetone-cyanohydrin lyase
  misc_feature (7)..(257): Homolog of NCBI NO: 2780225 NR Description: alpha-hydroxynitrile lyase [Manihot esculenta]
  misc_feature (2)..(258): Homolog of NCBI NO: 27754457 NR Description: putative acetone-cyanohydrin lyase [Arabidopsis
  misc_feature (2)..(258): Homolog of NCBI NO: 15227867 NR Description: putative acetone-cyanohydrin lyase; protein id:
  misc_feature (1)..(257): Homolog of NCBI NO: 14279437 NR Description: ethylene-induced esterase [Citrus sinensis]
  misc_feature (1)..(258): Homolog of NCBI NO: 16648679 NR Description: AT5g10300/F18D22_70 [Arabidopsis thaliana]
  misc_feature (1)..(258): Homolog of NCBI NO: 15028131 NR Description: putative alpha-hydroxynitrile lyase [Arabidopsis
  misc_feature (1)..(258): Homolog of NCBI NO: 15238118 NR Description: alpha-hydroxynitrile lyase-like protein

SEQ ID NO: 38207 - protein, 136 aa, Arabidopsis thaliana; identical to SEQ ID NO: 34832
  peptide (1)..(136): Ceres Seq. ID no. 12578705
  misc_feature (1)..(130): Pfam Name: alpha/beta hydrolase fold Pfam Description: alpha/beta hydrolase fold
  misc_feature (1)..(132): Homolog of NCBI NO: 6651393 NR Description: polyneuridine aldehyde esterase [Rauvolfia
  misc_feature (1)..(135): Homolog of NCBI NO: 21554666 NR Description: putative acetone-cyanohydrin lyase [Arabidopsis
  misc_feature (1)..(135): Homolog of NCBI NO: 15227863 NR Description: putative acetone-cyanohydrin lyase
  misc_feature (1)..(135): Homolog of NCBI NO: 2780225 NR Description: alpha-hydroxynitrile lyase [Manihot esculenta]
  misc_feature (1)..(136): Homolog of NCBI NO: 27754457 NR Description: putative acetone-cyanohydrin lyase [Arabidopsis
  misc_feature (1)..(136): Homolog of NCBI NO: 15227867 NR Description: putative acetone-cyanohydrin lyase; protein id:
  misc_feature (1)..(135): Homolog of NCBI NO: 14279437 NR Description: ethylene-induced esterase [Citrus sinensis]
  misc_feature (1)..(136): Homolog of NCBI NO: 16648679 NR Description: AT5g10300/F18D22_70 [Arabidopsis thaliana]
  misc_feature (1)..(136): Homolog of NCBI NO: 15028131 NR Description: putative alpha-hydroxynitrile lyase [Arabidopsis
  misc_feature (1)..(136): Homolog of NCBI NO: 15238118 NR Description: alpha-hydroxynitrile lyase-like protein

SEQ ID NO: 38208 - protein, 134 aa, Arabidopsis thaliana; identical to SEQ ID NO: 34833
  peptide (1)..(134): Ceres Seq. ID no. 12578706
  misc_feature (1)..(128): Pfam Name: alpha/beta hydrolase fold Pfam Description: alpha/beta hydrolase fold
  misc_feature (1)..(130): Homolog of NCBI NO: 6651393 NR Description: polyneuridine aldehyde esterase [Rauvolfia
  misc_feature (1)..(133): Homolog of NCBI NO: 21554666 NR Description: putative acetone-cyanohydrin lyase [Arabidopsis
  misc_feature (1)..(133): Homolog of NCBI NO: 15227863 NR Description: putative acetone-cyanohydrin lyase
  misc_feature (1)..(133): Homolog of NCBI NO: 2780225 NR Description: alpha-hydroxynitrile lyase [Manihot esculenta]
  misc_feature (1)..(134): Homolog of NCBI NO: 27754457 NR Description: putative acetone-cyanohydrin lyase [Arabidopsis
  misc_feature (1)..(134): Homolog of NCBI NO: 15227867 NR Description: putative acetone-cyanohydrin lyase; protein id:
  misc_feature (1)..(133): Homolog of NCBI NO: 14279437 NR Description: ethylene-induced esterase [Citrus sinensis]
  misc_feature (1)..(134): Homolog of NCBI NO: 16648679 NR Description: AT5g10300/F18D22_70 [Arabidopsis thaliana]
  misc_feature (1)..(134): Homolog of NCBI NO: 15028131 NR Description: putative alpha-hydroxynitrile lyase [Arabidopsis
  misc_feature (1)..(134): Homolog of NCBI NO: 15238118 NR Description: alpha-hydroxynitrile lyase-like protein

SEQ ID NO: 38209 - DNA, 815 bp, Arabidopsis thaliana
  misc_feature (1)..(815): Ceres Seq. ID no. 12396747
  misc_feature: MA Experiment ID: 108434 Result: Down-regulated in Transcription
  misc_feature: MA Experiment 108434 PARAMETER Experiment Name: At_Root_Tips_cDNA_P Parameter: Tissue Value: Root Tips
  misc_feature: MA Experiment ID: 108488 Result: Down-regulated in Transcription
  misc_feature: MA Experiment ID: 108594 Result: Down-regulated in Transcription
  misc_feature: MA Experiment 108594 PARAMETER Experiment Name: At_Ler-rhl_Root_cDNA_P Parameter: Plant Line Value: null
  misc_feature: MA Experiment ID: 20000171 Result: Down-regulated in Transcription
  misc_feature: MA Experiment 20000171 PARAMETER Experiment Name: At_42deg_Heat_P Parameter: Age (day) Value: 14
  misc_feature: MA Experiment 20000171 PARAMETER Experiment Name: At_42deg_Heat_P Parameter: Organism Value: A. thaliana
  misc_feature: MA Experiment 20000171 PARAMETER Experiment Name: At_42deg_Heat_P Parameter: Plant Line Value: WS
  misc_feature: MA Experiment 20000171 PARAMETER Experiment Name: At_42deg_Heat_P Parameter: Temperature (deg C) Value: 42 vs. 22
  misc_feature: MA Experiment 20000171 PARAMETER Experiment Name: At_42deg_Heat_P Parameter: Timepoint (hr) Value: 1
  misc_feature: MA Experiment 20000171 PARAMETER Experiment Name: At_42deg_Heat_P Parameter: Tissue Value: Aerial
  misc_feature: MA Experiment ID: 20000184 Result: Down-regulated in Transcription
  misc_feature: MA Experiment 20000184 PARAMETER Experiment Name: At_Shoots__P Parameter: Age (day) Value: 7
  misc_feature: MA Experiment 20000184 PARAMETER Experiment Name: At_Shoots__P Parameter: Tissue Value: Shoots vs. Whole Plant
  misc_feature: MA Experiment ID: 20001757 Result: Down-regulated in Transcription
  misc_feature: MA Experiment 20001757 PARAMETER Experiment Name: At_50mM_NH4NO3_L-to-H_P Parameter: Timepoint (hr) Value: 6
  misc_feature: MA Experiment 20001757 PARAMETER Experiment Name: At_50mM_NH4NO3_L-to-H_P Parameter: Tissue Value: Leaf
  misc_feature: MA Experiment 20001757 PARAMETER Experiment Name: At_50mM_NH4NO3_L-to-H_P Parameter: Treatment Value: 50mM NH4NO3 vs 100mM Mannitol
  misc_feature: MA Experiment ID: 20001905 Result: Up-regulated in Transcription
  misc_feature: MA Experiment 20001905 PARAMETER Experiment Name: At_Drought_Reproduction_P Parameter: Age (day) Value: 40
  misc_feature: MA Experiment 20001905 PARAMETER Experiment Name: At_Drought_Reproduction_P Parameter: Organism Value: A. thaliana
  misc_feature: MA Experiment 20001905 PARAMETER Experiment Name: At_Drought_Reproduction_P Parameter: Plant Line Value: WS
  misc_feature: MA Experiment 20001905 PARAMETER Experiment Name: At_Drought_Reproduction_P Parameter: Timepoint (day) Value: 10
  misc_feature: MA Experiment 20001905 PARAMETER Experiment Name: At_Drought_Reproduction_P Parameter: Tissue Value: Rosettes
  misc_feature: MA Experiment 20001905 PARAMETER Experiment Name: At_Drought_Reproduction_P Parameter: Treatment Value: Drought vs. No Drought
  misc_feature: Phenotype: ROSETTE LEAVES Shape-Oval
  misc_feature: Phenotype: INFLORESCENCE Flowering Time-Late Flowering
  misc_feature: Phenotype: ROSETTE LEAVES Disorganized Rosette-Disorganized Rosette
  misc_feature: Phenotype: ROSETTE LEAVES Other
  misc_feature: Phenotype: WHOLE PLANT Color-Dark Green
  misc_feature: Phenotype: WHOLE PLANT Size-Small
  misc_feature: Phenotype: WHOLE PLANT Other
  misc_feature: Phenotype: INFLORESCENCE Flowering Time-Late Flowering
  misc_feature: Phenotype: ROSETTE LEAVES Other
  misc_feature: Phenotype: WHOLE PLANT Size-Small
  misc_feature: Phenotype: INFLORESCENCE Flowering Time-Late Flowering
agaatcagccgacgtttcctcttcaccactttcctctgtttctctgtttcgctctctctacaaaatttctccatgaacatacttaacaagctaggtataggatcaagtagacaaaccaacatggatccttctccaatcgcacaagtaatcgacgacgaagctccggcgccgggaaaccagtttgctcaattcggcgccggttgtttctggagcgtggaattagcgtaccagagagttccaggagtgactcaaacagaggttggttattctcaagggatcactcacgatccttcttacaaagatgtttgttcaggtaccacgaatcatgccgagattgttcgtgttcaatatgatccaaaagagtgtagttaccagtcgctgcttgatttgttctggtctaagcatgatcccaccactttgaatcggcagggaaatgatgtgggaacccaataccgttcagggatatatttctacaacccggagcaagagaaactagcacgcgagtcactggagcggcaccagcaacaagttgacaggaaggttgtgacagagatcttaccggctaagaaattttatagagctgaggaacatcaccagcaatacttgtctaaatgagggaggtttggtcttaagcaatcaacggaaaaaggctgcaacgacccaatccgctgctacgggtaaaagccttgcttctaaccgaaagcagaggatgcttccacttatctatgatagattatagcaattatcgttgaaaaataaagaagccgaggctacttatgtaacttgttcttgttcataaaactttttaagtgttc

SEQ ID NO: 38210 - protein, 204 aa, Arabidopsis thaliana
  peptide (1)..(204): Ceres Seq. ID no. 12396748
  misc_feature (60)..(204): Pfam Name: Peptide methionine sulfoxide reductase Pfam Description: Peptide methionine sulfoxide reductase
  misc_feature (26)..(204): Homolog of NCBI NO: 15146324 NR Description: AT4g25130/F13M23_270 [Arabidopsis thaliana]
  misc_feature (26)..(204): Homolog of NCBI NO: 15234942 NR Description: protein-methionine-S-oxide reductase
  misc_feature (26)..(204): Homolog of NCBI NO: 21593143 NR Description: protein-methionine-S-oxide reductase [Arabidopsis
  misc_feature (25)..(204): Homolog of NCBI NO: 12230349 NR Description: Peptide methionine sulfoxide reductase
  misc_feature (17)..(204): Homolog of NCBI NO: 29469000 NR Description: peptide methionine sulfoxide reductase; cPMSR
  misc_feature (41)..(204): Homolog of NCBI NO: 26451744 NR Description: putative peptide methionine sulfoxide reductase
  misc_feature (25)..(204): Homolog of NCBI NO: 25308493 NR Description: protein-methionine-S-oxide reductase (EC 1.8.4.6)
  misc_feature (25)..(204): Homolog of NCBI NO: 15240796 NR Description: peptide methionine sulfoxide reductase (msr)
  misc_feature (25)..(204): Homolog of NCBI NO: 21592658 NR Description: peptide methionine sulfoxide reductase (msr)
  misc_feature (25)..(204): Homolog of NCBI NO: 18424492 NR Description: peptide methionine sulfoxide reductase - like
RISRRFLFTTFLCFSVSLSLQNFSMNILNKLGIGSSRQTNMDPSPIAQVIDDEAPAPGNQFAQFGAGCFWSVELAYQRVPGVTQTEVGYSQGITHDPSYKDVCSGTTNHAEIVRVQYDPKECSYQSLLDLFWSKHDPTTLNRQGNDVGTQYRSGIYFYNPEQEKLARESLERHQQQVDRKVVTEILPAKKFYRAEEHHQQYLSK

SEQ ID NO: 38211 - protein, 180 aa, Arabidopsis thaliana
  peptide (1)..(180): Ceres Seq. ID no. 12396749
  misc_feature (36)..(180): Pfam Name: Peptide methionine sulfoxide reductase Pfam Description: Peptide methionine sulfoxide reductase
  misc_feature (2)..(180): Homolog of NCBI NO: 15146324 NR Description: AT4g25130/F13M23_270 [Arabidopsis thaliana]
  misc_feature (2)..(180): Homolog of NCBI NO: 15234942 NR Description: protein-methionine-S-oxide reductase
  misc_feature (2)..(180): Homolog of NCBI NO: 21593143 NR Description: protein-methionine-S-oxide reductase [Arabidopsis
  misc_feature (1)..(180): Homolog of NCBI NO: 12230349 NR Description: Peptide methionine sulfoxide reductase
  misc_feature (1)..(180): Homolog of NCBI NO: 29469000 NR Description: peptide methionine sulfoxide reductase; cPMSR
  misc_feature (17)..(180): Homolog of NCBI NO: 26451744 NR Description: putative peptide methionine sulfoxide reductase
  misc_feature (1)..(180): Homolog of NCBI NO: 25308493 NR Description: protein-methionine-S-oxide reductase (EC 1.8.4.6)
  misc_feature (1)..(180): Homolog of NCBI NO: 15240796 NR Description: peptide methionine sulfoxide reductase (msr)
  misc_feature (1)..(180): Homolog of NCBI NO: 21592658 NR Description: peptide methionine sulfoxide reductase (msr)
  misc_feature (1)..(180): Homolog of NCBI NO: 18424492 NR Description: peptide methionine sulfoxide reductase - like
MNILNKLGIGSSRQTNMDPSPIAQVIDDEAPAPGNQFAQFGAGCFWSVELAYQRVPGVTQTEVGYSQGITHDPSYKDVCSGTTNHAEIVRVQYDPKECSYQSLLDLFWSKHDPTTLNRQGNDVGTQYRSGIYFYNPEQEKLARESLERHQQQVDRKVVTEILPAKKFYRAEEHHQQYLSK

SEQ ID NO: 38212 - protein, 164 aa, Arabidopsis thaliana
  peptide (1)..(164): Ceres Seq. ID no. 12396750
  misc_feature (20)..(164): Pfam Name: Peptide methionine sulfoxide reductase Pfam Description: Peptide methionine sulfoxide reductase
  misc_feature (1)..(164): Homolog of NCBI NO: 15146324 NR Description: AT4g25130/F13M23_270 [Arabidopsis thaliana]
  misc_feature (1)..(164): Homolog of NCBI NO: 15234942 NR Description: protein-methionine-S-oxide reductase
  misc_feature (1)..(164): Homolog of NCBI NO: 21593143 NR Description: protein-methionine-S-oxide reductase [Arabidopsis
  misc_feature (1)..(164): Homolog of NCBI NO: 12230349 NR Description: Peptide methionine sulfoxide reductase
  misc_feature (1)..(164): Homolog of NCBI NO: 29469000 NR Description: peptide methionine sulfoxide reductase; cPMSR
  misc_feature (1)..(164): Homolog of NCBI NO: 26451744 NR Description: putative peptide methionine sulfoxide reductase
  misc_feature (1)..(164): Homolog of NCBI NO: 25308493 NR Description: protein-methionine-S-oxide reductase (EC 1.8.4.6)
  misc_feature (1)..(164): Homolog of NCBI NO: 15240796 NR Description: peptide methionine sulfoxide reductase (msr)
  misc_feature (1)..(164): Homolog of NCBI NO: 21592658 NR Description: peptide methionine sulfoxide reductase (msr)
  misc_feature (1)..(164): Homolog of NCBI NO: 18424492 NR Description: peptide methionine sulfoxide reductase - like
MDPSPIAQVIDDEAPAPGNQFAQFGAGCFWSVELAYQRVPGVTQTEVGYSQGITHDPSYKDVCSGTTNHAEIVRVQYDPKECSYQSLLDLFWSKHDPTTLNRQGNDVGTQYRSGIYFYNPEQEKLARESLERHQQQVDRKVVTEILPAKKFYRAEEHHQQYLSK

SEQ ID NO: 38213 - DNA, 1843 bp, Arabidopsis thaliana; identical to SEQ ID NO: 23227
  misc_feature (1)..(1843): Ceres Seq. ID no. 13489341
  misc_feature: MA Experiment ID: 20000173 Result: Down-regulated in Transcription
  misc_feature: MA Experiment 20000173 PARAMETER Experiment Name: At_42deg_Heat_P Parameter: Age (day) Value: 14
  misc_feature: MA Experiment 20000173 PARAMETER Experiment Name: At_42deg_Heat_P Parameter: Organism Value: A. thaliana
  misc_feature: MA Experiment 20000173 PARAMETER Experiment Name: At_42deg_Heat_P Parameter: Plant Line Value: WS
  misc_feature: MA Experiment 20000173 PARAMETER Experiment Name: At_42deg_Heat_P Parameter: Temperature (deg C) Value: 42 vs. 22
  misc_feature: MA Experiment 20000173 PARAMETER Experiment Name: At_42deg_Heat_P Parameter: Timepoint (hr) Value: 6
  misc_feature: MA Experiment 20000173 PARAMETER Experiment Name: At_42deg_Heat_P Parameter: Tissue Value: Aerial
  misc_feature: MA Experiment ID: 20000227 Result: Down-regulated in Transcription
  misc_feature: MA Experiment 20000227 PARAMETER Experiment Name: At_Root-Tips-vs-Tops_P Parameter: Tissue Value: Root Tips vs. Root Tops
  misc_feature: MA Experiment ID: 20000234 Result: Down-regulated in Transcription
  misc_feature: MA Experiment 20000234 PARAMETER Experiment Name: At_Siliques_P Parameter: Age (day) Value: 21
  misc_feature: MA Experiment 20000234 PARAMETER Experiment Name: At_Siliques_P Parameter: Organism Value: A. thaliana
  misc_feature: MA Experiment 20000234 PARAMETER Experiment Name: At_Siliques_P Parameter: Plant Line Value: WS
  misc_feature: MA Experiment 20000234 PARAMETER Experiment Name: At_Siliques_P Parameter: Tissue Value: Less Than 5mm Siliques vs. Whole Plant
  misc_feature: MA Experiment ID: 20001451 Result: Down-regulated in Transcription
  misc_feature: MA Experiment 20001451 PARAMETER Experiment Name: At_Far-red-induction_P Parameter: Age (day) Value: 7
  misc_feature: MA Experiment 20001451 PARAMETER Experiment Name: At_Far-red-induction_P Parameter: Light Value: Far-red vs. White
  misc_feature: MA Experiment 20001451 PARAMETER Experiment Name: At_Far-red-induction_P Parameter: Organism Value: A. thaliana
  misc_feature: MA Experiment 20001451 PARAMETER Experiment Name: At_Far-red-induction_P Parameter: Plant Line Value: Columbia
  misc_feature: MA Experiment 20001451 PARAMETER Experiment Name: At_Far-red-induction_P Parameter: Timepoint (hr) Value: 24
  misc_feature: MA Experiment 20001451 PARAMETER Experiment Name: At_Far-red-induction_P Parameter: Tissue Value: Whole Plant
  misc_feature: MA Experiment ID: 20001557 Result: Up-regulated in Transcription
  misc_feature: MA Experiment 20001557 PARAMETER Experiment Name: At_Drought_Soil_Dry_P Parameter: Age (day) Value: 27
  misc_feature: MA Experiment 20001557 PARAMETER Experiment Name: At_Drought_Soil_Dry_P Parameter: Organism Value: A. thaliana
  misc_feature: MA Experiment 20001557 PARAMETER Experiment Name: At_Drought_Soil_Dry_P Parameter: Plant Line Value: WS
  misc_feature: MA Experiment 20001557 PARAMETER Experiment Name: At_Drought_Soil_Dry_P Parameter: Post Timepoint (hr) Value: 3
  misc_feature: MA Experiment 20001557 PARAMETER Experiment Name: At_Drought_Soil_Dry_P Parameter: Post-Treatment Value: Re-Water vs. No Drought
  misc_feature: MA Experiment 20001557 PARAMETER Experiment Name: At_Drought_Soil_Dry_P Parameter: Timepoint (day) Value: 13
  misc_feature: MA Experiment 20001557 PARAMETER Experiment Name: At_Drought_Soil_Dry_P Parameter: Treatment Value: Drought vs. No Drought
  misc_feature: MA Experiment ID: 20001911 Result: Down-regulated in Transcription
  misc_feature: MA Experiment 20001911 PARAMETER Experiment Name: At_Drought_Reproduction_P Parameter: Age (day) Value: 40
  misc_feature: MA Experiment 20001911 PARAMETER Experiment Name: At_Drought_Reproduction_P Parameter: Organism Value: A. thaliana
  misc_feature: MA Experiment 20001911 PARAMETER Experiment Name: At_Drought_Reproduction_P Parameter: Plant Line Value: WS
  misc_feature: MA Experiment 20001911 PARAMETER Experiment Name: At_Drought_Reproduction_P Parameter: Timepoint (day) Value: 10
  misc_feature: MA Experiment 20001911 PARAMETER Experiment Name: At_Drought_Reproduction_P Parameter: Tissue Value: Flowers
  misc_feature: MA Experiment 20001911 PARAMETER Experiment Name: At_Drought_Reproduction_P Parameter: Treatment Value: Drought vs. No Drought

SEQ ID NO: 38214 - protein, 421 aa, Arabidopsis thaliana; identical to SEQ ID NO: 23228
  peptide (1)..(421): Ceres Seq. ID no. 13489342
  misc_feature (31)..(416): Homolog of NCBI NO: 40743157 NR Description: hypothetical protein AN5166.2 [Aspergillus
  misc_feature (385)..(416): Homolog of NCBI NO: 37532798 NR Description: putative phosphatidate cytidylyltransferase
  misc_feature (277)..(367): Homolog of NCBI NO: 37532798 NR Description: putative phosphatidate cytidylyltransferase
  misc_feature (5)..(132): Homolog of NCBI NO: 37532798 NR Description: putative phosphatidate cytidylyltransferase
  misc_feature (9)..(420): Homolog of NCBI NO: 15236874 NR Description: phosphatidate cytidylyltransferase, putative
  misc_feature (5)..(416): Homolog of NCBI NO: 20303635 NR Description: putative CDP-diacylglycerol synthetase
  misc_feature (1)..(419): Homolog of NCBI NO: 3121837 NR Description: Phosphatidate cytidylyltransferase synthetase) (CDP-diglyceride pyrophosphorylase) synthase) (CDS) (CTP:phosphatidate cytidylyltransferase) (CDP-DAG
  misc_feature (1)..(420): Homolog of NCBI NO: 15235611 NR Description: phosphatidate cytidylyltransferase, putative
  misc_feature (1)..(421): Homolog of NCBI NO: 7484839 NR Description: CDP-diacylglycerol synthetase homolog F24O1.17 -
  misc_feature (1)..(421): Homolog of NCBI NO: 30696710 NR Description: phosphatidate cytidylyltransferase (CDS)
  misc_feature (31)..(416): Homolog of NCBI NO: 40743157 NR Description: hypothetical protein AN5166.2 [Aspergillus
  misc_feature (385)..(416): Homolog of NCBI NO: 37532798 NR Description: putative phosphatidate cytidylyltransferase
  misc_feature (277)..(367): Homolog of NCBI NO: 37532798 NR Description: putative phosphatidate cytidylyltransferase
  misc_feature (5)..(132): Homolog of NCBI NO: 37532798 NR Description: putative phosphatidate cytidylyltransferase
  misc_feature (9)..(420): Homolog of NCBI NO: 15236874 NR Description: phosphatidate cytidylyltransferase, putative
  misc_feature (5)..(416): Homolog of NCBI NO: 20303635 NR Description: putative CDP-diacylglycerol synthetase
  misc_feature (1)..(419): Homolog of NCBI NO: 3121837 NR Description: Phosphatidate cytidylyltransferase synthetase) (CDP-diglyceride pyrophosphorylase) synthase) (CDS) (CTP:phosphatidate cytidylyltransferase) (CDP-DAG
  misc_feature (1)..(420): Homolog of NCBI NO: 15235611 NR Description: phosphatidate cytidylyltransferase, putative
  misc_feature (1)..(421): Homolog of NCBI NO: 7484839 NR Description: CDP-diacylglycerol synthetase homolog F24O1.17 -
  misc_feature (1)..(421): Homolog of NCBI NO: 30696710 NR Description: phosphatidate cytidylyltransferase (CDS)

SEQ ID NO: 38215 - protein, 372 aa, Arabidopsis thaliana; identical to SEQ ID NO: 23229
  peptide (1)..(372): Ceres Seq. ID no. 13489343
  misc_feature (1)..(367): Homolog of NCBI NO: 40743157 NR Description: hypothetical protein AN5166.2 [Aspergillus
  misc_feature (336)..(367): Homolog of NCBI NO: 37532798 NR Description: putative phosphatidate cytidylyltransferase
  misc_feature (228)..(318): Homolog of NCBI NO: 37532798 NR Description: putative phosphatidate cytidylyltransferase
  misc_feature (1)..(83): Homolog of NCBI NO: 37532798 NR Description: putative phosphatidate cytidylyltransferase
  misc_feature (1)..(371): Homolog of NCBI NO: 15236874 NR Description: phosphatidate cytidylyltransferase, putative
  misc_feature (1)..(367): Homolog of NCBI NO: 20303635 NR Description: putative CDP-diacylglycerol synthetase
  misc_feature (1)..(370): Homolog of NCBI NO: 3121837 NR Description: Phosphatidate cytidylyltransferase synthetase) (CDP-diglyceride pyrophosphorylase) synthase) (CDS) (CTP:phosphatidate cytidylyltransferase) (CDP-DAG
  misc_feature (1)..(371): Homolog of NCBI NO: 15235611 NR Description: phosphatidate cytidylyltransferase, putative
  misc_feature (1)..(372): Homolog of NCBI NO: 7484839 NR Description: CDP-diacylglycerol synthetase homolog F24O1.17 -
  misc_feature (1)..(372): Homolog of NCBI NO: 30696710 NR Description: phosphatidate cytidylyltransferase (CDS)
  misc_feature (1)..(367): Homolog of NCBI NO: 40743157 NR Description: hypothetical protein AN5166.2 [Aspergillus
  misc_feature (336)..(367): Homolog of NCBI NO: 37532798 NR Description: putative phosphatidate cytidylyltransferase
  misc_feature (228)..(318): Homolog of NCBI NO: 37532798 NR Description: putative phosphatidate cytidylyltransferase
  misc_feature (1)..(83): Homolog of NCBI NO: 37532798 NR Description: putative phosphatidate cytidylyltransferase
  misc_feature (1)..(371): Homolog of NCBI NO: 15236874 NR Description: phosphatidate cytidylyltransferase, putative
  misc_feature (1)..(367): Homolog of NCBI NO: 20303635 NR Description: putative CDP-diacylglycerol synthetase
  misc_feature (1)..(370): Homolog of NCBI NO: 3121837 NR Description: Phosphatidate cytidylyltransferase synthetase) (CDP-diglyceride pyrophosphorylase) synthase) (CDS) (CTP:phosphatidate cytidylyltransferase) (CDP-DAG
  misc_feature (1)..(371): Homolog of NCBI NO: 15235611 NR Description: phosphatidate cytidylyltransferase, putative
  misc_feature (1)..(372): Homolog of NCBI NO: 7484839 NR Description: CDP-diacylglycerol synthetase homolog F24O1.17 -
  misc_feature (1)..(372): Homolog of NCBI NO: 30696710 NR Description: phosphatidate cytidylyltransferase (CDS)

SEQ ID NO: 38216 - protein, 363 aa, Arabidopsis thaliana; identical to SEQ ID NO: 23230
  peptide (1)..(363): Ceres Seq. ID no. 13489344
  misc_feature (1)..(358): Homolog of NCBI NO: 40743157 NR Description: hypothetical protein AN5166.2 [Aspergillus
  misc_feature (327)..(358): Homolog of NCBI NO: 37532798 NR Description: putative phosphatidate cytidylyltransferase
  misc_feature (219)..(309): Homolog of NCBI NO: 37532798 NR Description: putative phosphatidate cytidylyltransferase
  misc_feature (1)..(74): Homolog of NCBI NO: 37532798 NR Description: putative phosphatidate cytidylyltransferase
  misc_feature (1)..(362): Homolog of NCBI NO: 15236874 NR Description: phosphatidate cytidylyltransferase, putative
  misc_feature (1)..(358): Homolog of NCBI NO: 20303635 NR Description: putative CDP-diacylglycerol synthetase
  misc_feature (1)..(361): Homolog of NCBI NO: 3121837 NR Description: Phosphatidate cytidylyltransferase synthetase) (CDP-diglyceride pyrophosphorylase) synthase) (CDS) (CTP:phosphatidate cytidylyltransferase) (CDP-DAG
  misc_feature (1)..(362): Homolog of NCBI NO: 15235611 NR Description: phosphatidate cytidylyltransferase, putative
  misc_feature (1)..(363): Homolog of NCBI NO: 7484839 NR Description: CDP-diacylglycerol synthetase homolog F24O1.17 -
  misc_feature (1)..(363): Homolog of NCBI NO: 30696710 NR Description: phosphatidate cytidylyltransferase (CDS)
  misc_feature (1)..(358): Homolog of NCBI NO: 40743157 NR Description: hypothetical protein AN5166.2 [Aspergillus
  misc_feature (327)..(358): Homolog of NCBI NO: 37532798 NR Description: putative phosphatidate cytidylyltransferase
  misc_feature (219)..(309): Homolog of NCBI NO: 37532798 NR Description: putative phosphatidate cytidylyltransferase
  misc_feature (1)..(74): Homolog of NCBI NO: 37532798 NR Description: putative phosphatidate cytidylyltransferase
  misc_feature (1)..(362): Homolog of NCBI NO: 15236874 NR Description: phosphatidate cytidylyltransferase, putative
  misc_feature (1)..(358): Homolog of NCBI NO: 20303635 NR Description: putative CDP-diacylglycerol synthetase
  misc_feature (1)..(361): Homolog of NCBI NO: 3121837 NR Description: Phosphatidate cytidylyltransferase synthetase) (CDP-diglyceride pyrophosphorylase) synthase) (CDS) (CTP:phosphatidate cytidylyltransferase) (CDP-DAG
  misc_feature (1)..(362): Homolog of NCBI NO: 15235611 NR Description: phosphatidate cytidylyltransferase, putative
  misc_feature (1)..(363): Homolog of NCBI NO: 7484839 NR Description: CDP-diacylglycerol synthetase homolog F24O1.17 -
  misc_feature (1)..(363): Homolog of NCBI NO: 30696710 NR Description: phosphatidate cytidylyltransferase (CDS)

SEQ ID NO: 38217 - DNA, 1008 bp, Arabidopsis thaliana
  misc_feature (1)..(1008): Ceres Seq. ID no. 12602576
  misc_feature: MA Experiment ID: 20000794 Result: Down-regulated in Transcription
  misc_feature: MA Experiment 20000794 PARAMETER Experiment Name: At_Petals_P Parameter: Age (day) Value: 23-25 days
  misc_feature: MA Experiment 20000794 PARAMETER Experiment Name: At_Petals_P Parameter: Plant Line Value: WS
  misc_feature: MA Experiment 20000794 PARAMETER Experiment Name: At_Petals_P Parameter: Tissue Value: Petals vs. Whole plant
aaaacgtcaacgaaaaatatccgatcgccggcgttctggtctatcattgtttgctttccttgaagatcccgaaacccaaaaaatgtcacaaggatggttttcgatgggcgggagtagcaccgtagatcagcagcagcaatcgggttcgtctctgcttgcggattggaattcttacgcagcctctagagatttcgaggaaagcggcggaagcttcggctttgatatcgaatccgccgttagatctgccaatgacactgtttcgggcaccttcagtgtggtttcaaaaggagttagagatattccagggagcttgcagtcagcaacaagtagtatgccttcaggaaaagcgctcatgtatttcggtttacttctcgcaagtggtgttttcttcatcttcattgccttcacaatgtttcttccagtcatggtgcttatgccacagaaatttgccatttgtttcacccttggatgtggattcatcattggatccttcttcgcacttcgtggccctaaaaatcagctcgcacacatgtcttcgatggagaggcttccttcaaccctaggtttcattgctaccatggttggtaccatatacgtatcaatggttctccacagctacattctctcggtgctcttctcagtgttacaggttcttgcgctggtttactactgtatatcctacttccctggtggatcatcaggcatgaggttcctcagttctgctctcacctcatctgcgctaagagttttcgggagataagctttcgtagccaatctgggagagagaacaatacttgtcggtgtacaaagaaagatgtcgaagcgttttttggtatactctttaacatagatttgatgaaatccctcgaaaagataaatgatcgtgaaggaaatgtttagtgaagaacccaattgatgttcttttttttttagttgctggtgattcccgaaccaaaacgaaaaaatccattgtaccaagaaaatgtcaaaatgagtttcctaattccc

SEQ ID NO: 38218 - protein, 252 aa, Arabidopsis thaliana
  peptide (1)..(252): Ceres Seq. ID no. 12602577
  misc_feature (115)..(244): Homolog of NCBI NO: 39597537 NR Description: Hypothetical protein CBG03219 [Caenorhabditis
  misc_feature (105)..(244): Homolog of NCBI NO: 19115465 NR Description: putative membrane protein required for ER to
  misc_feature (115)..(238): Homolog of NCBI NO: 40746734 NR Description: hypothetical protein AN1297.2 [Aspergillus
  misc_feature (42)..(244): Homolog of NCBI NO: 17532001 NR Description: Mammalian syntaxin 5 like (25.7 kD)
  misc_feature (6)..(252): Homolog of NCBI NO: 23619167 NR Description: hypothetical protein, conserved [Plasmodium
  misc_feature (55)..(246): Homolog of NCBI NO: 6319366 NR Description: similar to mammalian syntaxin 5; Sft2p
  misc_feature (26)..(252): Homolog of NCBI NO: 15241114 NR Description: putative protein; protein id: At5g56020.1
  misc_feature (28)..(252): Homolog of NCBI NO: 18416771 NR Description: putative protein; protein id: At4g26550.1
  misc_feature (1)..(92): Homolog of NCBI NO: 7486785 NR Description: hypothetical protein M3E9.20 - Arabidopsis
  misc_feature (93)..(252): Homolog of NCBI NO: 7486785 NR Description: hypothetical protein M3E9.20 - Arabidopsis
KRQRKISDRRRSGLSLFAFLEDPETQKMSQGWFSMGGSSTVDQQQQSGSSLLADWNSYAASRDFEESGGSFGFDIESAVRSANDTVSGTFSVVSKGVRDIPGSLQSATSSMPSGKALMYFGLLLASGVFFIFIAFTMFLPVMVLMPQKFAICFTLGCGFIIGSFFALRGPKNQLAHMSSMERLPSTLGFIATMVGTIYVSMVLHSYILSVLFSVLQVLALVYYCISYFPGGSSGMRFLSSALTSSALRVFGR

SEQ ID NO: 38219 - protein, 225 aa, Arabidopsis thaliana
  peptide (1)..(225): Ceres Seq. ID no. 12602578
  misc_feature (88)..(217): Homolog of NCBI NO: 39597537 NR Description: Hypothetical protein CBG03219 [Caenorhabditis
  misc_feature (78)..(217): Homolog of NCBI NO: 19115465 NR Description: putative membrane protein required for ER to
  misc_feature (88)..(211): Homolog of NCBI NO: 40746734 NR Description: hypothetical protein AN1297.2 [Aspergillus
  misc_feature (15)..(217): Homolog of NCBI NO: 17532001 NR Description: Mammalian syntaxin 5 like (25.7 kD)
  misc_feature (1)..(225): Homolog of NCBI NO: 23619167 NR Description: hypothetical protein, conserved [Plasmodium
  misc_feature (28)..(219): Homolog of NCBI NO: 6319366 NR Description: similar to mammalian syntaxin 5; Sft2p
  misc_feature (1)..(225): Homolog of NCBI NO: 15241114 NR Description: putative protein; protein id: At5g56020.1
  misc_feature (1)..(225): Homolog of NCBI NO: 18416771 NR Description: putative protein; protein id: At4g26550.1
  misc_feature (1)..(65): Homolog of NCBI NO: 7486785 NR Description: hypothetical protein M3E9.20 - Arabidopsis
  misc_feature (66)..(225): Homolog of NCBI NO: 7486785 NR Description: hypothetical protein M3E9.20 - Arabidopsis
MSQGWFSMGGSSTVDQQQQSGSSLLADWNSYAASRDFEESGGSFGFDIESAVRSANDTVSGTFSVVSKGVRDIPGSLQSATSSMPSGKALMYFGLLLASGVFFIFIAFTMFLPVMVLMPQKFAICFTLGCGFIIGSFFALRGPKNQLAHMSSMERLPSTLGFIATMVGTIYVSMVLHSYILSVLFSVLQVLALVYYCISYFPGGSSGMRFLSSALTSSALRVFGR

SEQ ID NO: 38220 - protein, 218 aa, Arabidopsis thaliana
  peptide (1)..(218): Ceres Seq. ID no. 12602579
  misc_feature (81)..(210): Homolog of NCBI NO: 39597537 NR Description: Hypothetical protein CBG03219 [Caenorhabditis
  misc_feature (71)..(210): Homolog of NCBI NO: 19115465 NR Description: putative membrane protein required for ER to
  misc_feature (81)..(204): Homolog of NCBI NO: 40746734 NR Description: hypothetical protein AN1297.2 [Aspergillus
  misc_feature (8)..(210): Homolog of NCBI NO: 17532001 NR Description: Mammalian syntaxin 5 like (25.7 kD)
  misc_feature (1)..(218): Homolog of NCBI NO: 23619167 NR Description: hypothetical protein, conserved [Plasmodium
  misc_feature (21)..(212): Homolog of NCBI NO: 6319366 NR Description: similar to mammalian syntaxin 5; Sft2p
  misc_feature (1)..(218): Homolog of NCBI NO: 15241114 NR Description: putative protein; protein id: At5g56020.1
  misc_feature (1)..(218): Homolog of NCBI NO: 18416771 NR Description: putative protein; protein id: At4g26550.1
  misc_feature (1)..(58): Homolog of NCBI NO: 7486785 NR Description: hypothetical protein M3E9.20 - Arabidopsis
  misc_feature (59)..(218): Homolog of NCBI NO: 7486785 NR Description: hypothetical protein M3E9.20 - Arabidopsis
MGGSSTVDQQQQSGSSLLADWNSYAASRDFEESGGSFGFDIESAVRSANDTVSGTFSVVSKGVRDIPGSLQSATSSMPSGKALMYFGLLLASGVFFIFIAFTMFLPVMVLMPQKFAICFTLGCGFIIGSFFALRGPKNQLAHMSSMERLPSTLGFIATMVGTIYVSMVLHSYILSVLFSVLQVLALVYYCISYFPGGSSGMRFLSSALTSSALRVFGR

SEQ ID NO: 38221 - DNA, 2399 bp, Arabidopsis thaliana
  misc_feature (1)..(2399): Ceres Seq. ID no. 13488340
  misc_feature: MA Experiment ID: 108435 Result: Up-regulated in Transcription
  misc_feature: MA Experiment 108435 PARAMETER Experiment Name: At_stm_Mutants_cDNA_P Parameter: Plant Line Value: wt Landsburg vs stm
  misc_feature: MA Experiment 108435 PARAMETER Experiment Name: At_stm_Mutants_cDNA_P Parameter: Tissue Value: Shoot Apical Meristem Region
  misc_feature: MA Experiment ID: 108489 Result: Down-regulated in Transcription
  misc_feature: MA Experiment ID: 108501 Result: Down-regulated in Transcription
  misc_feature: MA Experiment 108501 PARAMETER Experiment Name: At_ap2_floral_buds_cDNA_P Parameter: Plant Line Value: ap2 (Ler.)
  misc_feature: MA Experiment 108501 PARAMETER Experiment Name: At_ap2_floral_buds_cDNA_P Parameter: Tissue Value: Closed Flower
  misc_feature: MA Experiment ID: 108561 Result: Down-regulated in Transcription
  misc_feature: MA Experiment 108561 PARAMETER Experiment Name: At_100uM_ABA_cDNA_P Parameter: Timepoint (hr) Value: 6
  misc_feature: MA Experiment 108561 PARAMETER Experiment Name: At_100uM_ABA_cDNA_P Parameter: Tissue Value: Aerial
  misc_feature: MA Experiment 108561 PARAMETER Experiment Name: At_100uM_ABA_cDNA_P Parameter: Treatment Value: 100uM ABA vs. No Treatment
  misc_feature: MA Experiment ID: 108573 Result: Down-regulated in Transcription
  misc_feature: MA Experiment 108573 PARAMETER Experiment Name: At_Drought_cDNA_P Parameter: Timepoint (hr) Value: 6
  misc_feature: MA Experiment 108573 PARAMETER Experiment Name: At_Drought_cDNA_P Parameter: Tissue Value: Aerial
  misc_feature: MA Experiment 108573 PARAMETER Experiment Name: At_Drought_cDNA_P Parameter: Treatment Value: Drought vs. No Drought
  misc_feature: MA Experiment ID: 108579 Result: Up-regulated in Transcription
  misc_feature: MA Experiment 108579 PARAMETER Experiment Name: At_4deg_Cold_cDNA_P Parameter: Temperature (deg C) Value: 4 vs. 22
  misc_feature: MA Experiment 108579 PARAMETER Experiment Name: At_4deg_Cold_cDNA_P Parameter: Timepoint (hr) Value: 6
  misc_feature: MA Experiment 108579 PARAMETER Experiment Name: At_4deg_Cold_cDNA_P Parameter: Tissue Value: Aerial
  misc_feature: MA Experiment ID: 108595 Result: Down-regulated in Transcription
  misc_feature: MA Experiment 108595 PARAMETER Experiment Name: At_Ler-pi_Ovule_cDNA_P Parameter: Plant Line Value: null
  misc_feature: MA Experiment ID: 108607 Result: Down-regulated in Transcription
  misc_feature: MA Experiment 108607 PARAMETER Experiment Name: At_100uM_ABA_cDNA_P Parameter: Timepoint (hr) Value: 4
  misc_feature: MA Experiment 108607 PARAMETER Experiment Name: At_100uM_ABA_cDNA_P Parameter: Tissue Value: Aerial
  misc_feature: MA Experiment 108607 PARAMETER Experiment Name: At_100uM_ABA_cDNA_P Parameter: Treatment Value: 100uM ABA vs. No Treatment
  misc_feature: MA Experiment ID: 108668 Result: Up-regulated in Transcription
  misc_feature: MA Experiment 108668 PARAMETER Experiment Name: At_2mM_SA_cDNA_P Parameter: Plant Line Value: WS
  misc_feature: MA Experiment 108668 PARAMETER Experiment Name: At_2mM_SA_cDNA_P Parameter: Timepoint (hr) Value: 6
  misc_feature: MA Experiment 108668 PARAMETER Experiment Name: At_2mM_SA_cDNA_P Parameter: Treatment Value: 2mM SA vs. No Treatment
  misc_feature: MA Experiment ID: 20000071 Result: Down-regulated in Transcription
  misc_feature: MA Experiment 20000071 PARAMETER Experiment Name: At_100uM_ABA_Mutants_cDNA_P Parameter: Plant Line Value: CS8104
  misc_feature: MA Experiment 20000071 PARAMETER Experiment Name: At_100uM_ABA_Mutants_cDNA_P Parameter: Timepoint (hr) Value: 6
  misc_feature: MA Experiment 20000071 PARAMETER Experiment Name: At_100uM_ABA_Mutants_cDNA_P Parameter: Tissue Value: Aerial
  misc_feature: MA Experiment 20000071 PARAMETER Experiment Name: At_100uM_ABA_Mutants_cDNA_P Parameter: Treatment Value: 100uM ABA vs. No Treatment
  misc_feature: MA Experiment ID: 20000090 Result: Up-regulated in Transcription
  misc_feature: MA Experiment ID: 20000111 Result: Down-regulated in Transcription
  misc_feature: MA Experiment 20000111 PARAMETER Experiment Name: At_42deg_Heat_cDNA_P Parameter: Temperature (deg C) Value: 42 vs. 22
  misc_feature: MA Experiment 20000111 PARAMETER Experiment Name: At_42deg_Heat_cDNA_P Parameter: Timepoint (hr) Value: 6
  misc_feature: MA Experiment 20000111 PARAMETER Experiment Name: At_42deg_Heat_cDNA_P Parameter: Tissue Value: Aerial
  misc_feature: MA Experiment ID: 20000112 Result: Down-regulated in Transcription
  misc_feature: MA Experiment 20000112 PARAMETER Experiment Name: At_42deg_Heat_cDNA_P Parameter: Temperature (deg C) Value: 42 vs. 22
  misc_feature: MA Experiment 20000112 PARAMETER Experiment Name: At_42deg_Heat_cDNA_P Parameter: Timepoint (hr) Value: 2
  misc_feature: MA Experiment 20000112 PARAMETER Experiment Name: At_42deg_Heat_cDNA_P Parameter: Tissue Value: Aerial
  misc_feature: MA Experiment ID: 20000113 Result: Down-regulated in Transcription
  misc_feature: MA Experiment 20000113 PARAMETER Experiment Name: At_42deg_Heat_cDNA_P Parameter: Temperature (deg C) Value: 42 vs. 22
  misc_feature: MA Experiment 20000113 PARAMETER Experiment Name: At_42deg_Heat_cDNA_P Parameter: Timepoint (hr) Value: 8
  misc_feature: MA Experiment 20000113 PARAMETER Experiment Name: At_42deg_Heat_cDNA_P Parameter: Tissue Value: Aerial
  misc_feature: MA Experiment ID: 20000144 Result: Down-regulated in Transcription
  misc_feature: MA Experiment 20000144 PARAMETER Experiment Name: At_42deg_Heat_cDNA_P Parameter: Temperature (deg C) Value: 42 vs. 22
  misc_feature: MA Experiment 20000144 PARAMETER Experiment Name: At_42deg_Heat_cDNA_P Parameter: Timepoint (hr) Value: 1
  misc_feature: MA Experiment 20000144 PARAMETER Experiment Name: At_42deg_Heat_cDNA_P Parameter: Tissue Value: Aerial
  misc_feature: MA Experiment ID: 20000173 Result: Down-regulated in Transcription
  misc_feature: MA Experiment 20000173 PARAMETER Experiment Name: At_42deg_Heat_P Parameter: Age (day) Value: 14
  misc_feature: MA Experiment 20000173 PARAMETER Experiment Name: At_42deg_Heat_P Parameter: Organism Value: A. thaliana
  misc_feature: MA Experiment 20000173 PARAMETER Experiment Name: At_42deg_Heat_P Parameter: Plant Line Value: WS
  misc_feature: MA Experiment 20000173 PARAMETER Experiment Name: At_42deg_Heat_P Parameter: Temperature (deg C) Value: 42 vs. 22
  misc_feature: MA Experiment 20000173 PARAMETER Experiment Name: At_42deg_Heat_P Parameter: Timepoint (hr) Value: 6
  misc_feature: MA Experiment 20000173 PARAMETER Experiment Name: At_42deg_Heat_P Parameter: Tissue Value: Aerial
  misc_feature: MA Experiment ID: 20000182 Result: Up-regulated in Transcription
  misc_feature: MA Experiment 20000182 PARAMETER Experiment Name: At_2mM_SA_P Parameter: Age (day) Value: 14
  misc_feature: MA Experiment 20000182 PARAMETER Experiment Name: At_2mM_SA_P Parameter: Organism Value: A. thaliana
  misc_feature: MA Experiment 20000182 PARAMETER Experiment Name: At_2mM_SA_P Parameter: Plant Line Value: WS
  misc_feature: MA Experiment 20000182 PARAMETER Experiment Name: At_2mM_SA_P Parameter: Timepoint (hr) Value: 6
  misc_feature: MA Experiment 20000182 PARAMETER Experiment Name: At_2mM_SA_P Parameter: Tissue Value: Aerial
  misc_feature: MA Experiment 20000182 PARAMETER Experiment Name: At_2mM_SA_P Parameter: Treatment Value: 2mM SA vs. No Treatment
  misc_feature: MA Experiment ID: 20000184 Result: Down-regulated in Transcription
  misc_feature: MA Experiment 20000184 PARAMETER Experiment Name: At_Shoots__P Parameter: Age (day) Value: 7
  misc_feature: MA Experiment 20000184 PARAMETER Experiment Name: At_Shoots__P Parameter: Tissue Value: Shoots vs. Whole Plant
  misc_feature: MA Experiment ID: 20000185 Result: Down-regulated in Transcription
  misc_feature: MA Experiment 20000185 PARAMETER Experiment Name: At_Roots__P Parameter: Age (day) Value: 7 vs. 21
  misc_feature: MA Experiment 20000185 PARAMETER Experiment Name: At_Roots__P Parameter: Organism Value: A. thaliana
  misc_feature: MA Experiment 20000185 PARAMETER Experiment Name: At_Roots__P Parameter: Tissue Value: Roots vs. Whole Plant
  misc_feature: MA Experiment ID: 20000224 Result: Up-regulated in Transcription
  misc_feature: MA Experiment ID: 20000234 Result: Down-regulated in Transcription
  misc_feature: MA Experiment 20000234 PARAMETER Experiment Name: At_Siliques_P Parameter: Age (day) Value: 21
  misc_feature: MA Experiment 20000234 PARAMETER Experiment Name: At_Siliques_P Parameter: Organism Value: A. thaliana
  misc_feature: MA Experiment 20000234 PARAMETER Experiment Name: At_Siliques_P Parameter: Plant Line Value: WS
  misc_feature: MA Experiment 20000234 PARAMETER Experiment Name: At_Siliques_P Parameter: Tissue Value: Less Than 5mm Siliques vs. Whole Plant
  misc_feature: MA Experiment ID: 20000235 Result: Down-regulated in Transcription
  misc_feature: MA Experiment 20000235 PARAMETER Experiment Name: At_Siliques_P Parameter: Age (day) Value: 21
  misc_feature: MA Experiment 20000235 PARAMETER Experiment Name: At_Siliques_P Parameter: Organism Value: A. thaliana
  misc_feature: MA Experiment 20000235 PARAMETER Experiment Name: At_Siliques_P Parameter: Plant Line Value: WS
  misc_feature: MA Experiment 20000235 PARAMETER Experiment Name: At_Siliques_P Parameter: Tissue Value: 5-10mm Siliques vs. Whole Plant
  misc_feature: MA Experiment ID: 20000264 Result: Down-regulated in Transcription
  misc_feature: MA Experiment 20000264 PARAMETER Experiment Name: At_Open_Flower_P Parameter: Age (day) Value: 21
  misc_feature: MA Experiment 20000264 PARAMETER Experiment Name: At_Open_Flower_P Parameter: Plant Line Value: WS
  misc_feature: MA Experiment 20000264 PARAMETER Experiment Name: At_Open_Flower_P Parameter: Tissue Value: Open Flower vs. Whole Plant
  misc_feature: MA Experiment ID: 20000265 Result: Down-regulated in Transcription
  misc_feature: MA Experiment 20000265 PARAMETER Experiment Name: At_Open_Flower_P Parameter: Age (day) Value: 21
  misc_feature: MA Experiment 20000265 PARAMETER Experiment Name: At_Open_Flower_P Parameter: Plant Line Value: WS
  misc_feature: MA Experiment 20000265 PARAMETER Experiment Name: At_Open_Flower_P Parameter: Tissue Value: Closed Flower vs. Whole Plant
  misc_feature: MA Experiment ID: 20000286 Result: Down-regulated in Transcription
  misc_feature: MA Experiment 20000286 PARAMETER Experiment Name: At_Open_Flower_P Parameter: Age (day) Value: 21
  misc_feature: MA Experiment 20000286 PARAMETER Experiment Name: At_Open_Flower_P Parameter: Plant Line Value: WS
  misc_feature: MA Experiment 20000286 PARAMETER Experiment Name: At_Open_Flower_P Parameter: Tissue Value: Half Open vs. Whole Plant
  misc_feature: MA Experiment ID: 20000436 Result: Down-regulated in Transcription
  misc_feature: MA Experiment 20000436 PARAMETER Experiment Name: At_Drought_P Parameter: Age (day) Value: 7
  misc_feature: MA Experiment 20000436 PARAMETER Experiment Name: At_Drought_P Parameter: Organism Value: A. thaliana
  misc_feature: MA Experiment 20000436 PARAMETER Experiment Name: At_Drought_P Parameter: Plant Line Value: WS
  misc_feature: MA Experiment 20000436 PARAMETER Experiment Name: At_Drought_P Parameter: Timepoint (hr) Value: 12
  misc_feature: MA Experiment 20000436 PARAMETER Experiment Name: At_Drought_P Parameter: Tissue Value: Whole Plant
  misc_feature: MA Experiment 20000436 PARAMETER Experiment Name: At_Drought_P Parameter: Treatment Value: Drought vs. No Drought
  misc_feature: MA Experiment ID: 20000437 Result: Down-regulated in Transcription
  misc_feature: MA Experiment 20000437 PARAMETER Experiment Name: At_Drought_P Parameter: Age (day) Value: 8
  misc_feature: MA Experiment 20000437 PARAMETER Experiment Name: At_Drought_P Parameter: Organism Value: A. thaliana
  misc_feature: MA Experiment 20000437 PARAMETER Experiment Name: At_Drought_P Parameter: Plant Line Value: WS
  misc_feature: MA Experiment 20000437 PARAMETER Experiment Name: At_Drought_P Parameter: Timepoint (hr) Value: 24
  misc_feature: MA Experiment 20000437 PARAMETER Experiment Name: At_Drought_P Parameter: Tissue Value: Whole Plant
  misc_feature: MA Experiment 20000437 PARAMETER Experiment Name: At_Drought_P Parameter: Treatment Value: Drought vs. No Drought
  misc_feature: MA Experiment ID: 20000439 Result: Down-regulated in Transcription
  misc_feature: MA Experiment 20000439 PARAMETER Experiment Name: At_Roots__P Parameter: Age (day) Value: 14 vs. 21
  misc_feature: MA Experiment 20000439 PARAMETER Experiment Name: At_Roots__P Parameter: Organism Value: A. thaliana
  misc_feature: MA Experiment 20000439 PARAMETER Experiment Name: At_Roots__P Parameter: Tissue Value: Roots vs. Whole Plant
  misc_feature: MA Experiment ID: 20000452 Result: Down-regulated in Transcription
  misc_feature: MA Experiment 20000452 PARAMETER Experiment Name: At_CS6879_Shoots-Roots_P Parameter: Age (day) Value: 14
  misc_feature: MA Experiment 20000452 PARAMETER Experiment Name: At_CS6879_Shoots-Roots_P Parameter: Organism Value: A. thaliana
  misc_feature: MA Experiment 20000452 PARAMETER Experiment Name: At_CS6879_Shoots-Roots_P Parameter: Plant Line Value: CS6879 vs. WS
  misc_feature: MA Experiment 20000452 PARAMETER Experiment Name: At_CS6879_Shoots-Roots_P Parameter: Tissue Value: Shoots
  misc_feature: MA Experiment ID: 20000495 Result: Down-regulated in Transcription
  misc_feature: MA Experiment 20000495 PARAMETER Experiment Name: At_Guard_Cells_P Parameter: Harvest Date Value: 8/2/2002
  misc_feature: MA Experiment 20000495 PARAMETER Experiment Name: At_Guard_Cells_P Parameter: Organism Value: A. thaliana
  misc_feature: MA Experiment 20000495 PARAMETER Experiment Name: At_Guard_Cells_P Parameter: Tissue Value: Guard Cells vs. Leaves
  misc_feature: MA Experiment ID: 20000527 Result: Down-regulated in Transcription
  misc_feature: MA Experiment 20000527 PARAMETER Experiment Name: At_10percent_PEG_P Parameter: Age (day) Value: 20
  misc_feature: MA Experiment 20000527 PARAMETER Experiment Name: At_10percent_PEG_P Parameter: Organism Value: A. thaliana
  misc_feature: MA Experiment 20000527 PARAMETER Experiment Name: At_10percent_PEG_P Parameter: Plant Line Value: WS
  misc_feature: MA Experiment 20000527 PARAMETER Experiment Name: At_10percent_PEG_P Parameter: Timepoint (day) Value: 20
  misc_feature: MA Experiment 20000527 PARAMETER Experiment Name: At_10percent_PEG_P Parameter: Tissue Value: Whole Plant
  misc_feature: MA Experiment 20000527 PARAMETER Experiment Name: At_10percent_PEG_P Parameter: Treatment Value: 10percent PEG vs. No Treatment
  misc_feature: MA Experiment ID: 20000794 Result: Down-regulated in Transcription
  misc_feature: MA Experiment 20000794 PARAMETER Experiment Name: At_Petals_P Parameter: Age (day) Value: 23-25 days
  misc_feature: MA Experiment 20000794 PARAMETER Experiment Name: At_Petals_P Parameter: Plant Line Value: WS
  misc_feature: MA Experiment 20000794 PARAMETER Experiment Name: At_Petals_P Parameter: Tissue Value: Petals vs. Whole plant
  misc_feature: MA Experiment ID: 20001554 Result: Down-regulated in Transcription
  misc_feature: MA Experiment 20001554 PARAMETER Experiment Name: At_Drought_Soil_Dry_P Parameter: Age (day) Value: 21
  misc_feature: MA Experiment 20001554 PARAMETER Experiment Name: At_Drought_Soil_Dry_P Parameter: Organism Value: A. thaliana
  misc_feature: MA Experiment 20001554 PARAMETER Experiment Name: At_Drought_Soil_Dry_P Parameter: Plant Line Value: WS
  misc_feature: MA Experiment 20001554 PARAMETER Experiment Name: At_Drought_Soil_Dry_P Parameter: Post Timepoint (hr) Value: None
  misc_feature: MA Experiment 20001554 PARAMETER Experiment Name: At_Drought_Soil_Dry_P Parameter: Post-Treatment Value: None
  misc_feature: MA Experiment 20001554 PARAMETER Experiment Name: At_Drought_Soil_Dry_P Parameter: Timepoint (day) Value: 7
  misc_feature: MA Experiment 20001554 PARAMETER Experiment Name: At_Drought_Soil_Dry_P Parameter: Treatment Value: Drought vs. No Drought
  misc_feature: MA Experiment ID: 20001555 Result: Down-regulated in Transcription
  misc_feature: MA Experiment 20001555 PARAMETER Experiment Name: At_Drought_Soil_Dry_P Parameter: Age (day) Value: 24
  misc_feature: MA Experiment 20001555 PARAMETER Experiment Name: At_Drought_Soil_Dry_P Parameter: Organism Value: A. thaliana
  misc_feature: MA Experiment 20001555 PARAMETER Experiment Name: At_Drought_Soil_Dry_P Parameter: Plant Line Value: WS
  misc_feature: MA Experiment 20001555 PARAMETER Experiment Name: At_Drought_Soil_Dry_P Parameter: Post Timepoint (hr) Value: None
  misc_feature: MA Experiment 20001555 PARAMETER Experiment Name: At_Drought_Soil_Dry_P Parameter: Post-Treatment Value: None
  misc_feature: MA Experiment 20001555 PARAMETER Experiment Name: At_Drought_Soil_Dry_P Parameter: Timepoint (day) Value: 10
  misc_feature: MA Experiment 20001555 PARAMETER Experiment Name: At_Drought_Soil_Dry_P Parameter: Treatment Value: Drought vs. No Drought
  misc_feature: MA Experiment ID: 20001556 Result: Down-regulated in Transcription
  misc_feature: MA Experiment 20001556 PARAMETER Experiment Name: At_Drought_Soil_Dry_P Parameter: Age (day) Value: 26
  misc_feature: MA Experiment 20001556 PARAMETER Experiment Name: At_Drought_Soil_Dry_P Parameter: Organism Value: A. thaliana
  misc_feature: MA Experiment 20001556 PARAMETER Experiment Name: At_Drought_Soil_Dry_P Parameter: Plant Line Value: WS
  misc_feature: MA Experiment 20001556 PARAMETER Experiment Name: At_Drought_Soil_Dry_P Parameter: Post Timepoint (hr) Value: None
  misc_feature: MA Experiment 20001556 PARAMETER Experiment Name: At_Drought_Soil_Dry_P Parameter: Post-Treatment Value: None
  misc_feature: MA Experiment 20001556 PARAMETER Experiment Name: At_Drought_Soil_Dry_P Parameter: Timepoint (day) Value: 12
  misc_feature: MA Experiment 20001556 PARAMETER Experiment Name: At_Drought_Soil_Dry_P Parameter: Treatment Value: Drought vs. No Drought
  misc_feature: MA Experiment ID: 20001559 Result: Down-regulated in Transcription
  misc_feature: MA Experiment 20001559 PARAMETER Experiment Name: At_Drought_Soil_Dry_P Parameter: Age (day) Value: 28
  misc_feature: MA Experiment 20001559 PARAMETER Experiment Name: At_Drought_Soil_Dry_P Parameter: Organism Value: A. thaliana
  misc_feature: MA Experiment 20001559 PARAMETER Experiment Name: At_Drought_Soil_Dry_P Parameter: Plant Line Value: WS
  misc_feature: MA Experiment 20001559 PARAMETER Experiment Name: At_Drought_Soil_Dry_P Parameter: Post Timepoint (hr) Value: 29
  misc_feature: MA Experiment 20001559 PARAMETER Experiment Name: At_Drought_Soil_Dry_P Parameter: Post-Treatment Value: Re-Water vs. No Drought
  misc_feature: MA Experiment 20001559 PARAMETER Experiment Name: At_Drought_Soil_Dry_P Parameter: Timepoint (day) Value: 14
  misc_feature: MA Experiment 20001559 PARAMETER Experiment Name: At_Drought_Soil_Dry_P Parameter: Treatment Value: Drought vs. No Drought
  misc_feature: MA Experiment ID: 20001560 Result: Down-regulated in Transcription
  misc_feature: MA Experiment 20001560 PARAMETER Experiment Name: At_Drought_Soil_Dry_P Parameter: Age (day) Value: 28
  misc_feature: MA Experiment 20001560 PARAMETER Experiment Name: At_Drought_Soil_Dry_P Parameter: Organism Value: A. thaliana
  misc_feature: MA Experiment 20001560 PARAMETER Experiment Name: At_Drought_Soil_Dry_P Parameter: Plant Line Value: WS
  misc_feature: MA Experiment 20001560 PARAMETER Experiment Name: At_Drought_Soil_Dry_P Parameter: Post Timepoint (hr) Value: None
  misc_feature: MA Experiment 20001560 PARAMETER Experiment Name: At_Drought_Soil_Dry_P Parameter: Post-Treatment Value: None
  misc_feature: MA Experiment 20001560 PARAMETER Experiment Name: At_Drought_Soil_Dry_P Parameter: Timepoint (day) Value: 14
  misc_feature: MA Experiment 20001560 PARAMETER Experiment Name: At_Drought_Soil_Dry_P Parameter: Treatment Value: Drought vs. No Drought
  misc_feature: MA Experiment ID: 20001904 Result: Down-regulated in Transcription
  misc_feature: MA Experiment 20001904 PARAMETER Experiment Name: At_Drought_Reproduction_P Parameter: Age (day) Value: 37
  misc_feature: MA Experiment 20001904 PARAMETER Experiment Name: At_Drought_Reproduction_P Parameter: Organism Value: A. thaliana
  misc_feature: MA Experiment 20001904 PARAMETER Experiment Name: At_Drought_Reproduction_P Parameter: Plant Line Value: WS
  misc_feature: MA Experiment 20001904 PARAMETER Experiment Name: At_Drought_Reproduction_P Parameter: Timepoint (day) Value: 7
  misc_feature: MA Experiment 20001904 PARAMETER Experiment Name: At_Drought_Reproduction_P Parameter: Tissue Value: Rosettes
  misc_feature: MA Experiment 20001904 PARAMETER Experiment Name: At_Drought_Reproduction_P Parameter: Treatment Value: Drought vs. No Drought
aggagattagcgaaaactcaaaacaggaacaaagttaaaagagtgagagagaaagaaagagagaagatgaaggtacaggagggtttgttcgtggtggctgttttctaccttgcttatacgcagctagtcaaggggcaacctcgcaaggagtgccaaactagatgtggcaatgtcgcagttgagtacccttttggtacttctccaggttgttactatcccggagatgaaagtttcaatcttacttgcaacgagcaagagaagctcttctttggcaacatgccagtcatcaacatgtctctcagcggccagcttcgtgttcggctagttagatccagagtttgctacgatagtcaaggaaaacagactgactacattgcccggcggaccaccctgggtaatttcactctctctgaacttaacagatttactgtagtaggttgtaacagttacgcatttctccgcacatctggagttgaaaaatactcaactggatgcatatcaatatgtgattctgccacaacgaaaaacggatcatgttctggtgaaggttgctgccagatccctgtccctagaggatactcttttgtcagagtaaaaccacatagctttcacaaccatcctactgtgcatctgtttaatccttgcacctacgcctttctcgttgaagatggtatgtttgacttccatgctttggaagatctcaacaatctgcgaaatgttactacgttccctgtagtactagattggtctatcggagacaagacttgcaaacaagtagaatacaggggcgtgtgtggtggtaacagcacatgtttcgattctactggtggaaccgggtataactgcaaatgtttagaaggttttgaggggaatccataccttccaaacggttgtcaagacatcaatgaatgtattagtagtagacataactgttcggagcatagtacctgtgaaaacacgaaggggagcttcaactgtaactgcccatctggttaccgcaaagattcccttaatagctgtactcgtaaagtcaggcctgaatactttagatggactcaaatttttcttggaaccaccatcggcttctcggttatcatgcttgggattagctgtctacaacagaaaattaagcaccggaagaacacagagctccgacaaaaattcttcgagcaaaatggtggaggcatgttgatacagcgagtctcgggagcagggccatcaaatgttgatgtcaaaatcttcactgagaaaggaatgaaggaagcaactaatggttaccatgagagcagaatcctgggtcagggaggccaaggaacagtgtacaaagggatattgccggacaactccatagttgctataaagaaagctcggcttggaaaccgtagccaagtagagcagttcatcaacgaagtgctagtgctttcacaaatcaaccataggaacgtggtcaaggtcttggggtgttgtttagagacagaagtccccttgttggtctatgagttcattaacagtggtacccttttcgatcacttgcacggttccttgtatgattcttcacttacatgggagcaccgtctgaggatagcaacagaagtagcaggaagtcttgcatatcttcactcttctgcttctattccaatcatccaccgagatatcaagactgctaatattctcctggataaaaacttaactgcaaaagcagctgactttggtgcatcaagattgataccgatggataaagagcagctcacaacaatagtgcaaggcactctaggttacctagacccagaatattacaacacagggttgttaaacgaaaagagcgatgtttatagttttggggtcgtcctaatggaactgctctcaggtcaaaaggcattgtgtttcgaaagaccacattgcccaaaaaatctagtgagttgttttgcttctgccacaaagaataataggttccatgaaattattgatgggcaagtgatgaatgaggataaccagagagagatccaggaagctgcaagaattgctgcagagtgtacaaggctaatgggagaggaaaggccaaggatgaaagaagtagctgcagagttagaggccttgagagttaaaacaactaaatataagtggtcggatcagtatcgtgagacaggggagattgaacacttgctcggcgttcaaatcttgtcagcacaaggcgaaaccagtagcagcattggctatgacagcatcagaaatgtaacaacattggacattgaagctggccgttgatattaatgctctgacaaaatcacatgtatatcttttgtttgtaaaaaaagaaagtcatttccttgttgcttcatcaataatgctttgacagatttgtttgtacatcatcaataatcatgttcatattttccttt

SEQ ID NO: 38222 - protein, 754 aa, Arabidopsis thaliana
  peptide (1)..(754): Ceres Seq. ID no. 13488341
  misc_feature (114)..(702): Homolog of NCBI NO: 38346752 NR Description: OSJNBa0081G05.15 [Oryza sativa (japonica
  misc_feature (23)..(325): Homolog of NCBI NO: 25287657 NR Description: F16F4.8 protein - Arabidopsis thaliana
  misc_feature (297)..(754): Homolog of NCBI NO: 25287657 NR Description: F16F4.8 protein - Arabidopsis thaliana
  misc_feature (23)..(754): Homolog of NCBI NO: 15218171 NR Description: wall-associated kinase 3 [Arabidopsis thaliana]
  misc_feature (23)..(754): Homolog of NCBI NO: 3355308 NR Description: wall-associated kinase 4 [Arabidopsis thaliana]
  misc_feature (23)..(754): Homolog of NCBI NO: 15218167 NR Description: wall-associated kinase 4 [Arabidopsis thaliana]
  misc_feature (23)..(754): Homolog of NCBI NO: 25287665 NR Description: hypothetical protein F16F4.10 [imported] -
  misc_feature (23)..(754): Homolog of NCBI NO: 25751318 NR Description: probable serine/threonine-specific protein kinase
  misc_feature (23)..(754): Homolog of NCBI NO: 18394970 NR Description: wall-associated kinase 1 [Arabidopsis thaliana]
  misc_feature (23)..(754): Homolog of NCBI NO: 15218170 NR Description: wall-associated kinase 5 [Arabidopsis thaliana]
RRLAKTQNRNKVKRVREKEREKMKVQEGLFVVAVFYLAYTQLVKGQPRKECQTRCGNVAVEYPFGTSPGCYYPGDESFNLTCNEQEKLFFGNMPVINMSLSGQLRVRLVRSRVCYDSQGKQTDYIARRTTLGNFTLSELNRFTVVGCNSYAFLRTSGVEKYSTGCISICDSATTKNGSCSGEGCCQIPVPRGYSFVRVKPHSFHNHPTVHLFNPCTYAFLVEDGMFDFHALEDLNNLRNVTTFPVVLDWSIGDKTCKQVEYRGVCGGNSTCFDSTGGTGYNCKCLEGFEGNPYLPNGCQDINECISSRHNCSEHSTCENTKGSFNCNCPSGYRKDSLNSCTRKVRPEYFRWTQIFLGTTIGFSVIMLGISCLQQKIKHRKNTELRQKFFEQNGGGMLIQRVSGAGPSNVDVKIFTEKGMKEATNGYHESRILGQGGQGTVYKGILPDNSIVAIKKARLGNRSQVEQFINEVLVLSQINHRNVVKVLGCCLETEVPLLVYEFINSGTLFDHLHGSLYDSSLTWEHRLRIATEVAGSLAYLHSSASIPIIHRDIKTANILLDKNLTAKAADFGASRLIPMDKEQLTTIVQGTLGYLDPEYYNTGLLNEKSDVYSFGVVLMELLSGQKALCFERPHCPKNLVSCFASATKNNRFHEIIDGQVMNEDNQREIQEAARIAAECTRLMGEERPRMKEVAAELEALRVKTTKYKWSDQYRETGEIEHLLGVQILSAQGETSSSIGYDSIRNVTTLDIEAGR

SEQ ID NO: 38223 - protein, 732 aa, Arabidopsis thaliana
  peptide (1)..(732): Ceres Seq. ID no. 13488342
  misc_feature (92)..(680): Homolog of NCBI NO: 38346752 NR Description: OSJNBa0081G05.15 [Oryza sativa (japonica
  misc_feature (1)..(303): Homolog of NCBI NO: 25287657 NR Description: F16F4.8 protein - Arabidopsis thaliana
  misc_feature (275)..(732): Homolog of NCBI NO: 25287657 NR Description: F16F4.8 protein - Arabidopsis thaliana
  misc_feature (1)..(732): Homolog of NCBI NO: 15218171 NR Description: wall-associated kinase 3 [Arabidopsis thaliana]
  misc_feature (1)..(732): Homolog of NCBI NO: 3355308 NR Description: wall-associated kinase 4 [Arabidopsis thaliana]
  misc_feature (1)..(732): Homolog of NCBI NO: 15218167 NR Description: wall-associated kinase 4 [Arabidopsis thaliana]
  misc_feature (1)..(732): Homolog of NCBI NO: 25287665 NR Description: hypothetical protein F16F4.10 [imported] -
  misc_feature (1)..(732): Homolog of NCBI NO: 25751318 NR Description: probable serine/threonine-specific protein kinase
  misc_feature (1)..(732): Homolog of NCBI NO: 18394970 NR Description: wall-associated kinase 1 [Arabidopsis thaliana]
  misc_feature (1)..(732): Homolog of NCBI NO: 15218170 NR Description: wall-associated kinase 5 [Arabidopsis thaliana]
MKVQEGLFVVAVFYLAYTQLVKGQPRKECQTRCGNVAVEYPFGTSPGCYYPGDESFNLTCNEQEKLFFGNMPVINMSLSGQLRVRLVRSRVCYDSQGKQTDYIARRTTLGNFTLSELNRFTVVGCNSYAFLRTSGVEKYSTGCISICDSATTKNGSCSGEGCCQIPVPRGYSFVRVKPHSFHNHPTVHLFNPCTYAFLVEDGMFDFHALEDLNNLRNVTTFPVVLDWSIGDKTCKQVEYRGVCGGNSTCFDSTGGTGYNCKCLEGFEGNPYLPNGCQDINECISSRHNCSEHSTCENTKGSFNCNCPSGYRKDSLNSCTRKVRPEYFRWTQIFLGTTIGFSVIMLGISCLQQKIKHRKNTELRQKFFEQNGGGMLIQRVSGAGPSNVDVKIFTEKGMKEATNGYHESRILGQGGQGTVYKGILPDNSIVAIKKARLGNRSQVEQFINEVLVLSQINHRNVVKVLGCCLETEVPLLVYEFINSGTLFDHLHGSLYDSSLTWEHRLRIATEVAGSLAYLHSSASIPIIHRDIKTANILLDKNLTAKAADFGASRLIPMDKEQLTTIVQGTLGYLDPEYYNTGLLNEKSDVYSFGVVLMELLSGQKALCFERPHCPKNLVSCFASATKNNRFHEIIDGQVMNEDNQREIQEAARIAAECTRLMGEERPRMKEVAAELEALRVKTTKYKWSDQYRETGEIEHLLGVQILSAQGETSSSIGYDSIRNVTTLDIEAGR

SEQ ID NO: 38224 - protein, 662 aa, Arabidopsis thaliana
  peptide (1)..(662): Ceres Seq. ID no. 13488343
  misc_feature (22)..(610): Homolog of NCBI NO: 38346752 NR Description: OSJNBa0081G05.15 [Oryza sativa (japonica
  misc_feature (1)..(233): Homolog of NCBI NO: 25287657 NR Description: F16F4.8 protein - Arabidopsis thaliana
  misc_feature (205)..(662): Homolog of NCBI NO: 25287657 NR Description: F16F4.8 protein - Arabidopsis thaliana
  misc_feature (1)..(662): Homolog of NCBI NO: 15218171 NR Description: wall-associated kinase 3 [Arabidopsis thaliana]
  misc_feature (1)..(662): Homolog of NCBI NO: 3355308 NR Description: wall-associated kinase 4 [Arabidopsis thaliana]
  misc_feature (1)..(662): Homolog of NCBI NO: 15218167 NR Description: wall-associated kinase 4 [Arabidopsis thaliana]
  misc_feature (1)..(662): Homolog of NCBI NO: 25287665 NR Description: hypothetical protein F16F4.10 [imported] -
  misc_feature (1)..(662): Homolog of NCBI NO: 25751318 NR Description: probable serine/threonine-specific protein kinase
  misc_feature (1)..(662): Homolog of NCBI NO: 18394970 NR Description: wall-associated kinase 1 [Arabidopsis thaliana]
  misc_feature (1)..(662): Homolog of NCBI NO: 15218170 NR Description: wall-associated kinase 5 [Arabidopsis thaliana]
MPVINMSLSGQLRVRLVRSRVCYDSQGKQTDYIARRTTLGNFTLSELNRFTVVGCNSYAFLRTSGVEKYSTGCISICDSATTKNGSCSGEGCCQIPVPRGYSFVRVKPHSFHNHPTVHLFNPCTYAFLVEDGMFDFHALEDLNNLRNVTTFPVVLDWSIGDKTCKQVEYRGVCGGNSTCFDSTGGTGYNCKCLEGFEGNPYLPNGCQDINECISSRHNCSEHSTCENTKGSFNCNCPSGYRKDSLNSCTRKVRPEYFRWTQIFLGTTIGFSVIMLGISCLQQKIKHRKNTELRQKFFEQNGGGMLIQRVSGAGPSNVDVKIFTEKGMKEATNGYHESRILGQGGQGTVYKGILPDNSIVAIKKARLGNRSQVEQFINEVLVLSQINHRNVVKVLGCCLETEVPLLVYEFINSGTLFDHLHGSLYDSSLTWEHRLRIATEVAGSLAYLHSSASIPIIHRDIKTANILLDKNLTAKAADFGASRLIPMDKEQLTTIVQGTLGYLDPEYYNTGLLNEKSDVYSFGVVLMELLSGQKALCFERPHCPKNLVSCFASATKNNRFHEIIDGQVMNEDNQREIQEAARIAAECTRLMGEERPRMKEVAAELEALRVKTTKYKWSDQYRETGEIEHLLGVQILSAQGETSSSIGYDSIRNVTTLDIEAGR

SEQ ID NO: 38225 - DNA, 1335 bp, Arabidopsis thaliana
  misc_feature (1)..(1335): Ceres Seq. ID no. 13615780
  misc_feature: MA Experiment ID: 108573 Result: Up-regulated in Transcription
  misc_feature: MA Experiment 108573 PARAMETER Experiment Name: At_Drought_cDNA_P Parameter: Timepoint (hr) Value: 6
  misc_feature: MA Experiment 108573 PARAMETER Experiment Name: At_Drought_cDNA_P Parameter: Tissue Value: Aerial
  misc_feature: MA Experiment 108573 PARAMETER Experiment Name: At_Drought_cDNA_P Parameter: Treatment Value: Drought vs. No Drought
  misc_feature: MA Experiment ID: 108576 Result: Up-regulated in Transcription
  misc_feature: MA Experiment 108576 PARAMETER Experiment Name: At_42deg_Heat_cDNA_P Parameter: Temperature (deg C) Value: 42 vs. 22
  misc_feature: MA Experiment 108576 PARAMETER Experiment Name: At_42deg_Heat_cDNA_P Parameter: Timepoint (hr) Value: 1
  misc_feature: MA Experiment 108576 PARAMETER Experiment Name: At_42deg_Heat_cDNA_P Parameter: Tissue Value: Aerial
  misc_feature: MA Experiment ID: 108577 Result: Up-regulated in Transcription
  misc_feature: MA Experiment 108577 PARAMETER Experiment Name: At_42deg_Heat_cDNA_P Parameter: Temperature (deg C) Value: 42 vs. 22
  misc_feature: MA Experiment 108577 PARAMETER Experiment Name: At_42deg_Heat_cDNA_P Parameter: Timepoint (hr) Value: 6
  misc_feature: MA Experiment 108577 PARAMETER Experiment Name: At_42deg_Heat_cDNA_P Parameter: Tissue Value: Aerial
  misc_feature: MA Experiment ID: 108585 Result: Up-regulated in Transcription
  misc_feature: MA Experiment 108585 PARAMETER Experiment Name: At_5mM_NaNP_cDNA_P Parameter: Timepoint (hr) Value: 6
  misc_feature: MA Experiment 108585 PARAMETER Experiment Name: At_5mM_NaNP_cDNA_P Parameter: Tissue Value: Aerial
  misc_feature: MA Experiment 108585 PARAMETER Experiment Name: At_5mM_NaNP_cDNA_P Parameter: Treatment Value: null
  misc_feature: MA Experiment ID: 108668 Result: Up-regulated in Transcription
  misc_feature: MA Experiment 108668 PARAMETER Experiment Name: At_2mM_SA_cDNA_P Parameter: Plant Line Value: WS
  misc_feature: MA Experiment 108668 PARAMETER Experiment Name: At_2mM_SA_cDNA_P Parameter: Timepoint (hr) Value: 6
  misc_feature: MA Experiment 108668 PARAMETER Experiment Name: At_2mM_SA_cDNA_P Parameter: Treatment Value: 2mM SA vs. No Treatment
  misc_feature: MA Experiment ID: 20000171 Result: Up-regulated in Transcription
  misc_feature: MA Experiment 20000171 PARAMETER Experiment Name: At_42deg_Heat_P Parameter: Age (day) Value: 14
  misc_feature: MA Experiment 20000171 PARAMETER Experiment Name: At_42deg_Heat_P Parameter: Organism Value: A. thaliana
  misc_feature: MA Experiment 20000171 PARAMETER Experiment Name: At_42deg_Heat_P Parameter: Plant Line Value: WS
  misc_feature: MA Experiment 20000171 PARAMETER Experiment Name: At_42deg_Heat_P Parameter: Temperature (deg C) Value: 42 vs. 22
  misc_feature: MA Experiment 20000171 PARAMETER Experiment Name: At_42deg_Heat_P Parameter: Timepoint (hr) Value: 1
  misc_feature: MA Experiment 20000171 PARAMETER Experiment Name: At_42deg_Heat_P Parameter: Tissue Value: Aerial
  misc_feature: MA Experiment ID: 20000173 Result: Up-regulated in Transcription
  misc_feature: MA Experiment 20000173 PARAMETER Experiment Name: At_42deg_Heat_P Parameter: Age (day) Value: 14
  misc_feature: MA Experiment 20000173 PARAMETER Experiment Name: At_42deg_Heat_P Parameter: Organism Value: A. thaliana
  misc_feature: MA Experiment 20000173 PARAMETER Experiment Name: At_42deg_Heat_P Parameter: Plant Line Value: WS
  misc_feature: MA Experiment 20000173 PARAMETER Experiment Name: At_42deg_Heat_P Parameter: Temperature (deg C) Value: 42 vs. 22
  misc_feature: MA Experiment 20000173 PARAMETER Experiment Name: At_42deg_Heat_P Parameter: Timepoint (hr) Value: 6
  misc_feature: MA Experiment 20000173 PARAMETER Experiment Name: At_42deg_Heat_P Parameter: Tissue Value: Aerial
  misc_feature: MA Experiment ID: 20000182 Result: Up-regulated in Transcription
  misc_feature: MA Experiment 20000182 PARAMETER Experiment Name: At_2mM_SA_P Parameter: Age (day) Value: 14
  misc_feature: MA Experiment 20000182 PARAMETER Experiment Name: At_2mM_SA_P Parameter: Organism Value: A. thaliana
  misc_feature: MA Experiment 20000182 PARAMETER Experiment Name: At_2mM_SA_P Parameter: Plant Line Value: WS
  misc_feature: MA Experiment 20000182 PARAMETER Experiment Name: At_2mM_SA_P Parameter: Timepoint (hr) Value: 6
  misc_feature: MA Experiment 20000182 PARAMETER Experiment Name: At_2mM_SA_P Parameter: Tissue Value: Aerial
  misc_feature: MA Experiment 20000182 PARAMETER Experiment Name: At_2mM_SA_P Parameter: Treatment Value: 2mM SA vs. No Treatment
  misc_feature: MA Experiment ID: 20000437 Result: Up-regulated in Transcription
  misc_feature: MA Experiment 20000437 PARAMETER Experiment Name: At_Drought_P Parameter: Age (day) Value: 8
  misc_feature: MA Experiment 20000437 PARAMETER Experiment Name: At_Drought_P Parameter: Organism Value: A. thaliana
  misc_feature: MA Experiment 20000437 PARAMETER Experiment Name: At_Drought_P Parameter: Plant Line Value: WS
  misc_feature: MA Experiment 20000437 PARAMETER Experiment Name: At_Drought_P Parameter: Timepoint (hr) Value: 24
  misc_feature: MA Experiment 20000437 PARAMETER Experiment Name: At_Drought_P Parameter: Tissue Value: Whole Plant
  misc_feature: MA Experiment 20000437 PARAMETER Experiment Name: At_Drought_P Parameter: Treatment Value: Drought vs. No Drought
  misc_feature: MA Experiment ID: 20000794 Result: Up-regulated in Transcription
  misc_feature: MA Experiment 20000794 PARAMETER Experiment Name: At_Petals_P Parameter: Age (day) Value: 23-25 days
  misc_feature: MA Experiment 20000794 PARAMETER Experiment Name: At_Petals_P Parameter: Plant Line Value: WS
  misc_feature: MA Experiment 20000794 PARAMETER Experiment Name: At_Petals_P Parameter: Tissue Value: Petals vs. Whole plant
actctttactctttcttccgtttgctcgaaccatctagtctaagagaaagaaaaaatactaaagagaaagaagaagaggacttgaatacggaagcttgagagaatgaaagcgatcgtgatctcggagccaggtaagccggaggttctgcaactccgtgatgtggcagacccagaagttaaagacgatgaggttctcatcagagttctcgctactgctttgaatcgtgcagatactctccaaagacttggcctttataatccaccacctggctcaagcccttaccttggtctcgaatgttctgggaccattgaatccgtcggtaaaggcgtctctcgatggaaagtcggagaccaggtgtgtgctcttctttctggaggaggttatgcagagaaagtttctgttcctgctggacaaattttcccaattcccgctggtatctctctaaaggatgcagcggctttccctgaagtggcatgcactgtttggtctactgtcttcatgatgggccgtctctctgttggtgaatcattcttgattcatggaggttcaagtgggattgggacatttgctattcagatagctaaacatctgggagtgagagtatttgtcacagctgggagtgatgaaaagctagctgcgtgcaaagaactcggggctgatgtttgtataaattacaaaaccgaggattttgttgcaaaggtaaaagcggaaaccgatgggaaaggagtggatgttatcttggactgcattggggcaccgtatttgcagaaaaatctcgacagcttaaactttgatggaaggttatgtattatcggtttaatgggaggagccaatgcagaaataaaactaagtagtctgcttccaaagcgtctcactgtcttaggagctgcattaagaccaagaagccctgaaaacaaagcagttgttgtaagggaagtcgagaagaatgtctggccagcgatagaagcagggaaggtaaaaccagtgatttacaagtatttaccattgtcacaagcagcagaaggtcatagccttatggagagtagcaaccatattggtaagattctccttgagacttgattctctgcaaagggagaaatgttcagagacaagagtcatggtcaataatcaataaaatctggtcgattctgttcatagatatctctttacaagagttctgtttgttggcttttatgtatctctgatttggtcaaaaagacactgtaactatggaacatatatagtatcaaataagctgttgtataccaaacattgatttcgaagtagaatatgattttgtaagaagtttttatttattttgggcttaaaaagtg

SEQ ID NO: 38226 - protein, 325 aa, Arabidopsis thaliana; identical to SEQ ID NO: 26964
  peptide (1)..(325): Ceres Seq. ID no. 13615781
  misc_feature (1)..(324): Homolog of NCBI NO: 15888165 NR Description: AGR_C_1508p [Agrobacterium tumefaciens]
  misc_feature (1)..(323): Homolog of NCBI NO: 22977083 NR Description: hypothetical protein [Ralstonia metallidurans]
  misc_feature (1)..(323): Homolog of NCBI NO: 15610913 NR Description: hypothetical protein Rv3777 [Mycobacterium
  misc_feature (1)..(323): Homolog of NCBI NO: 15843400 NR Description: quinone oxidoreductase [Mycobacterium
  misc_feature (1)..(324): Homolog of NCBI NO: 22960487 NR Description: hypothetical protein [Rhodobacter sphaeroides]
  misc_feature (1)..(323): Homolog of NCBI NO: 29830911 NR Description: putative quinone oxidoreductase
  misc_feature (1)..(325): Homolog of NCBI NO: 21222233 NR Description: putative quinone oxidoreductase [Streptomyces
  misc_feature (1)..(325): Homolog of NCBI NO: 23017076 NR Description: hypothetical protein [Thermobifida fusca]
  misc_feature (1)..(323): Homolog of NCBI NO: 15451578 NR Description: Putative quinone oxidoreductase [Oryza sativa]
  misc_feature (1)..(325): Homolog of NCBI NO: 15234529 NR Description: oxidoreductase, zinc-binding dehydrogenase family

SEQ ID NO: 38227 - protein, 193 aa, Arabidopsis thaliana; identical to SEQ ID NO: 26965
  peptide (1)..(193): Ceres Seq. ID no. 13615782
  misc_feature (1)..(192): Homolog of NCBI NO: 15888165 NR Description: AGR_C_1508p [Agrobacterium tumefaciens]
  misc_feature (1)..(191): Homolog of NCBI NO: 22977083 NR Description: hypothetical protein [Ralstonia metallidurans]
  misc_feature (1)..(191): Homolog of NCBI NO: 15610913 NR Description: hypothetical protein Rv3777 [Mycobacterium
  misc_feature (1)..(191): Homolog of NCBI NO: 15843400 NR Description: quinone oxidoreductase [Mycobacterium
  misc_feature (1)..(192): Homolog of NCBI NO: 22960487 NR Description: hypothetical protein [Rhodobacter sphaeroides]
  misc_feature (1)..(191): Homolog of NCBI NO: 29830911 NR Description: putative quinone oxidoreductase
  misc_feature (1)..(193): Homolog of NCBI NO: 21222233 NR Description: putative quinone oxidoreductase [Streptomyces
  misc_feature (1)..(193): Homolog of NCBI NO: 23017076 NR Description: hypothetical protein [Thermobifida fusca]
  misc_feature (1)..(191): Homolog of NCBI NO: 15451578 NR Description: Putative quinone oxidoreductase [Oryza sativa]
  misc_feature (1)..(193): Homolog of NCBI NO: 15234529 NR Description: oxidoreductase, zinc-binding dehydrogenase family

SEQ ID NO: 38228 - protein, 192 aa, Arabidopsis thaliana; identical to SEQ ID NO: 26966
  peptide (1)..(192): Ceres Seq. ID no. 13615783
  misc_feature (1)..(191): Homolog of NCBI NO: 15888165 NR Description: AGR_C_1508p [Agrobacterium tumefaciens]
  misc_feature (1)..(190): Homolog of NCBI NO: 22977083 NR Description: hypothetical protein [Ralstonia metallidurans]
  misc_feature (1)..(190): Homolog of NCBI NO: 15610913 NR Description: hypothetical protein Rv3777 [Mycobacterium
  misc_feature (1)..(190): Homolog of NCBI NO: 15843400 NR Description: quinone oxidoreductase [Mycobacterium
  misc_feature (1)..(191): Homolog of NCBI NO: 22960487 NR Description: hypothetical protein [Rhodobacter sphaeroides]
  misc_feature (1)..(190): Homolog of NCBI NO: 29830911 NR Description: putative quinone oxidoreductase
  misc_feature (1)..(192): Homolog of NCBI NO: 21222233 NR Description: putative quinone oxidoreductase [Streptomyces
  misc_feature (1)..(192): Homolog of NCBI NO: 23017076 NR Description: hypothetical protein [Thermobifida fusca]
  misc_feature (1)..(190): Homolog of NCBI NO: 15451578 NR Description: Putative quinone oxidoreductase [Oryza sativa]
  misc_feature (1)..(192): Homolog of NCBI NO: 15234529 NR Description: oxidoreductase, zinc-binding dehydrogenase family

SEQ ID NO: 38229 - DNA, 715 bp, Arabidopsis thaliana
  misc_feature (1)..(715): Ceres Seq. ID no. 13495872
  misc_feature: MA Experiment ID: 108434 Result: Up-regulated in Transcription
  misc_feature: MA Experiment 108434 PARAMETER Experiment Name: At_Root_Tips_cDNA_P Parameter: Tissue Value: Root Tips
  misc_feature: MA Experiment ID: 108462 Result: Down-regulated in Transcription
  misc_feature: MA Experiment 108462 PARAMETER Experiment Name: At_Germinating_Seeds_cDNA_P Parameter: Age (day) Value: 2 vs. 0
  misc_feature: MA Experiment 108462 PARAMETER Experiment Name: At_Germinating_Seeds_cDNA_P Parameter: Tissue Value: Germinating Seeds
  misc_feature: MA Experiment ID: 108463 Result: Down-regulated in Transcription
  misc_feature: MA Experiment 108463 PARAMETER Experiment Name: At_Germinating_Seeds_cDNA_P Parameter: Age (day) Value: 3 vs. 0
  misc_feature: MA Experiment 108463 PARAMETER Experiment Name: At_Germinating_Seeds_cDNA_P Parameter: Tissue Value: Germinating Seeds
  misc_feature: MA Experiment ID: 108464 Result: Down-regulated in Transcription
  misc_feature: MA Experiment 108464 PARAMETER Experiment Name: At_Germinating_Seeds_cDNA_P Parameter: Age (day) Value: 4 vs. 0
  misc_feature: MA Experiment 108464 PARAMETER Experiment Name: At_Germinating_Seeds_cDNA_P Parameter: Tissue Value: Germinating Seeds
  misc_feature: MA Experiment ID: 108488 Result: Down-regulated in Transcription
  misc_feature: MA Experiment ID: 108572 Result: Down-regulated in Transcription
  misc_feature: MA Experiment 108572 PARAMETER Experiment Name: At_Drought_cDNA_P Parameter: Timepoint (hr) Value: 1
  misc_feature: MA Experiment 108572 PARAMETER Experiment Name: At_Drought_cDNA_P Parameter: Tissue Value: Aerial
  misc_feature: MA Experiment 108572 PARAMETER Experiment Name: At_Drought_cDNA_P Parameter: Treatment Value: Drought vs. No Drought
  misc_feature: MA Experiment ID: 108574 Result: Down-regulated in Transcription
  misc_feature: MA Experiment 108574 PARAMETER Experiment Name: At_Wounding__cDNA_P Parameter: Timepoint (hr) Value: 1
  misc_feature: MA Experiment 108574 PARAMETER Experiment Name: At_Wounding__cDNA_P Parameter: Tissue Value: Aerial
  misc_feature: MA Experiment 108574 PARAMETER Experiment Name: At_Wounding__cDNA_P Parameter: Treatment Value: Wounding vs. No Wounding
  misc_feature: MA Experiment ID: 108577 Result: Down-regulated in Transcription
  misc_feature: MA Experiment 108577 PARAMETER Experiment Name: At_42deg_Heat_cDNA_P Parameter: Temperature (deg C) Value: 42 vs. 22
  misc_feature: MA Experiment 108577 PARAMETER Experiment Name: At_42deg_Heat_cDNA_P Parameter: Timepoint (hr) Value: 6
  misc_feature: MA Experiment 108577 PARAMETER Experiment Name: At_42deg_Heat_cDNA_P Parameter: Tissue Value: Aerial
  misc_feature: MA Experiment ID: 108607 Result: Down-regulated in Transcription
  misc_feature: MA Experiment 108607 PARAMETER Experiment Name: At_100uM_ABA_cDNA_P Parameter: Timepoint (hr) Value: 4
  misc_feature: MA Experiment 108607 PARAMETER Experiment Name: At_100uM_ABA_cDNA_P Parameter: Tissue Value: Aerial
  misc_feature: MA Experiment 108607 PARAMETER Experiment Name: At_100uM_ABA_cDNA_P Parameter: Treatment Value: 100uM ABA vs. No Treatment
  misc_feature: MA Experiment ID: 20000069 Result: Up-regulated in Transcription
  misc_feature: MA Experiment 20000069 PARAMETER Experiment Name: At_100uM_ABA_Mutants_cDNA_P Parameter: Plant Line Value: CS23
  misc_feature: MA Experiment 20000069 PARAMETER Experiment Name: At_100uM_ABA_Mutants_cDNA_P Parameter: Timepoint (hr) Value: 6
  misc_feature: MA Experiment 20000069 PARAMETER Experiment Name: At_100uM_ABA_Mutants_cDNA_P Parameter: Tissue Value: Aerial
  misc_feature: MA Experiment 20000069 PARAMETER Experiment Name: At_100uM_ABA_Mutants_cDNA_P Parameter: Treatment Value: 100uM ABA vs. No Treatment
  misc_feature: MA Experiment ID: 20000070 Result: Up-regulated in Transcription
  misc_feature: MA Experiment 20000070 PARAMETER Experiment Name: At_100uM_ABA_Mutants_cDNA_P Parameter: Plant Line Value: CS24
  misc_feature: MA Experiment 20000070 PARAMETER Experiment Name: At_100uM_ABA_Mutants_cDNA_P Parameter: Timepoint (hr) Value: 6
  misc_feature: MA Experiment 20000070 PARAMETER Experiment Name: At_100uM_ABA_Mutants_cDNA_P Parameter: Tissue Value: Aerial
  misc_feature: MA Experiment 20000070 PARAMETER Experiment Name: At_100uM_ABA_Mutants_cDNA_P Parameter: Treatment Value: 100uM ABA vs. No Treatment
  misc_feature: MA Experiment ID: 20000071 Result: Up-regulated in Transcription
  misc_feature: MA Experiment 20000071 PARAMETER Experiment Name: At_100uM_ABA_Mutants_cDNA_P Parameter: Plant Line Value: CS8104
  misc_feature: MA Experiment 20000071 PARAMETER Experiment Name: At_100uM_ABA_Mutants_cDNA_P Parameter: Timepoint (hr) Value: 6
  misc_feature: MA Experiment 20000071 PARAMETER Experiment Name: At_100uM_ABA_Mutants_cDNA_P Parameter: Tissue Value: Aerial
  misc_feature: MA Experiment 20000071 PARAMETER Experiment Name: At_100uM_ABA_Mutants_cDNA_P Parameter: Treatment Value: 100uM ABA vs. No Treatment
  misc_feature: MA Experiment ID: 20000087 Result: Up-regulated in Transcription
  misc_feature: MA Experiment 20000087 PARAMETER Experiment Name: At_100uM_ABA_Mutants_cDNA_P Parameter: Plant Line Value: WS
  misc_feature: MA Experiment 20000087 PARAMETER Experiment Name: At_100uM_ABA_Mutants_cDNA_P Parameter: Timepoint (hr) Value: 6
  misc_feature: MA Experiment 20000087 PARAMETER Experiment Name: At_100uM_ABA_Mutants_cDNA_P Parameter: Tissue Value: Aerial
  misc_feature: MA Experiment 20000087 PARAMETER Experiment Name: At_100uM_ABA_Mutants_cDNA_P Parameter: Treatment Value: 100uM ABA vs. No Treatment
  misc_feature: MA Experiment ID: 20000089 Result: Up-regulated in Transcription
  misc_feature: MA Experiment ID: 20000090 Result: Up-regulated in Transcription
  misc_feature: MA Experiment ID: 20000117 Result: Up-regulated in Transcription
  misc_feature: MA Experiment 20000117 PARAMETER Experiment Name: At_100uM_ABA_Mutants_cDNA_P Parameter: Plant Line Value: Columbia
  misc_feature: MA Experiment 20000117 PARAMETER Experiment Name: At_100uM_ABA_Mutants_cDNA_P Parameter: Timepoint (hr) Value: 6
  misc_feature: MA Experiment 20000117 PARAMETER Experiment Name: At_100uM_ABA_Mutants_cDNA_P Parameter: Tissue Value: Aerial
  misc_feature: MA Experiment 20000117 PARAMETER Experiment Name: At_100uM_ABA_Mutants_cDNA_P Parameter: Treatment Value: 100uM ABA vs. No Treatment
  misc_feature: MA Experiment ID: 20000213 Result: Up-regulated in Transcription
  misc_feature: MA Experiment 20000213 PARAMETER Experiment Name: At_4deg_Cold_P Parameter: Timepoint (hr) Value: 2
  misc_feature: MA Experiment ID: 20000224 Result: Down-regulated in Transcription
  misc_feature: MA Experiment ID: 20000437 Result: Up-regulated in Transcription
  misc_feature: MA Experiment 20000437 PARAMETER Experiment Name: At_Drought_P Parameter: Age (day) Value: 8
  misc_feature: MA Experiment 20000437 PARAMETER Experiment Name: At_Drought_P Parameter: Organism Value: A. thaliana
  misc_feature: MA Experiment 20000437 PARAMETER Experiment Name: At_Drought_P Parameter: Plant Line Value: WS
  misc_feature: MA Experiment 20000437 PARAMETER Experiment Name: At_Drought_P Parameter: Timepoint (hr) Value: 24
  misc_feature: MA Experiment 20000437 PARAMETER Experiment Name: At_Drought_P Parameter: Tissue Value: Whole Plant
  misc_feature: MA Experiment 20000437 PARAMETER Experiment Name: At_Drought_P Parameter: Treatment Value: Drought vs. No Drought
  misc_feature: MA Experiment ID: 20000438 Result: Down-regulated in Transcription
  misc_feature: MA Experiment 20000438 PARAMETER Experiment Name: At_Shoots__P Parameter: Age (day) Value: 14
  misc_feature: MA Experiment 20000438 PARAMETER Experiment Name: At_Shoots__P Parameter: Tissue Value: Shoots vs. Whole Plant
  misc_feature: MA Experiment ID: 20001451 Result: Up-regulated in Transcription
  misc_feature: MA Experiment 20001451 PARAMETER Experiment Name: At_Far-red-induction_P Parameter: Age (day) Value: 7
  misc_feature: MA Experiment 20001451 PARAMETER Experiment Name: At_Far-red-induction_P Parameter: Light Value: Far-red vs. White
  misc_feature: MA Experiment 20001451 PARAMETER Experiment Name: At_Far-red-induction_P Parameter: Organism Value: A. thaliana
  misc_feature: MA Experiment 20001451 PARAMETER Experiment Name: At_Far-red-induction_P Parameter: Plant Line Value: Columbia
  misc_feature: MA Experiment 20001451 PARAMETER Experiment Name: At_Far-red-induction_P Parameter: Timepoint (hr) Value: 24
  misc_feature: MA Experiment 20001451 PARAMETER Experiment Name: At_Far-red-induction_P Parameter: Tissue Value: Whole Plant
  misc_feature: MA Experiment ID: 20001557 Result: Up-regulated in Transcription
  misc_feature: MA Experiment 20001557 PARAMETER Experiment Name: At_Drought_Soil_Dry_P Parameter: Age (day) Value: 27
  misc_feature: MA Experiment 20001557 PARAMETER Experiment Name: At_Drought_Soil_Dry_P Parameter: Organism Value: A. thaliana
  misc_feature: MA Experiment 20001557 PARAMETER Experiment Name: At_Drought_Soil_Dry_P Parameter: Plant Line Value: WS
  misc_feature: MA Experiment 20001557 PARAMETER Experiment Name: At_Drought_Soil_Dry_P Parameter: Post Timepoint (hr) Value: 3
  misc_feature: MA Experiment 20001557 PARAMETER Experiment Name: At_Drought_Soil_Dry_P Parameter: Post-Treatment Value: Re-Water vs. No Drought
  misc_feature: MA Experiment 20001557 PARAMETER Experiment Name: At_Drought_Soil_Dry_P Parameter: Timepoint (day) Value: 13
  misc_feature: MA Experiment 20001557 PARAMETER Experiment Name: At_Drought_Soil_Dry_P Parameter: Treatment Value: Drought vs. No Drought
  misc_feature: Phenotype: WHOLE PLANT Color-Dark Green
  misc_feature: Phenotype: FLOWERS Other
  misc_feature: Phenotype: FERTILITY Fertility-Reduced
  misc_feature: Phenotype: ROSETTE LEAVES Shape-Lanceolate
  misc_feature: Phenotype: WHOLE PLANT Color-Dark Green
  misc_feature: Phenotype: WHOLE PLANT Color-Dark Green
  misc_feature: Phenotype: WHOLE PLANT Size-Small
  misc_feature: Phenotype: INFLORESCENCE Strength-Weak
  misc_feature: Phenotype: FERTILITY Fertility-Reduced
  misc_feature: Phenotype: WHOLE PLANT Color-Dark Green
  misc_feature: Phenotype: WHOLE PLANT Color-Dark Green
  misc_feature: Phenotype: WHOLE PLANT Size-Small
aacacatctcactgctcactactctcactgtaatcccttagatcttcttttcaaatttcaatggcgtccggtgatgttgagtatcggtgcttcgttggaggtctagcatgggccactgatgacagagctcttgagactgccttcgctcaatacggcgacgttattgattccaagatcattaacgatcgtgagactggaagatcaaggggattcggattcgtcaccttcaaggatgagaaagccatgaaggatgcgattgagggaatgaacggacaagatctcgatggccgtagcatcactgttaacgaggctcagtcacgaggaagcggtggcggcggaggccaccgtggaggtggtggcggtggtggaggttactccggtggaggtggtagctacggaggtggcggcggtagacgcgagggtggaggaggatacagcggcggcggcggttactcctcaagaggtggtggtggcggaagctacggtggtggaagacgtgagggaggaggaggatacggtggtggtgaaggaggaggttacggaggaagcggtggtggtggaggatggtaattcctttaattaggtttgggattaccaatgaatgttctctctctcgcttgttatgcttctactttgttttgtgtgttctctattttgttctggttctgctttagatttgatgtaacagttcgtgattaggtattttggtatctgg

SEQ ID NO: 38230 - protein, 169 aa, Arabidopsis thaliana
  peptide (1)..(169): Ceres Seq. ID no. 13495873
  misc_feature (10)..(81): Pfam Name: RNA recognition motif. (a.k.a. RRM, RBD, or RNP domain) Pfam Description: RNA recognition motif. (a.k.a. RRM, RBD, or RNP
  misc_feature (1)..(169): Homolog of NCBI NO: 544423 NR Description: Glycine-rich RNA-binding protein 2
  misc_feature (1)..(169): Homolog of NCBI NO: 10799202 NR Description: glycine-rich RNA-binding protein [Sorghum bicolor]
  misc_feature (5)..(169): Homolog of NCBI NO: 15235002 NR Description: glycine-rich RNA-binding protein 8 (GRP8) (CCR1)
  misc_feature (5)..(169): Homolog of NCBI NO: 544416 NR Description: Glycine-rich RNA-binding protein 10
  misc_feature (1)..(169): Homolog of NCBI NO: 34851124 NR Description: putative glycine-rich RNA-binding protein [Prunus
  misc_feature (1)..(169): Homolog of NCBI NO: 1346180 NR Description: Glycine-rich RNA-binding protein GRP1A
  misc_feature (1)..(169): Homolog of NCBI NO: 1346181 NR Description: Glycine-rich RNA-binding protein GRP2A
  misc_feature (1)..(169): Homolog of NCBI NO: 30681492 NR Description: glycine-rich RNA-binding protein (AtGRP7)
  misc_feature (1)..(169): Homolog of NCBI NO: 15226605 NR Description: glycine-rich RNA-binding protein (AtGRP7)
  misc_feature (1)..(169): Homolog of NCBI NO: 21553354 NR Description: glycine-rich RNA binding protein 7 [Arabidopsis
MASGDVEYRCFVGGLAWATDDRALETAFAQYGDVIDSKIINDRETGRSRGFGFVTFKDEKAMKDAIEGMNGQDLDGRSITVNEAQSRGSGGGGGHRGGGGGGGGYSGGGGSYGGGGGRREGGGGYSGGGGYSSRGGGGGSYGGGRREGGGGYGGGEGGGYGGSGGGGGW

SEQ ID NO: 38231 - protein, 108 aa, Arabidopsis thaliana
  peptide (1)..(108): Ceres Seq. ID no. 13495874
  misc_feature (28)..(106): Pfam Name: Herpesvirus latent membrane protein 1 (LMP1) Pfam Description: Herpesvirus latent membrane protein 1 (LMP1)
  misc_feature (1)..(108): Homolog of NCBI NO: 544423 NR Description: Glycine-rich RNA-binding protein 2
  misc_feature (1)..(108): Homolog of NCBI NO: 10799202 NR Description: glycine-rich RNA-binding protein [Sorghum bicolor]
  misc_feature (1)..(108): Homolog of NCBI NO: 15235002 NR Description: glycine-rich RNA-binding protein 8 (GRP8) (CCR1)
  misc_feature (1)..(108): Homolog of NCBI NO: 544416 NR Description: Glycine-rich RNA-binding protein 10
  misc_feature (1)..(108): Homolog of NCBI NO: 34851124 NR Description: putative glycine-rich RNA-binding protein [Prunus
  misc_feature (1)..(108): Homolog of NCBI NO: 1346180 NR Description: Glycine-rich RNA-binding protein GRP1A
  misc_feature (1)..(108): Homolog of NCBI NO: 1346181 NR Description: Glycine-rich RNA-binding protein GRP2A
  misc_feature (1)..(108): Homolog of NCBI NO: 30681492 NR Description: glycine-rich RNA-binding protein (AtGRP7)
  misc_feature (1)..(108): Homolog of NCBI NO: 15226605 NR Description: glycine-rich RNA-binding protein (AtGRP7)
  misc_feature (1)..(108): Homolog of NCBI NO: 21553354 NR Description: glycine-rich RNA binding protein 7 [Arabidopsis
MKDAIEGMNGQDLDGRSITVNEAQSRGSGGGGGHRGGGGGGGGYSGGGGSYGGGGGRREGGGGYSGGGGYSSRGGGGGSYGGGRREGGGGYGGGEGGGYGGSGGGGGW

SEQ ID NO: 38232 - protein, 101 aa, Arabidopsis thaliana
  peptide (1)..(101): Ceres Seq. ID no. 13495875
  misc_feature (21)..(99): Pfam Name: Herpesvirus latent membrane protein 1 (LMP1) Pfam Description: Herpesvirus latent membrane protein 1 (LMP1)
  misc_feature (1)..(101): Homolog of NCBI NO: 544423 NR Description: Glycine-rich RNA-binding protein 2
  misc_feature (1)..(101): Homolog of NCBI NO: 10799202 NR Description: glycine-rich RNA-binding protein [Sorghum bicolor]
  misc_feature (1)..(101): Homolog of NCBI NO: 15235002 NR Description: glycine-rich RNA-binding protein 8 (GRP8) (CCR1)
  misc_feature (1)..(101): Homolog of NCBI NO: 544416 NR Description: Glycine-rich RNA-binding protein 10
  misc_feature (1)..(101): Homolog of NCBI NO: 34851124 NR Description: putative glycine-rich RNA-binding protein [Prunus
  misc_feature (1)..(101): Homolog of NCBI NO: 1346180 NR Description: Glycine-rich RNA-binding protein GRP1A
  misc_feature (1)..(101): Homolog of NCBI NO: 1346181 NR Description: Glycine-rich RNA-binding protein GRP2A
  misc_feature (1)..(101): Homolog of NCBI NO: 30681492 NR Description: glycine-rich RNA-binding protein (AtGRP7)
  misc_feature (1)..(101): Homolog of NCBI NO: 15226605 NR Description: glycine-rich RNA-binding protein (AtGRP7)
  misc_feature (1)..(101): Homolog of NCBI NO: 21553354 NR Description: glycine-rich RNA binding protein 7 [Arabidopsis
MNGQDLDGRSITVNEAQSRGSGGGGGHRGGGGGGGGYSGGGGSYGGGGGRREGGGGYSGGGGYSSRGGGGGSYGGGRREGGGGYGGGEGGGYGGSGGGGGW

SEQ ID NO: 38233 - DNA, 2057 bp, Arabidopsis thaliana
  misc_feature (1)..(2057): Ceres Seq. ID no. 12323113
  misc_feature: MA Experiment ID: 20000495 Result: Up-regulated in Transcription
  misc_feature: MA Experiment 20000495 PARAMETER Experiment Name: At_Guard_Cells_P Parameter: Harvest Date Value: 8/2/2002
  misc_feature: MA Experiment 20000495 PARAMETER Experiment Name: At_Guard_Cells_P Parameter: Organism Value: A. thaliana
  misc_feature: MA Experiment 20000495 PARAMETER Experiment Name: At_Guard_Cells_P Parameter: Tissue Value: Guard Cells vs. Leaves
acgttccgacaagacccaaatagacacagcacacaagacccaaatcgaagataggattcgcgtttatgttggtgtccgtaacctaaaaagacattctagagtgattgagatcgagagaaggaaagagagagtgagagagaaatctgggtttcttgaagctgttgtgaggatcttgttatgggtggttttattacaaaggcttgagctttttatcttcaaaccccagttttcaaacagagagaagtttttgggttaatctagtgagaatttaaagaaaatatatatagaagatggttgcaagaaccccacagaagcagaggaaagtggcgatggtggtgcctcctctcaactcagatcttctcaaggaaacgatcaacaaggttgataaatgtatggaaagactgcaagagctacagtacacaattgcaggaggaaccaaagttgtctctggtgtgaaccttagccctcgaagcactagaatttacttgaagactagtcttagatgcaagcaagaaactttaaggatcaagaatgctactaataagaaatctccagtagggaagtttcctgcttcctcaccaggagattggaggaaaatgtcactcccagcaatgctactaggagagactgtaaatgaaatcttacaagcctcacaggtcacaagagacattgtggacgccatagcaccaaagaagagtagaaagtccaggagattaacaatgtcacaagaagacgatggccctaaaacacccgagacacaacaaaaatcccgggaacagaatcctgaaactgtcagtagcaatatcaaagcaagaaggaagaaagagaagcagaacagacgatcagaatcagattctcctccatctctacaaagggcacgctcaagaattgcgttcagaaccatctctccacaagtaaagggaaataatggtgagaatagttttcggcatttggccaacagggtttcaccaaagcacaaaccttgggttaaaaaggcggttctttttccgaaccctctatttatttccggtaccgctacacaacaagcaaagttcagtagaacaatgtctccggtcatagccagaaatgagatatccagcatcaagaacaataaagaaacgccttacaagttcttaatcaaatctcctcccacatcagcatctaagtttcaggtcaagatcaggagcccacctaaggtcttggtttctcctacaagaaatggcagtaactcggttcggaagtcacctagaggctccaggtctccgacaagaactgttaacttaggaaagaagtcagcgtcgatttctcctattagaaatacgggaaagaggtctccaaagctatcaactgctgctaagctcagaagatcatttactcctacgagaaatggcagtaacttggctcgtaagtcgtctatttctccgaaaagagtcacacttcaagcatttctttctccaacaagaaatggtaacttttgtaagaagtcacccaaagcttcgatttctccaactagggtgtgcaacaagtcgcagaagctgtcaacggctgcaaagttcaggaggtcattttcgccatcgagactagctatgagggctgatgagatcactatgttccatggctcaaaagcaccatcgttaagcatttatcgttacacagaaagaatccataggtatgctcagtgtagccctgtgtgtttcgttgcagcttttgcctacatccttagatatctacagagaccagaggctaccagtacggctcgtcgtctcacatcactcaacgttcatcgccttctcatcaccagtctcttggtcgcagcaaaattcttggaacgccagtgttataacaacgcatattatgcaaaaatcggaggagtgagcactgaagagatgaataggctggagagaacgttcttggttgatgttgatttcaggctatatattacaacggagactttcgagaaacactgtctcatgttgcagaaagaaacggtgccttgtgattcaagaaaacttagaacagttcttggagagatagcttgtagctgccaagcgatttga

SEQ ID NO: 38234 - protein, 588 aa, Arabidopsis thaliana
  peptide (1)..(588): Ceres Seq. ID no. 12323114
  misc_feature (428)..(549): Pfam Name: Cyclin, N-terminal domain Pfam Description: Cyclin, N-terminal domain
  misc_feature (427)..(565): Homolog of NCBI NO: 14140116 NR Description: PREG-like protein [Oryza sativa]
  misc_feature (435)..(565): Homolog of NCBI NO: 37536902 NR Description: hypothetical protein [Oryza sativa (japonica
  misc_feature (436)..(565): Homolog of NCBI NO: 21593009 NR Description: unknown [Arabidopsis thaliana]
  misc_feature (436)..(565): Homolog of NCBI NO: 15229382 NR Description: putative protein
  misc_feature (398)..(567): Homolog of NCBI NO: 15240794 NR Description: putative protein; protein id: At5g07450.1
  misc_feature (430)..(565): Homolog of NCBI NO: 15224950 NR Description: putative PREG1-like negative regulator; protein
  misc_feature (425)..(565): Homolog of NCBI NO: 25493992 NR Description: PREG-like protein [imported] - Picea mariana
  misc_feature (1)..(360): Homolog of NCBI NO: 11228986 NR Description: microtubule-binding protein TANGLED1 [Zea mays]
  misc_feature (1)..(434): Homolog of NCBI NO: 30679470 NR Description: cyclin-related [Arabidopsis thaliana]
  misc_feature (1)..(588): Homolog of NCBI NO: 6729043 NR Description: hypothetical protein [Arabidopsis thaliana]
MVARTPQKQRKVAMVVPPLNSDLLKETINKVDKCMERLQELQYTIAGGTKVVSGVNLSPRSTRIYLKTSLRCKQETLRIKNATNKKSPVGKFPASSPGDWRKMSLPAMLLGETVNEILQASQVTRDIVDAIAPKKSRKSRRLTMSQEDDGPKTPETQQKSREQNPETVSSNIKARRKKEKQNRRSESDSPPSLQRARSRIAFRTISPQVKGNNGENSFRHLANRVSPKHKPWVKKAVLFPNPLFISGTATQQAKFSRTMSPVIARNEISSIKNNKETPYKFLIKSPPTSASKFQVKIRSPPKVLVSPTRNGSNSVRKSPRGSRSPTRTVNLGKKSASISPIRNTGKRSPKLSTAAKLRRSFTPTRNGSNLARKSSISPKRVTLQAFLSPTRNGNFCKKSPKASISPTRVCNKSQKLSTAAKFRRSFSPSRLAMRADEITMFHGSKAPSLSIYRYTERIHRYAQCSPVCFVAAFAYILRYLQRPEATSTARRLTSLNVHRLLITSLLVAAKFLERQCYNNAYYAKIGGVSTEEMNRLERTFLVDVDFRLYITTETFEKHCLMLQKETVPCDSRKLRTVLGEIACSCQAI

SEQ ID NO: 38235 - protein, 575 aa, Arabidopsis thaliana
  peptide (1)..(575): Ceres Seq. ID no. 12323115
  misc_feature (415)..(536): Pfam Name: Cyclin, N-terminal domain Pfam Description: Cyclin, N-terminal domain
  misc_feature (414)..(552): Homolog of NCBI NO: 14140116 NR Description: PREG-like protein [Oryza sativa]
  misc_feature (422)..(552): Homolog of NCBI NO: 37536902 NR Description: hypothetical protein [Oryza sativa (japonica
  misc_feature (423)..(552): Homolog of NCBI NO: 21593009 NR Description: unknown [Arabidopsis thaliana]
  misc_feature (423)..(552): Homolog of NCBI NO: 15229382 NR Description: putative protein
  misc_feature (385)..(554): Homolog of NCBI NO: 15240794 NR Description: putative protein; protein id: At5g07450.1
  misc_feature (417)..(552): Homolog of NCBI NO: 15224950 NR Description: putative PREG1-like negative regulator; protein
  misc_feature (412)..(552): Homolog of NCBI NO: 25493992 NR Description: PREG-like protein [imported] - Picea mariana
  misc_feature (1)..(347): Homolog of NCBI NO: 11228986 NR Description: microtubule-binding protein TANGLED1 [Zea mays]
  misc_feature (1)..(421): Homolog of NCBI NO: 30679470 NR Description: cyclin-related [Arabidopsis thaliana]
  misc_feature (1)..(575): Homolog of NCBI NO: 6729043 NR Description: hypothetical protein [Arabidopsis thaliana]
MVVPPLNSDLLKETINKVDKCMERLQELQYTIAGGTKVVSGVNLSPRSTRIYLKTSLRCKQETLRIKNATNKKSPVGKFPASSPGDWRKMSLPAMLLGETVNEILQASQVTRDIVDAIAPKKSRKSRRLTMSQEDDGPKTPETQQKSREQNPETVSSNIKARRKKEKQNRRSESDSPPSLQRARSRIAFRTISPQVKGNNGENSFRHLANRVSPKHKPWVKKAVLFPNPLFISGTATQQAKFSRTMSPVIARNEISSIKNNKETPYKFLIKSPPTSASKFQVKIRSPPKVLVSPTRNGSNSVRKSPRGSRSPTRTVNLGKKSASISPIRNTGKRSPKLSTAAKLRRSFTPTRNGSNLARKSSISPKRVTLQAFLSPTRNGNFCKKSPKASISPTRVCNKSQKLSTAAKFRRSFSPSRLAMRADEITMFHGSKAPSLSIYRYTERIHRYAQCSPVCFVAAFAYILRYLQRPEATSTARRLTSLNVHRLLITSLLVAAKFLERQCYNNAYYAKIGGVSTEEMNRLERTFLVDVDFRLYITTETFEKHCLMLQKETVPCDSRKLRTVLGEIACSCQAI

SEQ ID NO: 38236 - protein, 554 aa, Arabidopsis thaliana
  peptide (1)..(554): Ceres Seq. ID no. 12323116
  misc_feature (394)..(515): Pfam Name: Cyclin, N-terminal domain Pfam Description: Cyclin, N-terminal domain
  misc_feature (393)..(531): Homolog of NCBI NO: 14140116 NR Description: PREG-like protein [Oryza sativa]
  misc_feature (401)..(531): Homolog of NCBI NO: 37536902 NR Description: hypothetical protein [Oryza sativa (japonica
  misc_feature (402)..(531): Homolog of NCBI NO: 21593009 NR Description: unknown [Arabidopsis thaliana]
  misc_feature (402)..(531): Homolog of NCBI NO: 15229382 NR Description: putative protein
  misc_feature (364)..(533): Homolog of NCBI NO: 15240794 NR Description: putative protein; protein id: At5g07450.1
  misc_feature (396)..(531): Homolog of NCBI NO: 15224950 NR Description: putative PREG1-like negative regulator; protein
  misc_feature (391)..(531): Homolog of NCBI NO: 25493992 NR Description: PREG-like protein [imported] - Picea mariana
  misc_feature (1)..(326): Homolog of NCBI NO: 11228986 NR Description: microtubule-binding protein TANGLED1 [Zea mays]
  misc_feature (1)..(400): Homolog of NCBI NO: 30679470 NR Description: cyclin-related [Arabidopsis thaliana]
  misc_feature (1)..(554): Homolog of NCBI NO: 6729043 NR Description: hypothetical protein [Arabidopsis thaliana]
MERLQELQYTIAGGTKVVSGVNLSPRSTRIYLKTSLRCKQETLRIKNATNKKSPVGKFPASSPGDWRKMSLPAMLLGETVNEILQASQVTRDIVDAIAPKKSRKSRRLTMSQEDDGPKTPETQQKSREQNPETVSSNIKARRKKEKQNRRSESDSPPSLQRARSRIAFRTISPQVKGNNGENSFRHLANRVSPKHKPWVKKAVLFPNPLFISGTATQQAKFSRTMSPVIARNEISSIKNNKETPYKFLIKSPPTSASKFQVKIRSPPKVLVSPTRNGSNSVRKSPRGSRSPTRTVNLGKKSASISPIRNTGKRSPKLSTAAKLRRSFTPTRNGSNLARKSSISPKRVTLQAFLSPTRNGNFCKKSPKASISPTRVCNKSQKLSTAAKFRRSFSPSRLAMRADEITMFHGSKAPSLSIYRYTERIHRYAQCSPVCFVAAFAYILRYLQRPEATSTARRLTSLNVHRLLITSLLVAAKFLERQCYNNAYYAKIGGVSTEEMNRLERTFLVDVDFRLYITTETFEKHCLMLQKETVPCDSRKLRTVLGEIACSCQAI

SEQ ID NO: 38237 - DNA, 1290 bp, Arabidopsis thaliana; identical to SEQ ID NO: 30749
  misc_feature (1)..(1290): Ceres Seq. ID no. 13576771
  misc_feature: MA Experiment ID: 20000072 Result: Down-regulated in Transcription
  misc_feature: MA Experiment 20000072 PARAMETER Experiment Name: At_100uM_ABA_Mutants_cDNA_P Parameter: Plant Line Value: CS8105
  misc_feature: MA Experiment 20000072 PARAMETER Experiment Name: At_100uM_ABA_Mutants_cDNA_P Parameter: Timepoint (hr) Value: 6
  misc_feature: MA Experiment 20000072 PARAMETER Experiment Name: At_100uM_ABA_Mutants_cDNA_P Parameter: Tissue Value: Aerial
  misc_feature: MA Experiment 20000072 PARAMETER Experiment Name: At_100uM_ABA_Mutants_cDNA_P Parameter: Treatment Value: 100uM ABA vs. No Treatment
  misc_feature: MA Experiment ID: 20000086 Result: Down-regulated in Transcription
  misc_feature: MA Experiment 20000086 PARAMETER Experiment Name: At_100uM_ABA_Mutants_cDNA_P Parameter: Plant Line Value: CS22
  misc_feature: MA Experiment 20000086 PARAMETER Experiment Name: At_100uM_ABA_Mutants_cDNA_P Parameter: Timepoint (hr) Value: 6
  misc_feature: MA Experiment 20000086 PARAMETER Experiment Name: At_100uM_ABA_Mutants_cDNA_P Parameter: Tissue Value: Aerial
  misc_feature: MA Experiment 20000086 PARAMETER Experiment Name: At_100uM_ABA_Mutants_cDNA_P Parameter: Treatment Value: 100uM ABA vs. No Treatment
  misc_feature: MA Experiment ID: 20000087 Result: Down-regulated in Transcription
  misc_feature: MA Experiment 20000087 PARAMETER Experiment Name: At_100uM_ABA_Mutants_cDNA_P Parameter: Plant Line Value: WS
  misc_feature: MA Experiment 20000087 PARAMETER Experiment Name: At_100uM_ABA_Mutants_cDNA_P Parameter: Timepoint (hr) Value: 6
  misc_feature: MA Experiment 20000087 PARAMETER Experiment Name: At_100uM_ABA_Mutants_cDNA_P Parameter: Tissue Value: Aerial
  misc_feature: MA Experiment 20000087 PARAMETER Experiment Name: At_100uM_ABA_Mutants_cDNA_P Parameter: Treatment Value: 100uM ABA vs. No Treatment
  misc_feature: MA Experiment ID: 20000437 Result: Down-regulated in Transcription
  misc_feature: MA Experiment 20000437 PARAMETER Experiment Name: At_Drought_P Parameter: Age (day) Value: 8
  misc_feature: MA Experiment 20000437 PARAMETER Experiment Name: At_Drought_P Parameter: Organism Value: A. thaliana
  misc_feature: MA Experiment 20000437 PARAMETER Experiment Name: At_Drought_P Parameter: Plant Line Value: WS
  misc_feature: MA Experiment 20000437 PARAMETER Experiment Name: At_Drought_P Parameter: Timepoint (hr) Value: 24
  misc_feature: MA Experiment 20000437 PARAMETER Experiment Name: At_Drought_P Parameter: Tissue Value: Whole Plant
  misc_feature: MA Experiment 20000437 PARAMETER Experiment Name: At_Drought_P Parameter: Treatment Value: Drought vs. No Drought

SEQ ID NO: 38238 - protein, 265 aa, Arabidopsis thaliana; identical to SEQ ID NO: 30750
  peptide (1)..(265): Ceres Seq. ID no. 13576772
  misc_feature (77)..(215): Pfam Name: Vesicle transport v-SNARE protein Pfam Description: Vesicle transport v-SNARE protein
  misc_feature (77)..(215): Pfam Name: Vesicle transport v-SNARE protein Pfam Description: Vesicle transport v-SNARE protein
  misc_feature (1)..(94): Homolog of NCBI NO: 25370781 NR Description: F11A17.20 [imported] - Arabidopsis thaliana
  misc_feature (7)..(262): Homolog of NCBI NO: 25370780 NR Description: hypothetical protein At2g35190 [imported] -
  misc_feature (7)..(262): Homolog of NCBI NO: 27805643 NR Description: Novel plant SNARE 11 (AtNPSN11)
  misc_feature (7)..(262): Homolog of NCBI NO: 18403771 NR Description: expressed protein [Arabidopsis thaliana]
  misc_feature (17)..(265): Homolog of NCBI NO: 25370781 NR Description: F11A17.20 [imported] - Arabidopsis thaliana
  misc_feature (1)..(94): Homolog of NCBI NO: 25370781 NR Description: F11A17.20 [imported] - Arabidopsis thaliana
  misc_feature (7)..(262): Homolog of NCBI NO: 27805643 NR Description: Novel plant SNARE 11 (AtNPSN11)
  misc_feature (17)..(265): Homolog of NCBI NO: 25370781 NR Description: F11A17.20 [imported] - Arabidopsis thaliana
  misc_feature (1)..(265): Homolog of NCBI NO: 22330102 NR Description: expressed protein [Arabidopsis thaliana]
  misc_feature (1)..(264): Homolog of NCBI NO: 18401508 NR Description: expressed protein [Arabidopsis thaliana]
  misc_feature (1)..(264): Homolog of NCBI NO: 21536876 NR Description: unknown [Arabidopsis thaliana]
  misc_feature (1)..(261): Homolog of NCBI NO: 23237830 NR Description: contains ESTs
  misc_feature (1)..(257): Homolog of NCBI NO: 34896946 NR Description: putative vesicle soluble NSF attachment protein
  misc_feature (7)..(262): Homolog of NCBI NO: 18403771 NR Description: expressed protein [Arabidopsis thaliana]
  misc_feature (7)..(262): Homolog of NCBI NO: 25370780 NR Description: hypothetical protein At2g35190 [imported] -
  misc_feature (1)..(257): Homolog of NCBI NO: 34896946 NR Description: putative vesicle soluble NSF attachment protein
  misc_feature (1)..(261): Homolog of NCBI NO: 23237830 NR Description: contains ESTs
  misc_feature (1)..(264): Homolog of NCBI NO: 21536876 NR Description: unknown [Arabidopsis thaliana]
  misc_feature (1)..(264): Homolog of NCBI NO: 18401508 NR Description: expressed protein [Arabidopsis thaliana]
  misc_feature (1)..(265): Homolog of NCBI NO: 22330102 NR Description: expressed protein [Arabidopsis thaliana]

SEQ ID NO: 38239 - protein, 259 aa, Arabidopsis thaliana; identical to SEQ ID NO: 30751
  peptide (1)..(259): Ceres Seq. ID no. 13576773
  misc_feature (71)..(209): Pfam Name: Vesicle transport v-SNARE protein Pfam Description: Vesicle transport v-SNARE protein
  misc_feature (71)..(209): Pfam Name: Vesicle transport v-SNARE protein Pfam Description: Vesicle transport v-SNARE protein
  misc_feature (1)..(88): Homolog of NCBI NO: 25370781 NR Description: F11A17.20 [imported] - Arabidopsis thaliana
  misc_feature (1)..(256): Homolog of NCBI NO: 25370780 NR Description: hypothetical protein At2g35190 [imported] -
  misc_feature (1)..(256): Homolog of NCBI NO: 27805643 NR Description: Novel plant SNARE 11 (AtNPSN11)
  misc_feature (1)..(256): Homolog of NCBI NO: 18403771 NR Description: expressed protein [Arabidopsis thaliana]
  misc_feature (11)..(259): Homolog of NCBI NO: 25370781 NR Description: F11A17.20 [imported] - Arabidopsis thaliana
  misc_feature (1)..(88): Homolog of NCBI NO: 25370781 NR Description: F11A17.20 [imported] - Arabidopsis thaliana
  misc_feature (1)..(256): Homolog of NCBI NO: 27805643 NR Description: Novel plant SNARE 11 (AtNPSN11)
  misc_feature (11)..(259): Homolog of NCBI NO: 25370781 NR Description: F11A17.20 [imported] - Arabidopsis thaliana
  misc_feature (1)..(259): Homolog of NCBI NO: 22330102 NR Description: expressed protein [Arabidopsis thaliana]
  misc_feature (1)..(258): Homolog of NCBI NO: 18401508 NR Description: expressed protein [Arabidopsis thaliana]
  misc_feature (1)..(258): Homolog of NCBI NO: 21536876 NR Description: unknown [Arabidopsis thaliana]
  misc_feature (1)..(255): Homolog of NCBI NO: 23237830 NR Description: contains ESTs
  misc_feature (1)..(251): Homolog of NCBI NO: 34896946 NR Description: putative vesicle soluble NSF attachment protein
  misc_feature (1)..(256): Homolog of NCBI NO: 18403771 NR Description: expressed protein [Arabidopsis thaliana]
  misc_feature (1)..(256): Homolog of NCBI NO: 25370780 NR Description: hypothetical protein At2g35190 [imported] -
  misc_feature (1)..(251): Homolog of NCBI NO: 34896946 NR Description: putative vesicle soluble NSF attachment protein
  misc_feature (1)..(255): Homolog of NCBI NO: 23237830 NR Description: contains ESTs
  misc_feature (1)..(258): Homolog of NCBI NO: 21536876 NR Description: unknown [Arabidopsis thaliana]
  misc_feature (1)..(258): Homolog of NCBI NO: 18401508 NR Description: expressed protein [Arabidopsis thaliana]
  misc_feature (1)..(259): Homolog of NCBI NO: 22330102 NR Description: expressed protein [Arabidopsis thaliana]

SEQ ID NO: 38240 - protein, 214 aa, Arabidopsis thaliana; identical to SEQ ID NO: 30752
  peptide (1)..(214): Ceres Seq. ID no. 13576774
  misc_feature (26)..(164): Pfam Name: Vesicle transport v-SNARE protein Pfam Description: Vesicle transport v-SNARE protein
  misc_feature (26)..(164): Pfam Name: Vesicle transport v-SNARE protein Pfam Description: Vesicle transport v-SNARE protein
  misc_feature (1)..(43): Homolog of NCBI NO: 25370781 NR Description: F11A17.20 [imported] - Arabidopsis thaliana
  misc_feature (1)..(211): Homolog of NCBI NO: 25370780 NR Description: hypothetical protein At2g35190 [imported] -
  misc_feature (1)..(211): Homolog of NCBI NO: 27805643 NR Description: Novel plant SNARE 11 (AtNPSN11)
  misc_feature (1)..(211): Homolog of NCBI NO: 18403771 NR Description: expressed protein [Arabidopsis thaliana]
  misc_feature (1)..(214): Homolog of NCBI NO: 25370781 NR Description: F11A17.20 [imported] - Arabidopsis thaliana
  misc_feature (1)..(43): Homolog of NCBI NO: 25370781 NR Description: F11A17.20 [imported] - Arabidopsis thaliana
  misc_feature (1)..(211): Homolog of NCBI NO: 27805643 NR Description: Novel plant SNARE 11 (AtNPSN11)
  misc_feature (1)..(214): Homolog of NCBI NO: 25370781 NR Description: F11A17.20 [imported] - Arabidopsis thaliana
  misc_feature (1)..(214): Homolog of NCBI NO: 22330102 NR Description: expressed protein [Arabidopsis thaliana]
  misc_feature (1)..(213): Homolog of NCBI NO: 18401508 NR Description: expressed protein [Arabidopsis thaliana]
  misc_feature (1)..(213): Homolog of NCBI NO: 21536876 NR Description: unknown [Arabidopsis thaliana]
  misc_feature (1)..(210): Homolog of NCBI NO: 23237830 NR Description: contains ESTs
  misc_feature (1)..(206): Homolog of NCBI NO: 34896946 NR Description: putative vesicle soluble NSF attachment protein
  misc_feature (1)..(211): Homolog of NCBI NO: 18403771 NR Description: expressed protein [Arabidopsis thaliana]
  misc_feature (1)..(211): Homolog of NCBI NO: 25370780 NR Description: hypothetical protein At2g35190 [imported] -
  misc_feature (1)..(206): Homolog of NCBI NO: 34896946 NR Description: putative vesicle soluble NSF attachment protein
  misc_feature (1)..(210): Homolog of NCBI NO: 23237830 NR Description: contains ESTs
  misc_feature (1)..(213): Homolog of NCBI NO: 21536876 NR Description: unknown [Arabidopsis thaliana]
  misc_feature (1)..(213): Homolog of NCBI NO: 18401508 NR Description: expressed protein [Arabidopsis thaliana]
  misc_feature (1)..(214): Homolog of NCBI NO: 22330102 NR Description: expressed protein [Arabidopsis thaliana]

SEQ ID NO: 38241 - DNA, 1301 bp, Arabidopsis thaliana
  misc_feature (1)..(1301): Ceres Seq. ID no. 13491623
  misc_feature: MA Experiment ID: 108461 Result: Up-regulated in Transcription
  misc_feature: MA Experiment 108461 PARAMETER Experiment Name: At_Germinating_Seeds_cDNA_P Parameter: Age (day) Value: 1 vs. 0
  misc_feature: MA Experiment 108461 PARAMETER Experiment Name: At_Germinating_Seeds_cDNA_P Parameter: Tissue Value: Germinating Seeds
  misc_feature: MA Experiment ID: 108488 Result: Down-regulated in Transcription
  misc_feature: MA Experiment ID: 108595 Result: Up-regulated in Transcription
  misc_feature: MA Experiment 108595 PARAMETER Experiment Name: At_Ler-pi_Ovule_cDNA_P Parameter: Plant Line Value: null
  misc_feature: MA Experiment ID: 20001757 Result: Down-regulated in Transcription
  misc_feature: MA Experiment 20001757 PARAMETER Experiment Name: At_50mM_NH4NO3_L-to-H_P Parameter: Timepoint (hr) Value: 6
  misc_feature: MA Experiment 20001757 PARAMETER Experiment Name: At_50mM_NH4NO3_L-to-H_P Parameter: Tissue Value: Leaf
  misc_feature: MA Experiment 20001757 PARAMETER Experiment Name: At_50mM_NH4NO3_L-to-H_P Parameter: Treatment Value: 50mM NH4NO3 vs 100mM Mannitol
aatatccaaaataacaaaacatctcttcacttctcatcacaccatgcatcatcatcatcatccatgcaatcgcaaacccttcacaaccatcttctccttcttccttctctatctcaatctccataaccaacaaattatcgaagctcgaaatccatctcaatttacgaccaacccatcccctgacgtctctataccggaaatcaaacgtcacctccaacagtacggttacctcccacaaaacaaagaatccgacgacgtttcgttcgaacaagctctcgttcgttaccagaaaaatctcggtctaccaataaccggtaaaccggattccgacacgttgtcacagattctattaccaagatgtgggttccctgatgacgtggaacccaaaacggcaccgtttcacacaggaaaaaaatacgtgtacttccccggacggcccaggtggacaagagacgtcccactgaaactcacgtacgccttctcgcaggagaacctaactccttacttagcaccaactgacatacggcgcgtgttccgacgcgctttcggcaagtgggcttcggtgatcccagtatccttcatcgaaacagaggattacgtcatcgccgacatcaagatcggattcttcaacggagatcacggcgacggagaaccgttcgacggcgttttaggtgttttagcacacactttctctccggaaaacggtaggcttcatctagacaaagcagagacgtgggccgtagatttcgatgaggaaaaatctagtgtggccgtcgatttggaatctgtggcggtgcacgagatcggtcacgtgcttggattaggacatagctcggtgaaagacgcggctatgtatccaactttaaagccaagaagtaagaaagtgaatttgaatatggacgacgtcgttggagtacagtctttgtacggaacaaaccctaatttcacgttaaatagtttacttgcgtcggaaacttcgacaaatctagccgatggttcgaggatacggtctcaaggaatgatctattcgactttgagtactgttatcgctctctgttttcttaattggtagttcgtagacttagataattttctttatacaagaaatccgaaaacgtatagaatcatacagacgcatgaatttgttgttcaaagtagtagtctaatcctatgtttctgtttagaataataccatgttcttttttagtttatattagattgggcttcaagttatacggcccaatagaatgctaatgtattaaacgaagaacccagttcagagcaacacaattcgttggcct

SEQ ID NO: 38242 - protein, 356 aa, Arabidopsis thaliana
  peptide (1)..(356): Ceres Seq. ID no. 13491624
  misc_feature (141)..(250): Pfam Name: Matrixin Pfam Description: Matrixin
  misc_feature (67)..(351): Homolog of NCBI NO: 15223067 NR Description: matrix metallo proteinase -related [Arabidopsis
  misc_feature (64)..(354): Homolog of NCBI NO: 15218963 NR Description: metallo proteinase -related [Arabidopsis
  misc_feature (64)..(328): Homolog of NCBI NO: 37536782 NR Description: putative metalloproteinase
  misc_feature (64)..(354): Homolog of NCBI NO: 21553383 NR Description: proteinase like protein [Arabidopsis thaliana]
  misc_feature (64)..(354): Homolog of NCBI NO: 28393482 NR Description: putative proteinase [Arabidopsis thaliana]
  misc_feature (64)..(354): Homolog of NCBI NO: 15235820 NR Description: proteinase like protein [Arabidopsis thaliana]
  misc_feature (15)..(356): Homolog of NCBI NO: 25455788 NR Description: metalloproteinase (EC 3.4.24.-) [imported] -
  misc_feature (15)..(356): Homolog of NCBI NO: 15225398 NR Description: metallo proteinase -related [Arabidopsis
ISKITKHLFTSHHTMHHHHHPCNRKPFTTIFSFFLLYLNLHNQQIIEARNPSQFTTNPSPDVSIPEIKRHLQQYGYLPQNKESDDVSFEQALVRYQKNLGLPITGKPDSDTLSQILLPRCGFPDDVEPKTAPFHTGKKYVYFPGRPRWTRDVPLKLTYAFSQENLTPYLAPTDIRRVFRRAFGKWASVIPVSFIETEDYVIADIKIGFFNGDHGDGEPFDGVLGVLAHTFSPENGRLHLDKAETWAVDFDEEKSSVAVDLESVAVHEIGHVLGLGHSSVKDAAMYPTLKPRSKKVNLNMDDVVGVQSLYGTNPNFTLNSLLASETSTNLADGSRIRSQGMIYSTLSTVIALCFLNW

SEQ ID NO: 38243 - protein, 342 aa, Arabidopsis thaliana
  peptide (1)..(342): Ceres Seq. ID no. 13491625
  misc_feature (127)..(236): Pfam Name: Matrixin Pfam Description: Matrixin
  misc_feature (53)..(337): Homolog of NCBI NO: 15223067 NR Description: matrix metallo proteinase -related [Arabidopsis
  misc_feature (50)..(340): Homolog of NCBI NO: 15218963 NR Description: metallo proteinase -related [Arabidopsis
  misc_feature (50)..(314): Homolog of NCBI NO: 37536782 NR Description: putative metalloproteinase
  misc_feature (50)..(340): Homolog of NCBI NO: 28393482 NR Description: putative proteinase [Arabidopsis thaliana]
  misc_feature (50)..(340): Homolog of NCBI NO: 21553383 NR Description: proteinase like protein [Arabidopsis thaliana]
  misc_feature (50)..(340): Homolog of NCBI NO: 15235820 NR Description: proteinase like protein [Arabidopsis thaliana]
  misc_feature (1)..(342): Homolog of NCBI NO: 25455788 NR Description: metalloproteinase (EC 3.4.24.-) [imported] -
  misc_feature (1)..(342): Homolog of NCBI NO: 15225398 NR Description: metallo proteinase -related [Arabidopsis
MHHHHHPCNRKPFTTIFSFFLLYLNLHNQQIIEARNPSQFTTNPSPDVSIPEIKRHLQQYGYLPQNKESDDVSFEQALVRYQKNLGLPITGKPDSDTLSQILLPRCGFPDDVEPKTAPFHTGKKYVYFPGRPRWTRDVPLKLTYAFSQENLTPYLAPTDIRRVFRRAFGKWASVIPVSFIETEDYVIADIKIGFFNGDHGDGEPFDGVLGVLAHTFSPENGRLHLDKAETWAVDFDEEKSSVAVDLESVAVHEIGHVLGLGHSSVKDAAMYPTLKPRSKKVNLNMDDVVGVQSLYGTNPNFTLNSLLASETSTNLADGSRIRSQGMIYSTLSTVIALCFLNW

SEQ ID NO: 38244 - DNA, 1017 bp, Arabidopsis thaliana
  misc_feature (1)..(1017): Ceres Seq. ID no. 12371487
  misc_feature: MA Experiment ID: 108607 Result: Up-regulated in Transcription
  misc_feature: MA Experiment 108607 PARAMETER Experiment Name: At_100uM_ABA_cDNA_P Parameter: Timepoint (hr) Value: 4
  misc_feature: MA Experiment 108607 PARAMETER Experiment Name: At_100uM_ABA_cDNA_P Parameter: Tissue Value: Aerial
  misc_feature: MA Experiment 108607 PARAMETER Experiment Name: At_100uM_ABA_cDNA_P Parameter: Treatment Value: 100uM ABA vs. No Treatment
  misc_feature: MA Experiment ID: 108668 Result: Up-regulated in Transcription
  misc_feature: MA Experiment 108668 PARAMETER Experiment Name: At_2mM_SA_cDNA_P Parameter: Plant Line Value: WS
  misc_feature: MA Experiment 108668 PARAMETER Experiment Name: At_2mM_SA_cDNA_P Parameter: Timepoint (hr) Value: 6
  misc_feature: MA Experiment 108668 PARAMETER Experiment Name: At_2mM_SA_cDNA_P Parameter: Treatment Value: 2mM SA vs. No Treatment
  misc_feature: MA Experiment ID: 20000070 Result: Up-regulated in Transcription
  misc_feature: MA Experiment 20000070 PARAMETER Experiment Name: At_100uM_ABA_Mutants_cDNA_P Parameter: Plant Line Value: CS24
  misc_feature: MA Experiment 20000070 PARAMETER Experiment Name: At_100uM_ABA_Mutants_cDNA_P Parameter: Timepoint (hr) Value: 6
  misc_feature: MA Experiment 20000070 PARAMETER Experiment Name: At_100uM_ABA_Mutants_cDNA_P Parameter: Tissue Value: Aerial
  misc_feature: MA Experiment 20000070 PARAMETER Experiment Name: At_100uM_ABA_Mutants_cDNA_P Parameter: Treatment Value: 100uM ABA vs. No Treatment
  misc_feature: MA Experiment ID: 20000071 Result: Up-regulated in Transcription
  misc_feature: MA Experiment 20000071 PARAMETER Experiment Name: At_100uM_ABA_Mutants_cDNA_P Parameter: Plant Line Value: CS8104
  misc_feature: MA Experiment 20000071 PARAMETER Experiment Name: At_100uM_ABA_Mutants_cDNA_P Parameter: Timepoint (hr) Value: 6
  misc_feature: MA Experiment 20000071 PARAMETER Experiment Name: At_100uM_ABA_Mutants_cDNA_P Parameter: Tissue Value: Aerial
  misc_feature: MA Experiment 20000071 PARAMETER Experiment Name: At_100uM_ABA_Mutants_cDNA_P Parameter: Treatment Value: 100uM ABA vs. No Treatment
  misc_feature: MA Experiment ID: 20000234 Result: Down-regulated in Transcription
  misc_feature: MA Experiment 20000234 PARAMETER Experiment Name: At_Siliques_P Parameter: Age (day) Value: 21
  misc_feature: MA Experiment 20000234 PARAMETER Experiment Name: At_Siliques_P Parameter: Organism Value: A. thaliana
  misc_feature: MA Experiment 20000234 PARAMETER Experiment Name: At_Siliques_P Parameter: Plant Line Value: WS
  misc_feature: MA Experiment 20000234 PARAMETER Experiment Name: At_Siliques_P Parameter: Tissue Value: Less Than 5mm Siliques vs. Whole Plant
  misc_feature: MA Experiment ID: 20000495 Result: Down-regulated in Transcription
  misc_feature: MA Experiment 20000495 PARAMETER Experiment Name: At_Guard_Cells_P Parameter: Harvest Date Value: 8/2/2002
  misc_feature: MA Experiment 20000495 PARAMETER Experiment Name: At_Guard_Cells_P Parameter: Organism Value: A. thaliana
  misc_feature: MA Experiment 20000495 PARAMETER Experiment Name: At_Guard_Cells_P Parameter: Tissue Value: Guard Cells vs. Leaves
  misc_feature: MA Experiment ID: 20001451 Result: Down-regulated in Transcription
  misc_feature: MA Experiment 20001451 PARAMETER Experiment Name: At_Far-red-induction_P Parameter: Age (day) Value: 7
  misc_feature: MA Experiment 20001451 PARAMETER Experiment Name: At_Far-red-induction_P Parameter: Light Value: Far-red vs. White
  misc_feature: MA Experiment 20001451 PARAMETER Experiment Name: At_Far-red-induction_P Parameter: Organism Value: A. thaliana
  misc_feature: MA Experiment 20001451 PARAMETER Experiment Name: At_Far-red-induction_P Parameter: Plant Line Value: Columbia
  misc_feature: MA Experiment 20001451 PARAMETER Experiment Name: At_Far-red-induction_P Parameter: Timepoint (hr) Value: 24
  misc_feature: MA Experiment 20001451 PARAMETER Experiment Name: At_Far-red-induction_P Parameter: Tissue Value: Whole Plant
aaactcccagatcttgtcgatttatttatttcctctccaaagcaaaagcttcttcgatcgtccttgtctcgttttcaattctaaatgttgtgtgcagaaaaatcatgactttggcttctccacgagtttcaaattcaaagacgactgtgttgttgtttcctcgaaaagtttcttcaattgcatttgctattggtggattaacttctttcgtcatcttcgcttctctgcttcttttcacttatcccattggttcctctgttactgactatttctacagaacagagaccactcaaaacgtccagtttcaccatagtatccatgatcctgatcgtaacccatctcctgtttctagctcagagtcaccaccagtattgacacaagatagtgatgataaagtgcttcccaaggattcgaatgatgttagattaggtgaagaaacaaactcagggaagtcttcaaatgtttccattgatgaagaagctacacaagatcatgtagaaacagaatgtgatttatatcatggtaactggttttatgatccgatgggaccgttgtatacaaacaactcttgtcctcttctgacacagatgcaaaactgtcagggtaatggaagacctgacaaggggtatgaaaactggagatggaaaccgtctcagtgtgatcttccacggtttgatgctaagaaatttcttgagctaatgagaggcaagacactagcttttataggcgattcagtagctcgtaatcagatggagtccatgatgtgtcttctttggcaggtagaaactccggttaaccgtgggaacaggaagatgcagagatggtatttcaggtcatcatcggtgatgatagctcggatgtggtcatcttggctggtccatcagttcaatgaaccgtttggttttgctacagatggtgtaactaaactcaagcttgaccaacccgatgagcgcataattgaagctcttccgaatttcgatgtggttgtactttcatcaggtcactggtttgcaaaac

SEQ ID NO: 38245 - protein, 338 aa, Arabidopsis thaliana
  peptide (1)..(338): Ceres Seq. ID no. 12371488
  misc_feature (70)..(336): Homolog of NCBI NO: 15232907 NR Description: hypothetical protein; protein id: At3g02440.1
  misc_feature (115)..(337): Homolog of NCBI NO: 30678135 NR Description: expressed protein [Arabidopsis thaliana]
  misc_feature (152)..(336): Homolog of NCBI NO: 15223079 NR Description: unknown protein
  misc_feature (154)..(337): Homolog of NCBI NO: 15237044 NR Description: putative protein; protein id: At4g11090.1
  misc_feature (115)..(337): Homolog of NCBI NO: 34906936 NR Description: leaf senescence related protein-like
  misc_feature (35)..(138): Homolog of NCBI NO: 7487578 NR Description: hypothetical protein T30C3.30 - Arabidopsis
  misc_feature (112)..(337): Homolog of NCBI NO: 7487578 NR Description: hypothetical protein T30C3.30 - Arabidopsis
  misc_feature (35)..(138): Homolog of NCBI NO: 22328922 NR Description: putative protein
  misc_feature (112)..(337): Homolog of NCBI NO: 22328922 NR Description: putative protein
  misc_feature (35)..(337): Homolog of NCBI NO: 15242138 NR Description: putative protein
TPRSCRFIYFLSKAKASSIVLVSFSILNVVCRKIMTLASPRVSNSKTTVLLFPRKVSSIAFAIGGLTSFVIFASLLLFTYPIGSSVTDYFYRTETTQNVQFHHSIHDPDRNPSPVSSSESPPVLTQDSDDKVLPKDSNDVRLGEETNSGKSSNVSIDEEATQDHVETECDLYHGNWFYDPMGPLYTNNSCPLLTQMQNCQGNGRPDKGYENWRWKPSQCDLPRFDAKKFLELMRGKTLAFIGDSVARNQMESMMCLLWQVETPVNRGNRKMQRWYFRSSSVMIARMWSSWLVHQFNEPFGFATDGVTKLKLDQPDERIIEALPNFDVVVLSSGHWFAK

SEQ ID NO: 38246 - protein, 304 aa, Arabidopsis thaliana
  peptide (1)..(304): Ceres Seq. ID no. 12371489
  misc_feature (36)..(302): Homolog of NCBI NO: 15232907 NR Description: hypothetical protein; protein id: At3g02440.1
  misc_feature (81)..(303): Homolog of NCBI NO: 30678135 NR Description: expressed protein [Arabidopsis thaliana]
  misc_feature (118)..(302): Homolog of NCBI NO: 15223079 NR Description: unknown protein
  misc_feature (120)..(303): Homolog of NCBI NO: 15237044 NR Description: putative protein; protein id: At4g11090.1
  misc_feature (81)..(303): Homolog of NCBI NO: 34906936 NR Description: leaf senescence related protein-like
  misc_feature (1)..(104): Homolog of NCBI NO: 7487578 NR Description: hypothetical protein T30C3.30 - Arabidopsis
  misc_feature (78)..(303): Homolog of NCBI NO: 7487578 NR Description: hypothetical protein T30C3.30 - Arabidopsis
  misc_feature (1)..(104): Homolog of NCBI NO: 22328922 NR Description: putative protein
  misc_feature (78)..(303): Homolog of NCBI NO: 22328922 NR Description: putative protein
  misc_feature (1)..(303): Homolog of NCBI NO: 15242138 NR Description: putative protein
MTLASPRVSNSKTTVLLFPRKVSSIAFAIGGLTSFVIFASLLLFTYPIGSSVTDYFYRTETTQNVQFHHSIHDPDRNPSPVSSSESPPVLTQDSDDKVLPKDSNDVRLGEETNSGKSSNVSIDEEATQDHVETECDLYHGNWFYDPMGPLYTNNSCPLLTQMQNCQGNGRPDKGYENWRWKPSQCDLPRFDAKKFLELMRGKTLAFIGDSVARNQMESMMCLLWQVETPVNRGNRKMQRWYFRSSSVMIARMWSSWLVHQFNEPFGFATDGVTKLKLDQPDERIIEALPNFDVVVLSSGHWFAK

SEQ ID NO: 38247 - DNA, 1073 bp, Arabidopsis thaliana
  misc_feature (1)..(1073): Ceres Seq. ID no. 12558213
  misc_feature: MA Experiment ID: 20000184 Result: Down-regulated in Transcription
  misc_feature: MA Experiment 20000184 PARAMETER Experiment Name: At_Shoots__P Parameter: Age (day) Value: 7
  misc_feature: MA Experiment 20000184 PARAMETER Experiment Name: At_Shoots__P Parameter: Tissue Value: Shoots vs. Whole Plant
  misc_feature: MA Experiment ID: 20000234 Result: Down-regulated in Transcription
  misc_feature: MA Experiment 20000234 PARAMETER Experiment Name: At_Siliques_P Parameter: Age (day) Value: 21
  misc_feature: MA Experiment 20000234 PARAMETER Experiment Name: At_Siliques_P Parameter: Organism Value: A. thaliana
  misc_feature: MA Experiment 20000234 PARAMETER Experiment Name: At_Siliques_P Parameter: Plant Line Value: WS
  misc_feature: MA Experiment 20000234 PARAMETER Experiment Name: At_Siliques_P Parameter: Tissue Value: Less Than 5mm Siliques vs. Whole Plant
  misc_feature: MA Experiment ID: 20000264 Result: Down-regulated in Transcription
  misc_feature: MA Experiment 20000264 PARAMETER Experiment Name: At_Open_Flower_P Parameter: Age (day) Value: 21
  misc_feature: MA Experiment 20000264 PARAMETER Experiment Name: At_Open_Flower_P Parameter: Plant Line Value: WS
  misc_feature: MA Experiment 20000264 PARAMETER Experiment Name: At_Open_Flower_P Parameter: Tissue Value: Open Flower vs. Whole Plant
  misc_feature: MA Experiment ID: 20000438 Result: Down-regulated in Transcription
  misc_feature: MA Experiment 20000438 PARAMETER Experiment Name: At_Shoots__P Parameter: Age (day) Value: 14
  misc_feature: MA Experiment 20000438 PARAMETER Experiment Name: At_Shoots__P Parameter: Tissue Value: Shoots vs. Whole Plant
  misc_feature: MA Experiment ID: 20000439 Result: Down-regulated in Transcription
  misc_feature: MA Experiment 20000439 PARAMETER Experiment Name: At_Roots__P Parameter: Age (day) Value: 14 vs. 21
  misc_feature: MA Experiment 20000439 PARAMETER Experiment Name: At_Roots__P Parameter: Organism Value: A. thaliana
  misc_feature: MA Experiment 20000439 PARAMETER Experiment Name: At_Roots__P Parameter: Tissue Value: Roots vs. Whole Plant
  misc_feature: MA Experiment ID: 20000794 Result: Down-regulated in Transcription
  misc_feature: MA Experiment 20000794 PARAMETER Experiment Name: At_Petals_P Parameter: Age (day) Value: 23-25 days
  misc_feature: MA Experiment 20000794 PARAMETER Experiment Name: At_Petals_P Parameter: Plant Line Value: WS
  misc_feature: MA Experiment 20000794 PARAMETER Experiment Name: At_Petals_P Parameter: Tissue Value: Petals vs. Whole plant
  misc_feature: MA Experiment ID: 20001556 Result: Down-regulated in Transcription
  misc_feature: MA Experiment 20001556 PARAMETER Experiment Name: At_Drought_Soil_Dry_P Parameter: Age (day) Value: 26
  misc_feature: MA Experiment 20001556 PARAMETER Experiment Name: At_Drought_Soil_Dry_P Parameter: Organism Value: A. thaliana
  misc_feature: MA Experiment 20001556 PARAMETER Experiment Name: At_Drought_Soil_Dry_P Parameter: Plant Line Value: WS
  misc_feature: MA Experiment 20001556 PARAMETER Experiment Name: At_Drought_Soil_Dry_P Parameter: Post Timepoint (hr) Value: None
  misc_feature: MA Experiment 20001556 PARAMETER Experiment Name: At_Drought_Soil_Dry_P Parameter: Post-Treatment Value: None
  misc_feature: MA Experiment 20001556 PARAMETER Experiment Name: At_Drought_Soil_Dry_P Parameter: Timepoint (day) Value: 12
  misc_feature: MA Experiment 20001556 PARAMETER Experiment Name: At_Drought_Soil_Dry_P Parameter: Treatment Value: Drought vs. No Drought
  misc_feature: MA Experiment ID: 20001557 Result: Down-regulated in Transcription
  misc_feature: MA Experiment 20001557 PARAMETER Experiment Name: At_Drought_Soil_Dry_P Parameter: Age (day) Value: 27
  misc_feature: MA Experiment 20001557 PARAMETER Experiment Name: At_Drought_Soil_Dry_P Parameter: Organism Value: A. thaliana
  misc_feature: MA Experiment 20001557 PARAMETER Experiment Name: At_Drought_Soil_Dry_P Parameter: Plant Line Value: WS
  misc_feature: MA Experiment 20001557 PARAMETER Experiment Name: At_Drought_Soil_Dry_P Parameter: Post Timepoint (hr) Value: 3
  misc_feature: MA Experiment 20001557 PARAMETER Experiment Name: At_Drought_Soil_Dry_P Parameter: Post-Treatment Value: Re-Water vs. No Drought
  misc_feature: MA Experiment 20001557 PARAMETER Experiment Name: At_Drought_Soil_Dry_P Parameter: Timepoint (day) Value: 13
  misc_feature: MA Experiment 20001557 PARAMETER Experiment Name: At_Drought_Soil_Dry_P Parameter: Treatment Value: Drought vs. No Drought
  misc_feature: MA Experiment ID: 20001773 Result: Up-regulated in Transcription
  misc_feature: MA Experiment 20001773 PARAMETER Experiment Name: At_Far-red-enriched-adult_P Parameter: Age (day) Value: 30
  misc_feature: MA Experiment 20001773 PARAMETER Experiment Name: At_Far-red-enriched-adult_P Parameter: Light Value: Far-red enriched vs. White
  misc_feature: MA Experiment 20001773 PARAMETER Experiment Name: At_Far-red-enriched-adult_P Parameter: Organism Value: A. thaliana
  misc_feature: MA Experiment 20001773 PARAMETER Experiment Name: At_Far-red-enriched-adult_P Parameter: Plant Line Value: Columbia
  misc_feature: MA Experiment 20001773 PARAMETER Experiment Name: At_Far-red-enriched-adult_P Parameter: Timepoint (hr) Value: 48
  misc_feature: MA Experiment 20001773 PARAMETER Experiment Name: At_Far-red-enriched-adult_P Parameter: Tissue Value: Aerial
  misc_feature: MA Experiment ID: 20001906 Result: Down-regulated in Transcription
  misc_feature: MA Experiment 20001906 PARAMETER Experiment Name: At_Drought_Reproduction_P Parameter: Age (day) Value: 35
  misc_feature: MA Experiment 20001906 PARAMETER Experiment Name: At_Drought_Reproduction_P Parameter: Organism Value: A. thaliana
  misc_feature: MA Experiment 20001906 PARAMETER Experiment Name: At_Drought_Reproduction_P Parameter: Plant Line Value: WS
  misc_feature: MA Experiment 20001906 PARAMETER Experiment Name: At_Drought_Reproduction_P Parameter: Timepoint (day) Value: 5
  misc_feature: MA Experiment 20001906 PARAMETER Experiment Name: At_Drought_Reproduction_P Parameter: Tissue Value: Siliques
  misc_feature: MA Experiment 20001906 PARAMETER Experiment Name: At_Drought_Reproduction_P Parameter: Treatment Value: Drought vs. No Drought
  misc_feature: MA Experiment ID: 20001911 Result: Down-regulated in Transcription
  misc_feature: MA Experiment 20001911 PARAMETER Experiment Name: At_Drought_Reproduction_P Parameter: Age (day) Value: 40
  misc_feature: MA Experiment 20001911 PARAMETER Experiment Name: At_Drought_Reproduction_P Parameter: Organism Value: A. thaliana
  misc_feature: MA Experiment 20001911 PARAMETER Experiment Name: At_Drought_Reproduction_P Parameter: Plant Line Value: WS
  misc_feature: MA Experiment 20001911 PARAMETER Experiment Name: At_Drought_Reproduction_P Parameter: Timepoint (day) Value: 10
  misc_feature: MA Experiment 20001911 PARAMETER Experiment Name: At_Drought_Reproduction_P Parameter: Tissue Value: Flowers
  misc_feature: MA Experiment 20001911 PARAMETER Experiment Name: At_Drought_Reproduction_P Parameter: Treatment Value: Drought vs. No Drought
atgctttagctatctttaaccctttttcccttctctctttctatttctccctcatacctttgtttattctgatgaagttgtgagcactgaaagaaaagaagagaggagaagagagatatgcacaagaagaattaaacttagggacacaaaacaacatgacttggtgcaatgaccgtagcgatgttcagaccgttgaaagaatcattccctccccgggggcggctgagtcccccgtagcctcacttccggtctcttgtcacaaaacttgcccttcttgtggccataacttcaagtttcacgaacaggctgggatccatgacttgccgggacttcctgctggagtaaaatttgatccgacggatcaagaggtcttggagcatcttgaaggcaaggtaagagatgacgcaaaaaagcttcatcctctcattgatgagtttatccgtaccatcgatggtgaaaacggcatttgttatacccatcctgaaaaattgccaggagtgaacaaggacgggacggtgcgtcatttcttccaccgaccgtcgaaggcatacacgacgggaacaagaaagcgacgtaaagtccacactgattctgacgtcggtggagagacacggtggcacaagacaggaaaaacacggccagttcttgctggaggaagagtgagaggctacaagaaaatcctagtgctctacacaaactacggcaaacaaaaaaaacccgagaagactaattgggtaatgcatcaatatcatcttggcactagcgaggaagagaaagaaggtgagctcgtcgtctccaaagtcttttaccagactcaaccacgtcaatgcggtggctccgttgctgctgcagccaccgctaaggaccgaccttacctccacggcctcggtggaggtggtggccgccaccttcattaccatcttcatcataacaacggtaacggtaagagcaacggcagtgggggaaccgccggagccggtgagtattatcacaatattccggctattatctcgttcaatcagaccgggatacagaaccacttggttcatgactctcaaccttttatcccttaa

SEQ ID NO: 38248 - protein, 305 aa, Arabidopsis thaliana
  peptide (1)..(305): Ceres Seq. ID no. 12558214
  misc_feature (59)..(201): Pfam Name: No apical meristem (NAM) protein Pfam Description: No apical meristem (NAM) protein
  misc_feature (2)..(224): Homolog of NCBI NO: 12320749 NR Description: unknown protein [Arabidopsis thaliana]
  misc_feature (62)..(235): Homolog of NCBI NO: 34906416 NR Description: P0710E05.22 [Oryza sativa (japonica
  misc_feature (36)..(225): Homolog of NCBI NO: 15241889 NR Description: putative protein; protein id: At5g56620.1
  misc_feature (53)..(226): Homolog of NCBI NO: 6560767 NR Description: F3M18.9 [Arabidopsis thaliana]
  misc_feature (36)..(268): Homolog of NCBI NO: 15233497 NR Description: putative protein; protein id: At4g29230.1
  misc_feature (1)..(226): Homolog of NCBI NO: 21554371 NR Description: NAM protein, putative [Arabidopsis thaliana]
  misc_feature (1)..(226): Homolog of NCBI NO: 18396807 NR Description: NAM protein, putative
  misc_feature (115)..(305): Homolog of NCBI NO: 12751304 NR Description: CUC2-like protein [Brassica napus]
  misc_feature (1)..(305): Homolog of NCBI NO: 34911014 NR Description: OJ1125_C04.12 [Oryza sativa (japonica
  misc_feature (1)..(305): Homolog of NCBI NO: 15235314 NR Description: similar to NAM protein, putative; protein id:
MTWCNDRSDVQTVERIIPSPGAAESPVASLPVSCHKTCPSCGHNFKFHEQAGIHDLPGLPAGVKFDPTDQEVLEHLEGKVRDDAKKLHPLIDEFIRTIDGENGICYTHPEKLPGVNKDGTVRHFFHRPSKAYTTGTRKRRKVHTDSDVGGETRWHKTGKTRPVLAGGRVRGYKKILVLYTNYGKQKKPEKTNWVMHQYHLGTSEEEKEGELVVSKVFYQTQPRQCGGSVAAAATAKDRPYLHGLGGGGGRHLHYHLHHNNGNGKSNGSGGTAGAGEYYHNIPAIISFNQTGIQNHLVHDSQPFIP

SEQ ID NO: 38249 - DNA, 1213 bp, Arabidopsis thaliana
  misc_feature (1)..(1213): Ceres Seq. ID no. 12327875
  misc_feature: MA Experiment ID: 108434 Result: Down-regulated in Transcription
  misc_feature: MA Experiment 108434 PARAMETER Experiment Name: At_Root_Tips_cDNA_P Parameter: Tissue Value: Root Tips
  misc_feature: MA Experiment ID: 108435 Result: Down-regulated in Transcription
  misc_feature: MA Experiment 108435 PARAMETER Experiment Name: At_stm_Mutants_cDNA_P Parameter: Plant Line Value: wt Landsburg vs stm
  misc_feature: MA Experiment 108435 PARAMETER Experiment Name: At_stm_Mutants_cDNA_P Parameter: Tissue Value: Shoot Apical Meristem Region
  misc_feature: MA Experiment ID: 108461 Result: Up-regulated in Transcription
  misc_feature: MA Experiment 108461 PARAMETER Experiment Name: At_Germinating_Seeds_cDNA_P Parameter: Age (day) Value: 1 vs. 0
  misc_feature: MA Experiment 108461 PARAMETER Experiment Name: At_Germinating_Seeds_cDNA_P Parameter: Tissue Value: Germinating Seeds
  misc_feature: MA Experiment ID: 108462 Result: Up-regulated in Transcription
  misc_feature: MA Experiment 108462 PARAMETER Experiment Name: At_Germinating_Seeds_cDNA_P Parameter: Age (day) Value: 2 vs. 0
  misc_feature: MA Experiment 108462 PARAMETER Experiment Name: At_Germinating_Seeds_cDNA_P Parameter: Tissue Value: Germinating Seeds
  misc_feature: MA Experiment ID: 108464 Result: Up-regulated in Transcription
  misc_feature: MA Experiment 108464 PARAMETER Experiment Name: At_Germinating_Seeds_cDNA_P Parameter: Age (day) Value: 4 vs. 0
  misc_feature: MA Experiment 108464 PARAMETER Experiment Name: At_Germinating_Seeds_cDNA_P Parameter: Tissue Value: Germinating Seeds
  misc_feature: MA Experiment ID: 108488 Result: Up-regulated in Transcription
  misc_feature: MA Experiment ID: 108595 Result: Down-regulated in Transcription
  misc_feature: MA Experiment 108595 PARAMETER Experiment Name: At_Ler-pi_Ovule_cDNA_P Parameter: Plant Line Value: null
  misc_feature: MA Experiment ID: 20000180 Result: Up-regulated in Transcription
  misc_feature: MA Experiment 20000180 PARAMETER Experiment Name: At_Germinating_Seeds_P Parameter: Age (hr) Value: 24 vs. 0
  misc_feature: MA Experiment 20000180 PARAMETER Experiment Name: At_Germinating_Seeds_P Parameter: Tissue Value: Germinating Seeds
  misc_feature: MA Experiment ID: 20000184 Result: Up-regulated in Transcription
  misc_feature: MA Experiment 20000184 PARAMETER Experiment Name: At_Shoots__P Parameter: Age (day) Value: 7
  misc_feature: MA Experiment 20000184 PARAMETER Experiment Name: At_Shoots__P Parameter: Tissue Value: Shoots vs. Whole Plant
  misc_feature: MA Experiment ID: 20000185 Result: Down-regulated in Transcription
  misc_feature: MA Experiment 20000185 PARAMETER Experiment Name: At_Roots__P Parameter: Age (day) Value: 7 vs. 21
  misc_feature: MA Experiment 20000185 PARAMETER Experiment Name: At_Roots__P Parameter: Organism Value: A. thaliana
  misc_feature: MA Experiment 20000185 PARAMETER Experiment Name: At_Roots__P Parameter: Tissue Value: Roots vs. Whole Plant
  misc_feature: MA Experiment ID: 20000227 Result: Down-regulated in Transcription
  misc_feature: MA Experiment 20000227 PARAMETER Experiment Name: At_Root-Tips-vs-Tops_P Parameter: Tissue Value: Root Tips vs. Root Tops
  misc_feature: MA Experiment ID: 20000264 Result: Down-regulated in Transcription
  misc_feature: MA Experiment 20000264 PARAMETER Experiment Name: At_Open_Flower_P Parameter: Age (day) Value: 21
  misc_feature: MA Experiment 20000264 PARAMETER Experiment Name: At_Open_Flower_P Parameter: Plant Line Value: WS
  misc_feature: MA Experiment 20000264 PARAMETER Experiment Name: At_Open_Flower_P Parameter: Tissue Value: Open Flower vs. Whole Plant
  misc_feature: MA Experiment ID: 20000265 Result: Down-regulated in Transcription
  misc_feature: MA Experiment 20000265 PARAMETER Experiment Name: At_Open_Flower_P Parameter: Age (day) Value: 21
  misc_feature: MA Experiment 20000265 PARAMETER Experiment Name: At_Open_Flower_P Parameter: Plant Line Value: WS
  misc_feature: MA Experiment 20000265 PARAMETER Experiment Name: At_Open_Flower_P Parameter: Tissue Value: Closed Flower vs. Whole Plant
  misc_feature: MA Experiment ID: 20000286 Result: Down-regulated in Transcription
  misc_feature: MA Experiment 20000286 PARAMETER Experiment Name: At_Open_Flower_P Parameter: Age (day) Value: 21
  misc_feature: MA Experiment 20000286 PARAMETER Experiment Name: At_Open_Flower_P Parameter: Plant Line Value: WS
  misc_feature: MA Experiment 20000286 PARAMETER Experiment Name: At_Open_Flower_P Parameter: Tissue Value: Half Open vs. Whole Plant
  misc_feature: MA Experiment ID: 20000438 Result: Up-regulated in Transcription
  misc_feature: MA Experiment 20000438 PARAMETER Experiment Name: At_Shoots__P Parameter: Age (day) Value: 14
  misc_feature: MA Experiment 20000438 PARAMETER Experiment Name: At_Shoots__P Parameter: Tissue Value: Shoots vs. Whole Plant
  misc_feature: MA Experiment ID: 20000439 Result: Down-regulated in Transcription
  misc_feature: MA Experiment 20000439 PARAMETER Experiment Name: At_Roots__P Parameter: Age (day) Value: 14 vs. 21
  misc_feature: MA Experiment 20000439 PARAMETER Experiment Name: At_Roots__P Parameter: Organism Value: A. thaliana
  misc_feature: MA Experiment 20000439 PARAMETER Experiment Name: At_Roots__P Parameter: Tissue Value: Roots vs. Whole Plant
  misc_feature: MA Experiment ID: 20000495 Result: Down-regulated in Transcription
  misc_feature: MA Experiment 20000495 PARAMETER Experiment Name: At_Guard_Cells_P Parameter: Harvest Date Value: 8/2/2002
  misc_feature: MA Experiment 20000495 PARAMETER Experiment Name: At_Guard_Cells_P Parameter: Organism Value: A. thaliana
  misc_feature: MA Experiment 20000495 PARAMETER Experiment Name: At_Guard_Cells_P Parameter: Tissue Value: Guard Cells vs. Leaves
  misc_feature: MA Experiment ID: 20000496 Result: Down-regulated in Transcription
  misc_feature: MA Experiment 20000496 PARAMETER Experiment Name: At_Guard_Cells_P Parameter: Harvest Date Value: 7/19/2002
  misc_feature: MA Experiment 20000496 PARAMETER Experiment Name: At_Guard_Cells_P Parameter: Organism Value: Canola
  misc_feature: MA Experiment 20000496 PARAMETER Experiment Name: At_Guard_Cells_P Parameter: Tissue Value: Guard Cells vs. Leaves
  misc_feature: MA Experiment ID: 20000794 Result: Down-regulated in Transcription
  misc_feature: MA Experiment 20000794 PARAMETER Experiment Name: At_Petals_P Parameter: Age (day) Value: 23-25 days
  misc_feature: MA Experiment 20000794 PARAMETER Experiment Name: At_Petals_P Parameter: Plant Line Value: WS
  misc_feature: MA Experiment 20000794 PARAMETER Experiment Name: At_Petals_P Parameter: Tissue Value: Petals vs. Whole plant
  misc_feature: MA Experiment ID: 20001451 Result: Down-regulated in Transcription
  misc_feature: MA Experiment 20001451 PARAMETER Experiment Name: At_Far-red-induction_P Parameter: Age (day) Value: 7
  misc_feature: MA Experiment 20001451 PARAMETER Experiment Name: At_Far-red-induction_P Parameter: Light Value: Far-red vs. White
  misc_feature: MA Experiment 20001451 PARAMETER Experiment Name: At_Far-red-induction_P Parameter: Organism Value: A. thaliana
  misc_feature: MA Experiment 20001451 PARAMETER Experiment Name: At_Far-red-induction_P Parameter: Plant Line Value: Columbia
  misc_feature: MA Experiment 20001451 PARAMETER Experiment Name: At_Far-red-induction_P Parameter: Timepoint (hr) Value: 24
  misc_feature: MA Experiment 20001451 PARAMETER Experiment Name: At_Far-red-induction_P Parameter: Tissue Value: Whole Plant
  misc_feature: MA Experiment ID: 20001557 Result: Down-regulated in Transcription
  misc_feature: MA Experiment 20001557 PARAMETER Experiment Name: At_Drought_Soil_Dry_P Parameter: Age (day) Value: 27
  misc_feature: MA Experiment 20001557 PARAMETER Experiment Name: At_Drought_Soil_Dry_P Parameter: Organism Value: A. thaliana
  misc_feature: MA Experiment 20001557 PARAMETER Experiment Name: At_Drought_Soil_Dry_P Parameter: Plant Line Value: WS
  misc_feature: MA Experiment 20001557 PARAMETER Experiment Name: At_Drought_Soil_Dry_P Parameter: Post Timepoint (hr) Value: 3
  misc_feature: MA Experiment 20001557 PARAMETER Experiment Name: At_Drought_Soil_Dry_P Parameter: Post-Treatment Value: Re-Water vs. No Drought
  misc_feature: MA Experiment 20001557 PARAMETER Experiment Name: At_Drought_Soil_Dry_P Parameter: Timepoint (day) Value: 13
  misc_feature: MA Experiment 20001557 PARAMETER Experiment Name: At_Drought_Soil_Dry_P Parameter: Treatment Value: Drought vs. No Drought
  misc_feature: MA Experiment ID: 20001560 Result: Down-regulated in Transcription
  misc_feature: MA Experiment 20001560 PARAMETER Experiment Name: At_Drought_Soil_Dry_P Parameter: Age (day) Value: 28
  misc_feature: MA Experiment 20001560 PARAMETER Experiment Name: At_Drought_Soil_Dry_P Parameter: Organism Value: A. thaliana
  misc_feature: MA Experiment 20001560 PARAMETER Experiment Name: At_Drought_Soil_Dry_P Parameter: Plant Line Value: WS
  misc_feature: MA Experiment 20001560 PARAMETER Experiment Name: At_Drought_Soil_Dry_P Parameter: Post Timepoint (hr) Value: None
  misc_feature: MA Experiment 20001560 PARAMETER Experiment Name: At_Drought_Soil_Dry_P Parameter: Post-Treatment Value: None
  misc_feature: MA Experiment 20001560 PARAMETER Experiment Name: At_Drought_Soil_Dry_P Parameter: Timepoint (day) Value: 14
  misc_feature: MA Experiment 20001560 PARAMETER Experiment Name: At_Drought_Soil_Dry_P Parameter: Treatment Value: Drought vs. No Drought
  misc_feature: MA Experiment ID: 20001757 Result: Up-regulated in Transcription
  misc_feature: MA Experiment 20001757 PARAMETER Experiment Name: At_50mM_NH4NO3_L-to-H_P Parameter: Timepoint (hr) Value: 6
  misc_feature: MA Experiment 20001757 PARAMETER Experiment Name: At_50mM_NH4NO3_L-to-H_P Parameter: Tissue Value: Leaf
  misc_feature: MA Experiment 20001757 PARAMETER Experiment Name: At_50mM_NH4NO3_L-to-H_P Parameter: Treatment Value: 50mM NH4NO3 vs 100mM Mannitol
  misc_feature: MA Experiment ID: 20001904 Result: Down-regulated in Transcription
  misc_feature: MA Experiment 20001904 PARAMETER Experiment Name: At_Drought_Reproduction_P Parameter: Age (day) Value: 37
  misc_feature: MA Experiment 20001904 PARAMETER Experiment Name: At_Drought_Reproduction_P Parameter: Organism Value: A. thaliana
  misc_feature: MA Experiment 20001904 PARAMETER Experiment Name: At_Drought_Reproduction_P Parameter: Plant Line Value: WS
  misc_feature: MA Experiment 20001904 PARAMETER Experiment Name: At_Drought_Reproduction_P Parameter: Timepoint (day) Value: 7
  misc_feature: MA Experiment 20001904 PARAMETER Experiment Name: At_Drought_Reproduction_P Parameter: Tissue Value: Rosettes
  misc_feature: MA Experiment 20001904 PARAMETER Experiment Name: At_Drought_Reproduction_P Parameter: Treatment Value: Drought vs. No Drought
  misc_feature: MA Experiment ID: 20001905 Result: Down-regulated in Transcription
  misc_feature: MA Experiment 20001905 PARAMETER Experiment Name: At_Drought_Reproduction_P Parameter: Age (day) Value: 40
  misc_feature: MA Experiment 20001905 PARAMETER Experiment Name: At_Drought_Reproduction_P Parameter: Organism Value: A. thaliana
  misc_feature: MA Experiment 20001905 PARAMETER Experiment Name: At_Drought_Reproduction_P Parameter: Plant Line Value: WS
  misc_feature: MA Experiment 20001905 PARAMETER Experiment Name: At_Drought_Reproduction_P Parameter: Timepoint (day) Value: 10
  misc_feature: MA Experiment 20001905 PARAMETER Experiment Name: At_Drought_Reproduction_P Parameter: Tissue Value: Rosettes
  misc_feature: MA Experiment 20001905 PARAMETER Experiment Name: At_Drought_Reproduction_P Parameter: Treatment Value: Drought vs. No Drought
  misc_feature: MA Experiment ID: 20001906 Result: Down-regulated in Transcription
  misc_feature: MA Experiment 20001906 PARAMETER Experiment Name: At_Drought_Reproduction_P Parameter: Age (day) Value: 35
  misc_feature: MA Experiment 20001906 PARAMETER Experiment Name: At_Drought_Reproduction_P Parameter: Organism Value: A. thaliana
  misc_feature: MA Experiment 20001906 PARAMETER Experiment Name: At_Drought_Reproduction_P Parameter: Plant Line Value: WS
  misc_feature: MA Experiment 20001906 PARAMETER Experiment Name: At_Drought_Reproduction_P Parameter: Timepoint (day) Value: 5
  misc_feature: MA Experiment 20001906 PARAMETER Experiment Name: At_Drought_Reproduction_P Parameter: Tissue Value: Siliques
  misc_feature: MA Experiment 20001906 PARAMETER Experiment Name: At_Drought_Reproduction_P Parameter: Treatment Value: Drought vs. No Drought
  misc_feature: MA Experiment ID: 20001908 Result: Down-regulated in Transcription
  misc_feature: MA Experiment 20001908 PARAMETER Experiment Name: At_Drought_Reproduction_P Parameter: Age (day) Value: 40
  misc_feature: MA Experiment 20001908 PARAMETER Experiment Name: At_Drought_Reproduction_P Parameter: Organism Value: A. thaliana
  misc_feature: MA Experiment 20001908 PARAMETER Experiment Name: At_Drought_Reproduction_P Parameter: Plant Line Value: WS
  misc_feature: MA Experiment 20001908 PARAMETER Experiment Name: At_Drought_Reproduction_P Parameter: Timepoint (day) Value: 10
  misc_feature: MA Experiment 20001908 PARAMETER Experiment Name: At_Drought_Reproduction_P Parameter: Tissue Value: Siliques
  misc_feature: MA Experiment 20001908 PARAMETER Experiment Name: At_Drought_Reproduction_P Parameter: Treatment Value: Drought vs. No Drought
attttcaaaacttatccgaccttatcttagcgaaacaaaatctctcctctgattattactactcaacttcgcattatcactcaaacaaacatattgacatctgagtcttgtcatcatggcaacttctctccaagccgccgcaacttttcttcaaccggcgaagattgccgcttctccttctcgtaatgtccatctccgatcaaaccaaaccgtgggcaagtcctttgggttagactcttcacaagctaggctcacgtgctctctccactctgacctcaaagacttcgctggaaaatgctccgacgccgccaagatcgccggttttgctctagccacctctgctctcgttgtctcgggggccggtgcggagggagcaccaaagaggctaacgtacgacgagatacagagcaagacttacatggaggtaaagggtaccggtacggcaaaccagtgtccaactatcgatggtggctctgagacattctcgttcaaagctggtaagtacacaggcaagaagttctgcttcgagcccacttccttcaccgtcaaggcagatagcgtcagcaagaatgcaccgccggatttccaaaacaccaagctcatgacccgtctcacttacacactcgatgagatcgaaggacccttcgaggttggttcagacggaagcgtgaagttcaaggaagaagatggtatcgattacgcagcagtcacagtccagcttccgggaggagaacgcgtgccgttcctcttcacggttaagcagctcgaggcttcagggaaacccgaaagcttcagtggcaagttcttagttccatcgtaccgtggctcgtcctttttggacccaaagggtcgtggtggatccactgggtacgataatgcagtggctttgcctgccggaggcagaggagacgaggaagagctatccaaggaaaacgtcaagaacacggcggcttccgtcggagagatcactttgaagatcacaaagagcaaaccggagacaggtgaagtgatcggagtgttcgagagtcttcagccatcggatactgacttgggtgctaaggtaccaaaagatgtgaagatccaaggggtttggtacggtcagattgagtgattcatataatttgttacttttgtaaaattgtattgaaacaacttctttctatcaatatatatatatatattaacgctcgataaataaatatttatatcagtg

SEQ ID NO: 38250 - protein, 331 aa, Arabidopsis thaliana
  peptide (1)..(331): Ceres Seq. ID no. 12327876
  misc_feature (95)..(331): Pfam Name: Manganese-stabilising protein / photosystem II Pfam Description: Manganese-stabilising protein / photosystem II
  misc_feature (1)..(331): Homolog of NCBI NO: 11134054 NR Description: Oxygen-evolving enhancer protein 1, chloroplast (OEE1) (33 kDa subunit of oxygen evolving system of photosystem (OEC 33 kDa subunit) (33 kDa thylakoid membrane protein) kDa
  misc_feature (1)..(331): Homolog of NCBI NO: 30013657 NR Description: oxygen evolving complex 33 kDa photosystem II
  misc_feature (1)..(331): Homolog of NCBI NO: 99745 NR Description: photosystem II oxygen-evolving complex protein 1
  misc_feature (1)..(331): Homolog of NCBI NO: 15451006 NR Description: 33 kDa polypeptide of oxygen-evolving complex
  misc_feature (1)..(331): Homolog of NCBI NO: 22530906 NR Description: 33 kDa polypeptide of oxygen-evolving complex
  misc_feature (1)..(331): Homolog of NCBI NO: 15912247 NR Description: AT5g66570/K1F13_25 [Arabidopsis thaliana]
  misc_feature (1)..(331): Homolog of NCBI NO: 13926291 NR Description: AT5g66570/K1F13_25 [Arabidopsis thaliana]
  misc_feature (1)..(331): Homolog of NCBI NO: 15240013 NR Description: photosystem II oxygen-evolving complex 33 (OEC33)
  misc_feature (1)..(331): Homolog of NCBI NO: 21593220 NR Description: 33 kDa polypeptide of oxygen-evolving complex
  misc_feature (1)..(331): Homolog of NCBI NO: 15230324 NR Description: photosystem II oxygen-evolving complex 33 (OEC33)
MATSLQAAATFLQPAKIAASPSRNVHLRSNQTVGKSFGLDSSQARLTCSLHSDLKDFAGKCSDAAKIAGFALATSALVVSGAGAEGAPKRLTYDEIQSKTYMEVKGTGTANQCPTIDGGSETFSFKAGKYTGKKFCFEPTSFTVKADSVSKNAPPDFQNTKLMTRLTYTLDEIEGPFEVGSDGSVKFKEEDGIDYAAVTVQLPGGERVPFLFTVKQLEASGKPESFSGKFLVPSYRGSSFLDPKGRGGSTGYDNAVALPAGGRGDEEELSKENVKNTAASVGEITLKITKSKPETGEVIGVFESLQPSDTDLGAKVPKDVKIQGVWYGQIE

SEQ ID NO: 38251 - protein, 230 aa, Arabidopsis thaliana
  peptide (1)..(230): Ceres Seq. ID no. 12327877
  misc_feature (1)..(230): Pfam Name: Manganese-stabilising protein / photosystem II Pfam Description: Manganese-stabilising protein / photosystem II
  misc_feature (1)..(230): Homolog of NCBI NO: 11134054 NR Description: Oxygen-evolving enhancer protein 1, chloroplast (OEE1) (33 kDa subunit of oxygen evolving system of photosystem (OEC 33 kDa subunit) (33 kDa thylakoid membrane protein) kDa
  misc_feature (1)..(230): Homolog of NCBI NO: 30013657 NR Description: oxygen evolving complex 33 kDa photosystem II
  misc_feature (1)..(230): Homolog of NCBI NO: 99745 NR Description: photosystem II oxygen-evolving complex protein 1
  misc_feature (1)..(230): Homolog of NCBI NO: 15451006 NR Description: 33 kDa polypeptide of oxygen-evolving complex
  misc_feature (1)..(230): Homolog of NCBI NO: 22530906 NR Description: 33 kDa polypeptide of oxygen-evolving complex
  misc_feature (1)..(230): Homolog of NCBI NO: 15912247 NR Description: AT5g66570/K1F13_25 [Arabidopsis thaliana]
  misc_feature (1)..(230): Homolog of NCBI NO: 13926291 NR Description: AT5g66570/K1F13_25 [Arabidopsis thaliana]
  misc_feature (1)..(230): Homolog of NCBI NO: 15240013 NR Description: photosystem II oxygen-evolving complex 33 (OEC33)
  misc_feature (1)..(230): Homolog of NCBI NO: 21593220 NR Description: 33 kDa polypeptide of oxygen-evolving complex
  misc_feature (1)..(230): Homolog of NCBI NO: 15230324 NR Description: photosystem II oxygen-evolving complex 33 (OEC33)
MEVKGTGTANQCPTIDGGSETFSFKAGKYTGKKFCFEPTSFTVKADSVSKNAPPDFQNTKLMTRLTYTLDEIEGPFEVGSDGSVKFKEEDGIDYAAVTVQLPGGERVPFLFTVKQLEASGKPESFSGKFLVPSYRGSSFLDPKGRGGSTGYDNAVALPAGGRGDEEELSKENVKNTAASVGEITLKITKSKPETGEVIGVFESLQPSDTDLGAKVPKDVKIQGVWYGQIE

SEQ ID NO: 38252 - protein, 169 aa, Arabidopsis thaliana
  peptide (1)..(169): Ceres Seq. ID no. 12327878
  misc_feature (1)..(169): Pfam Name: Manganese-stabilising protein / photosystem II Pfam Description: Manganese-stabilising protein / photosystem II
  misc_feature (1)..(169): Homolog of NCBI NO: 11134054 NR Description: Oxygen-evolving enhancer protein 1, chloroplast (OEE1) (33 kDa subunit of oxygen evolving system of photosystem (OEC 33 kDa subunit) (33 kDa thylakoid membrane protein) kDa
  misc_feature (1)..(169): Homolog of NCBI NO: 30013657 NR Description: oxygen evolving complex 33 kDa photosystem II
  misc_feature (1)..(169): Homolog of NCBI NO: 99745 NR Description: photosystem II oxygen-evolving complex protein 1
  misc_feature (1)..(169): Homolog of NCBI NO: 15451006 NR Description: 33 kDa polypeptide of oxygen-evolving complex
  misc_feature (1)..(169): Homolog of NCBI NO: 22530906 NR Description: 33 kDa polypeptide of oxygen-evolving complex
  misc_feature (1)..(169): Homolog of NCBI NO: 15912247 NR Description: AT5g66570/K1F13_25 [Arabidopsis thaliana]
  misc_feature (1)..(169): Homolog of NCBI NO: 13926291 NR Description: AT5g66570/K1F13_25 [Arabidopsis thaliana]
  misc_feature (1)..(169): Homolog of NCBI NO: 15240013 NR Description: photosystem II oxygen-evolving complex 33 (OEC33)
  misc_feature (1)..(169): Homolog of NCBI NO: 21593220 NR Description: 33 kDa polypeptide of oxygen-evolving complex
  misc_feature (1)..(169): Homolog of NCBI NO: 15230324 NR Description: photosystem II oxygen-evolving complex 33 (OEC33)
MTRLTYTLDEIEGPFEVGSDGSVKFKEEDGIDYAAVTVQLPGGERVPFLFTVKQLEASGKPESFSGKFLVPSYRGSSFLDPKGRGGSTGYDNAVALPAGGRGDEEELSKENVKNTAASVGEITLKITKSKPETGEVIGVFESLQPSDTDLGAKVPKDVKIQGVWYGQIE

SEQ ID NO: 38253 - DNA, 1141 bp, Arabidopsis thaliana
  misc_feature (1)..(1141): Ceres Seq. ID no. 12329869
  misc_feature: MA Experiment ID: 108461 Result: Up-regulated in Transcription
  misc_feature: MA Experiment 108461 PARAMETER Experiment Name: At_Germinating_Seeds_cDNA_P Parameter: Age (day) Value: 1 vs. 0
  misc_feature: MA Experiment 108461 PARAMETER Experiment Name: At_Germinating_Seeds_cDNA_P Parameter: Tissue Value: Germinating Seeds
  misc_feature: MA Experiment ID: 108462 Result: Up-regulated in Transcription
  misc_feature: MA Experiment 108462 PARAMETER Experiment Name: At_Germinating_Seeds_cDNA_P Parameter: Age (day) Value: 2 vs. 0
  misc_feature: MA Experiment 108462 PARAMETER Experiment Name: At_Germinating_Seeds_cDNA_P Parameter: Tissue Value: Germinating Seeds
  misc_feature: MA Experiment ID: 108463 Result: Up-regulated in Transcription
  misc_feature: MA Experiment 108463 PARAMETER Experiment Name: At_Germinating_Seeds_cDNA_P Parameter: Age (day) Value: 3 vs. 0
  misc_feature: MA Experiment 108463 PARAMETER Experiment Name: At_Germinating_Seeds_cDNA_P Parameter: Tissue Value: Germinating Seeds
  misc_feature: MA Experiment ID: 108464 Result: Up-regulated in Transcription
  misc_feature: MA Experiment 108464 PARAMETER Experiment Name: At_Germinating_Seeds_cDNA_P Parameter: Age (day) Value: 4 vs. 0
  misc_feature: MA Experiment 108464 PARAMETER Experiment Name: At_Germinating_Seeds_cDNA_P Parameter: Tissue Value: Germinating Seeds
  misc_feature: MA Experiment ID: 108488 Result: Down-regulated in Transcription
  misc_feature: MA Experiment ID: 108594 Result: Down-regulated in Transcription
  misc_feature: MA Experiment 108594 PARAMETER Experiment Name: At_Ler-rhl_Root_cDNA_P Parameter: Plant Line Value: null
  misc_feature: MA Experiment ID: 108609 Result: Down-regulated in Transcription
  misc_feature: MA Experiment 108609 PARAMETER Experiment Name: At_100uM_ABA_cDNA_P Parameter: Timepoint (hr) Value: 24
  misc_feature: MA Experiment 108609 PARAMETER Experiment Name: At_100uM_ABA_cDNA_P Parameter: Tissue Value: Aerial
  misc_feature: MA Experiment 108609 PARAMETER Experiment Name: At_100uM_ABA_cDNA_P Parameter: Treatment Value: 100uM ABA vs. No Treatment
  misc_feature: MA Experiment ID: 20000089 Result: Down-regulated in Transcription
  misc_feature: MA Experiment ID: 20000173 Result: Down-regulated in Transcription
  misc_feature: MA Experiment 20000173 PARAMETER Experiment Name: At_42deg_Heat_P Parameter: Age (day) Value: 14
  misc_feature: MA Experiment 20000173 PARAMETER Experiment Name: At_42deg_Heat_P Parameter: Organism Value: A. thaliana
  misc_feature: MA Experiment 20000173 PARAMETER Experiment Name: At_42deg_Heat_P Parameter: Plant Line Value: WS
  misc_feature: MA Experiment 20000173 PARAMETER Experiment Name: At_42deg_Heat_P Parameter: Temperature (deg C) Value: 42 vs. 22
  misc_feature: MA Experiment 20000173 PARAMETER Experiment Name: At_42deg_Heat_P Parameter: Timepoint (hr) Value: 6
  misc_feature: MA Experiment 20000173 PARAMETER Experiment Name: At_42deg_Heat_P Parameter: Tissue Value: Aerial
  misc_feature: MA Experiment ID: 20000179 Result: Up-regulated in Transcription
  misc_feature: MA Experiment 20000179 PARAMETER Experiment Name: At_Germinating_Seeds_P Parameter: Age (hr) Value: 6 vs. 0
  misc_feature: MA Experiment 20000179 PARAMETER Experiment Name: At_Germinating_Seeds_P Parameter: Tissue Value: Germinating Seeds
  misc_feature: MA Experiment ID: 20000180 Result: Up-regulated in Transcription
  misc_feature: MA Experiment 20000180 PARAMETER Experiment Name: At_Germinating_Seeds_P Parameter: Age (hr) Value: 24 vs. 0
  misc_feature: MA Experiment 20000180 PARAMETER Experiment Name: At_Germinating_Seeds_P Parameter: Tissue Value: Germinating Seeds
  misc_feature: MA Experiment ID: 20000185 Result: Up-regulated in Transcription
  misc_feature: MA Experiment 20000185 PARAMETER Experiment Name: At_Roots__P Parameter: Age (day) Value: 7 vs. 21
  misc_feature: MA Experiment 20000185 PARAMETER Experiment Name: At_Roots__P Parameter: Organism Value: A. thaliana
  misc_feature: MA Experiment 20000185 PARAMETER Experiment Name: At_Roots__P Parameter: Tissue Value: Roots vs. Whole Plant
  misc_feature: MA Experiment ID: 20000234 Result: Down-regulated in Transcription
  misc_feature: MA Experiment 20000234 PARAMETER Experiment Name: At_Siliques_P Parameter: Age (day) Value: 21
  misc_feature: MA Experiment 20000234 PARAMETER Experiment Name: At_Siliques_P Parameter: Organism Value: A. thaliana
  misc_feature: MA Experiment 20000234 PARAMETER Experiment Name: At_Siliques_P Parameter: Plant Line Value: WS
  misc_feature: MA Experiment 20000234 PARAMETER Experiment Name: At_Siliques_P Parameter: Tissue Value: Less Than 5mm Siliques vs. Whole Plant
  misc_feature: MA Experiment ID: 20000235 Result: Down-regulated in Transcription
  misc_feature: MA Experiment 20000235 PARAMETER Experiment Name: At_Siliques_P Parameter: Age (day) Value: 21
  misc_feature: MA Experiment 20000235 PARAMETER Experiment Name: At_Siliques_P Parameter: Organism Value: A. thaliana
  misc_feature: MA Experiment 20000235 PARAMETER Experiment Name: At_Siliques_P Parameter: Plant Line Value: WS
  misc_feature: MA Experiment 20000235 PARAMETER Experiment Name: At_Siliques_P Parameter: Tissue Value: 5-10mm Siliques vs. Whole Plant
  misc_feature: MA Experiment ID: 20000265 Result: Down-regulated in Transcription
  misc_feature: MA Experiment 20000265 PARAMETER Experiment Name: At_Open_Flower_P Parameter: Age (day) Value: 21
  misc_feature: MA Experiment 20000265 PARAMETER Experiment Name: At_Open_Flower_P Parameter: Plant Line Value: WS
  misc_feature: MA Experiment 20000265 PARAMETER Experiment Name: At_Open_Flower_P Parameter: Tissue Value: Closed Flower vs. Whole Plant
  misc_feature: MA Experiment ID: 20000437 Result: Down-regulated in Transcription
  misc_feature: MA Experiment 20000437 PARAMETER Experiment Name: At_Drought_P Parameter: Age (day) Value: 8
  misc_feature: MA Experiment 20000437 PARAMETER Experiment Name: At_Drought_P Parameter: Organism Value: A. thaliana
  misc_feature: MA Experiment 20000437 PARAMETER Experiment Name: At_Drought_P Parameter: Plant Line Value: WS
  misc_feature: MA Experiment 20000437 PARAMETER Experiment Name: At_Drought_P Parameter: Timepoint (hr) Value: 24
  misc_feature: MA Experiment 20000437 PARAMETER Experiment Name: At_Drought_P Parameter: Tissue Value: Whole Plant
  misc_feature: MA Experiment 20000437 PARAMETER Experiment Name: At_Drought_P Parameter: Treatment Value: Drought vs. No Drought
  misc_feature: MA Experiment ID: 20000439 Result: Up-regulated in Transcription
  misc_feature: MA Experiment 20000439 PARAMETER Experiment Name: At_Roots__P Parameter: Age (day) Value: 14 vs. 21
  misc_feature: MA Experiment 20000439 PARAMETER Experiment Name: At_Roots__P Parameter: Organism Value: A. thaliana
  misc_feature: MA Experiment 20000439 PARAMETER Experiment Name: At_Roots__P Parameter: Tissue Value: Roots vs. Whole Plant
  misc_feature: MA Experiment ID: 20000456 Result: Down-regulated in Transcription
  misc_feature: MA Experiment 20000456 PARAMETER Experiment Name: At_100uM_BA_P Parameter: Age (day) Value: 14
  misc_feature: MA Experiment 20000456 PARAMETER Experiment Name: At_100uM_BA_P Parameter: Organism Value: A. thaliana
  misc_feature: MA Experiment 20000456 PARAMETER Experiment Name: At_100uM_BA_P Parameter: Plant Line Value: WS
  misc_feature: MA Experiment 20000456 PARAMETER Experiment Name: At_100uM_BA_P Parameter: Timepoint (hr) Value: 6
  misc_feature: MA Experiment 20000456 PARAMETER Experiment Name: At_100uM_BA_P Parameter: Tissue Value: Aerial
  misc_feature: MA Experiment 20000456 PARAMETER Experiment Name: At_100uM_BA_P Parameter: Treatment Value: 100uM BA vs. No Treatment
  misc_feature: MA Experiment ID: 20000495 Result: Up-regulated in Transcription
  misc_feature: MA Experiment 20000495 PARAMETER Experiment Name: At_Guard_Cells_P Parameter: Harvest Date Value: 8/2/2002
  misc_feature: MA Experiment 20000495 PARAMETER Experiment Name: At_Guard_Cells_P Parameter: Organism Value: A. thaliana
  misc_feature: MA Experiment 20000495 PARAMETER Experiment Name: At_Guard_Cells_P Parameter: Tissue Value: Guard Cells vs. Leaves
  misc_feature: MA Experiment ID: 20000527 Result: Down-regulated in Transcription
  misc_feature: MA Experiment 20000527 PARAMETER Experiment Name: At_10percent_PEG_P Parameter: Age (day) Value: 20
  misc_feature: MA Experiment 20000527 PARAMETER Experiment Name: At_10percent_PEG_P Parameter: Organism Value: A. thaliana
  misc_feature: MA Experiment 20000527 PARAMETER Experiment Name: At_10percent_PEG_P Parameter: Plant Line Value: WS
  misc_feature: MA Experiment 20000527 PARAMETER Experiment Name: At_10percent_PEG_P Parameter: Timepoint (day) Value: 20
  misc_feature: MA Experiment 20000527 PARAMETER Experiment Name: At_10percent_PEG_P Parameter: Tissue Value: Whole Plant
  misc_feature: MA Experiment 20000527 PARAMETER Experiment Name: At_10percent_PEG_P Parameter: Treatment Value: 10percent PEG vs. No Treatment
  misc_feature: MA Experiment ID: 20000709 Result: Down-regulated in Transcription
  misc_feature: MA Experiment 20000709 PARAMETER Experiment Name: At_15mM_NH4NO3_L-to-H_P Parameter: Age (hr) Value: 14
  misc_feature: MA Experiment 20000709 PARAMETER Experiment Name: At_15mM_NH4NO3_L-to-H_P Parameter: Organism Value: A. thaliana
  misc_feature: MA Experiment 20000709 PARAMETER Experiment Name: At_15mM_NH4NO3_L-to-H_P Parameter: Plant Line Value: WS
  misc_feature: MA Experiment 20000709 PARAMETER Experiment Name: At_15mM_NH4NO3_L-to-H_P Parameter: Timepoint (hr) Value: 4
  misc_feature: MA Experiment 20000709 PARAMETER Experiment Name: At_15mM_NH4NO3_L-to-H_P Parameter: Tissue Value: Aerial
  misc_feature: MA Experiment 20000709 PARAMETER Experiment Name: At_15mM_NH4NO3_L-to-H_P Parameter: Treatment Value: 15mM NH4NO3 vs. 30mM Mannitol
  misc_feature: MA Experiment ID: 20000794 Result: Up-regulated in Transcription
  misc_feature: MA Experiment 20000794 PARAMETER Experiment Name: At_Petals_P Parameter: Age (day) Value: 23-25 days
  misc_feature: MA Experiment 20000794 PARAMETER Experiment Name: At_Petals_P Parameter: Plant Line Value: WS
  misc_feature: MA Experiment 20000794 PARAMETER Experiment Name: At_Petals_P Parameter: Tissue Value: Petals vs. Whole plant
  misc_feature: MA Experiment ID: 20001248 Result: Down-regulated in Transcription
  misc_feature: MA Experiment 20001248 PARAMETER Experiment Name: At_Far-red-induction_P Parameter: Age (day) Value: 7
  misc_feature: MA Experiment 20001248 PARAMETER Experiment Name: At_Far-red-induction_P Parameter: Light Value: Far-red vs. White
  misc_feature: MA Experiment 20001248 PARAMETER Experiment Name: At_Far-red-induction_P Parameter: Organism Value: A. thaliana
  misc_feature: MA Experiment 20001248 PARAMETER Experiment Name: At_Far-red-induction_P Parameter: Plant Line Value: Columbia
  misc_feature: MA Experiment 20001248 PARAMETER Experiment Name: At_Far-red-induction_P Parameter: Timepoint (hr) Value: 4
  misc_feature: MA Experiment 20001248 PARAMETER Experiment Name: At_Far-red-induction_P Parameter: Tissue Value: Whole Plant
  misc_feature: MA Experiment ID: 20001451 Result: Up-regulated in Transcription
  misc_feature: MA Experiment 20001451 PARAMETER Experiment Name: At_Far-red-induction_P Parameter: Age (day) Value: 7
  misc_feature: MA Experiment 20001451 PARAMETER Experiment Name: At_Far-red-induction_P Parameter: Light Value: Far-red vs. White
  misc_feature: MA Experiment 20001451 PARAMETER Experiment Name: At_Far-red-induction_P Parameter: Organism Value: A. thaliana
  misc_feature: MA Experiment 20001451 PARAMETER Experiment Name: At_Far-red-induction_P Parameter: Plant Line Value: Columbia
  misc_feature: MA Experiment 20001451 PARAMETER Experiment Name: At_Far-red-induction_P Parameter: Timepoint (hr) Value: 24
  misc_feature: MA Experiment 20001451 PARAMETER Experiment Name: At_Far-red-induction_P Parameter: Tissue Value: Whole Plant
  misc_feature: MA Experiment ID: 20001457 Result: Down-regulated in Transcription
  misc_feature: MA Experiment 20001457 PARAMETER Experiment Name: At_50mM_NH4NO3_L-to-H_P Parameter: Age (day) Value: Undefined
  misc_feature: MA Experiment 20001457 PARAMETER Experiment Name: At_50mM_NH4NO3_L-to-H_P Parameter: Organism Value: Undefined
  misc_feature: MA Experiment 20001457 PARAMETER Experiment Name: At_50mM_NH4NO3_L-to-H_P Parameter: Plant Line Value: Undefined
  misc_feature: MA Experiment 20001457 PARAMETER Experiment Name: At_50mM_NH4NO3_L-to-H_P Parameter: Timepoint (hr) Value: 0.5
  misc_feature: MA Experiment 20001457 PARAMETER Experiment Name: At_50mM_NH4NO3_L-to-H_P Parameter: Tissue Value: Siliques
  misc_feature: MA Experiment 20001457 PARAMETER Experiment Name: At_50mM_NH4NO3_L-to-H_P Parameter: Treatment Value: 50mM NH4NO3 vs. 100mM Manitol
  misc_feature: MA Experiment ID: 20001556 Result: Down-regulated in Transcription
  misc_feature: MA Experiment 20001556 PARAMETER Experiment Name: At_Drought_Soil_Dry_P Parameter: Age (day) Value: 26
  misc_feature: MA Experiment 20001556 PARAMETER Experiment Name: At_Drought_Soil_Dry_P Parameter: Organism Value: A. thaliana
  misc_feature: MA Experiment 20001556 PARAMETER Experiment Name: At_Drought_Soil_Dry_P Parameter: Plant Line Value: WS
  misc_feature: MA Experiment 20001556 PARAMETER Experiment Name: At_Drought_Soil_Dry_P Parameter: Post Timepoint (hr) Value: None
  misc_feature: MA Experiment 20001556 PARAMETER Experiment Name: At_Drought_Soil_Dry_P Parameter: Post-Treatment Value: None
  misc_feature: MA Experiment 20001556 PARAMETER Experiment Name: At_Drought_Soil_Dry_P Parameter: Timepoint (day) Value: 12
  misc_feature: MA Experiment 20001556 PARAMETER Experiment Name: At_Drought_Soil_Dry_P Parameter: Treatment Value: Drought vs. No Drought
  misc_feature: MA Experiment ID: 20001557 Result: Down-regulated in Transcription
  misc_feature: MA Experiment 20001557 PARAMETER Experiment Name: At_Drought_Soil_Dry_P Parameter: Age (day) Value: 27
  misc_feature: MA Experiment 20001557 PARAMETER Experiment Name: At_Drought_Soil_Dry_P Parameter: Organism Value: A. thaliana
  misc_feature: MA Experiment 20001557 PARAMETER Experiment Name: At_Drought_Soil_Dry_P Parameter: Plant Line Value: WS
  misc_feature: MA Experiment 20001557 PARAMETER Experiment Name: At_Drought_Soil_Dry_P Parameter: Post Timepoint (hr) Value: 3
  misc_feature: MA Experiment 20001557 PARAMETER Experiment Name: At_Drought_Soil_Dry_P Parameter: Post-Treatment Value: Re-Water vs. No Drought
  misc_feature: MA Experiment 20001557 PARAMETER Experiment Name: At_Drought_Soil_Dry_P Parameter: Timepoint (day) Value: 13
  misc_feature: MA Experiment 20001557 PARAMETER Experiment Name: At_Drought_Soil_Dry_P Parameter: Treatment Value: Drought vs. No Drought
  misc_feature: MA Experiment ID: 20001558 Result: Down-regulated in Transcription
  misc_feature: MA Experiment 20001558 PARAMETER Experiment Name: At_Drought_Soil_Dry_P Parameter: Age (day) Value: 27
  misc_feature: MA Experiment 20001558 PARAMETER Experiment Name: At_Drought_Soil_Dry_P Parameter: Organism Value: A. thaliana
  misc_feature: MA Experiment 20001558 PARAMETER Experiment Name: At_Drought_Soil_Dry_P Parameter: Plant Line Value: WS
  misc_feature: MA Experiment 20001558 PARAMETER Experiment Name: At_Drought_Soil_Dry_P Parameter: Post Timepoint (hr) Value: 6
  misc_feature: MA Experiment 20001558 PARAMETER Experiment Name: At_Drought_Soil_Dry_P Parameter: Post-Treatment Value: Re-Water vs. No Drought
  misc_feature: MA Experiment 20001558 PARAMETER Experiment Name: At_Drought_Soil_Dry_P Parameter: Timepoint (day) Value: 13
  misc_feature: MA Experiment 20001558 PARAMETER Experiment Name: At_Drought_Soil_Dry_P Parameter: Treatment Value: Drought vs. No Drought
  misc_feature: MA Experiment ID: 20001911 Result: Down-regulated in Transcription
  misc_feature: MA Experiment 20001911 PARAMETER Experiment Name: At_Drought_Reproduction_P Parameter: Age (day) Value: 40
  misc_feature: MA Experiment 20001911 PARAMETER Experiment Name: At_Drought_Reproduction_P Parameter: Organism Value: A. thaliana
  misc_feature: MA Experiment 20001911 PARAMETER Experiment Name: At_Drought_Reproduction_P Parameter: Plant Line Value: WS
  misc_feature: MA Experiment 20001911 PARAMETER Experiment Name: At_Drought_Reproduction_P Parameter: Timepoint (day) Value: 10
  misc_feature: MA Experiment 20001911 PARAMETER Experiment Name: At_Drought_Reproduction_P Parameter: Tissue Value: Flowers
  misc_feature: MA Experiment 20001911 PARAMETER Experiment Name: At_Drought_Reproduction_P Parameter: Treatment Value: Drought vs. No Drought
aacaccacaattaacagatttattgtttttggaaataatcaaaacttaaaaactatcagaatgggaacgttcttaggacactttgtgcctggtctctcacttgctcttcttggtctttggcatctcttcaacaccataagatcttactgtcttaaaggccctgaagctttctctgcaaaattctggttccctttccctaaactcaaacatcttgagcttatcttgattctcttcttctccttcctctccatcactctcctcaccctagatttccctaatttcaacttctcctctctcaaaccagacaacctagaacatgcttccatgttcctccacctcattatctttgcgtgtttcgctctcttctgcgagctaaccctttgctcagatctcttctccggtctaatcggagttctttctgcctctgtcttcgctcaagaactcttccttcttcattttcattccactgatcattcaggtcttgaaggtcactaccatttccttctccaactcattgctttcgtctccttctcctcggcgctagcttctgcttcgttccctaaatccttctctgcggctctattcctcccgatatcggttatgtttcaaggatgctggttcttgaacatggggttcatgctttgggtcccagagtatgttcctagaggttgcgtgagtaacatgtcaacatctacagacaataatagaaggagtgtttatcatagtggtgcggtggcttgtgagtcccctggtgctgagattagggcaaaagcattggcgaatctgcagtttagttggatgttgtctgctatacttatcattacatgtgccttgtgccacaagtattccggtaaagttgtgttgcctaagattaggtcatcgttggagtacgagcgtctttgccggcaaggaagtgatcgttctgcaaccgtaacggtggaagcaccggccagttccgatcaacaatagattttccttactttaatttatcatctgaatatgatgtaatatgtacatatagtacactaataagtagccctaataatagttacataatttataagagggggcagagtgtaacgcactaatgatagtggaccctttcgcatgctttgtgaactaataaaaatttgcatatagc

SEQ ID NO: 38254 - protein, 322 aa, Arabidopsis thaliana
  peptide (1)..(322): Ceres Seq. ID no. 12329870
  misc_feature (124)..(290): Pfam Name: Family of unknown function (DUF716) Pfam Description: Family of unknown function (DUF716)
  misc_feature (21)..(263): Homolog of NCBI NO: 4680504 NR Description: hypothetical protein [Oryza sativa]
  misc_feature (103)..(278): Homolog of NCBI NO: 25405807 NR Description: unknown protein, 73214-72236 [imported] -
  misc_feature (21)..(309): Homolog of NCBI NO: 4416307 NR Description: hypothetical protein [Zea mays]
  misc_feature (20)..(273): Homolog of NCBI NO: 15222573 NR Description: hypothetical protein; protein id: At1g32120.1
  misc_feature (21)..(275): Homolog of NCBI NO: 32470632 NR Description: putative plant viral-response family protein
  misc_feature (21)..(273): Homolog of NCBI NO: 15241195 NR Description: putative protein; protein id: At5g19870.1
  misc_feature (21)..(278): Homolog of NCBI NO: 30695897 NR Description: expressed protein [Arabidopsis thaliana]
  misc_feature (21)..(284): Homolog of NCBI NO: 15222675 NR Description: unknown protein; protein id: At1g55230.1
  misc_feature (21)..(322): Homolog of NCBI NO: 18402650 NR Description: expressed protein
  misc_feature (21)..(322): Homolog of NCBI NO: 21618061 NR Description: unknown [Arabidopsis thaliana]
NTTINRFIVFGNNQNLKTIRMGTFLGHFVPGLSLALLGLWHLFNTIRSYCLKGPEAFSAKFWFPFPKLKHLELILILFFSFLSITLLTLDFPNFNFSSLKPDNLEHASMFLHLIIFACFALFCELTLCSDLFSGLIGVLSASVFAQELFLLHFHSTDHSGLEGHYHFLLQLIAFVSFSSALASASFPKSFSAALFLPISVMFQGCWFLNMGFMLWVPEYVPRGCVSNMSTSTDNNRRSVYHSGAVACESPGAEIRAKALANLQFSWMLSAILIITCALCHKYSGKVVLPKIRSSLEYERLCRQGSDRSATVTVEAPASSDQQ

SEQ ID NO: 38255 - protein, 302 aa, Arabidopsis thaliana
  peptide (1)..(302): Ceres Seq. ID no. 12329871
  misc_feature (104)..(270): Pfam Name: Family of unknown function (DUF716) Pfam Description: Family of unknown function (DUF716)
  misc_feature (1)..(243): Homolog of NCBI NO: 4680504 NR Description: hypothetical protein [Oryza sativa]
  misc_feature (83)..(258): Homolog of NCBI NO: 25405807 NR Description: unknown protein, 73214-72236 [imported] -
  misc_feature (1)..(289): Homolog of NCBI NO: 4416307 NR Description: hypothetical protein [Zea mays]
  misc_feature (1)..(253): Homolog of NCBI NO: 15222573 NR Description: hypothetical protein; protein id: At1g32120.1
  misc_feature (1)..(255): Homolog of NCBI NO: 32470632 NR Description: putative plant viral-response family protein
  misc_feature (1)..(253): Homolog of NCBI NO: 15241195 NR Description: putative protein; protein id: At5g19870.1
  misc_feature (1)..(258): Homolog of NCBI NO: 30695897 NR Description: expressed protein [Arabidopsis thaliana]
  misc_feature (1)..(264): Homolog of NCBI NO: 15222675 NR Description: unknown protein; protein id: At1g55230.1
  misc_feature (1)..(302): Homolog of NCBI NO: 18402650 NR Description: expressed protein
  misc_feature (1)..(302): Homolog of NCBI NO: 21618061 NR Description: unknown [Arabidopsis thaliana]
MGTFLGHFVPGLSLALLGLWHLFNTIRSYCLKGPEAFSAKFWFPFPKLKHLELILILFFSFLSITLLTLDFPNFNFSSLKPDNLEHASMFLHLIIFACFALFCELTLCSDLFSGLIGVLSASVFAQELFLLHFHSTDHSGLEGHYHFLLQLIAFVSFSSALASASFPKSFSAALFLPISVMFQGCWFLNMGFMLWVPEYVPRGCVSNMSTSTDNNRRSVYHSGAVACESPGAEIRAKALANLQFSWMLSAILIITCALCHKYSGKVVLPKIRSSLEYERLCRQGSDRSATVTVEAPASSDQQ

SEQ ID NO: 38256 - protein, 214 aa, Arabidopsis thaliana
  peptide (1)..(214): Ceres Seq. ID no. 12329872
  misc_feature (16)..(182): Pfam Name: Family of unknown function (DUF716) Pfam Description: Family of unknown function (DUF716)
  misc_feature (1)..(155): Homolog of NCBI NO: 4680504 NR Description: hypothetical protein [Oryza sativa]
  misc_feature (1)..(170): Homolog of NCBI NO: 25405807 NR Description: unknown protein, 73214-72236 [imported] -
  misc_feature (1)..(201): Homolog of NCBI NO: 4416307 NR Description: hypothetical protein [Zea mays]
  misc_feature (1)..(165): Homolog of NCBI NO: 15222573 NR Description: hypothetical protein; protein id: At1g32120.1
  misc_feature (1)..(167): Homolog of NCBI NO: 32470632 NR Description: putative plant viral-response family protein
  misc_feature (1)..(165): Homolog of NCBI NO: 15241195 NR Description: putative protein; protein id: At5g19870.1
  misc_feature (1)..(170): Homolog of NCBI NO: 30695897 NR Description: expressed protein [Arabidopsis thaliana]
  misc_feature (1)..(176): Homolog of NCBI NO: 15222675 NR Description: unknown protein; protein id: At1g55230.1
  misc_feature (1)..(214): Homolog of NCBI NO: 18402650 NR Description: expressed protein
  misc_feature (1)..(214): Homolog of NCBI NO: 21618061 NR Description: unknown [Arabidopsis thaliana]
MFLHLIIFACFALFCELTLCSDLFSGLIGVLSASVFAQELFLLHFHSTDHSGLEGHYHFLLQLIAFVSFSSALASASFPKSFSAALFLPISVMFQGCWFLNMGFMLWVPEYVPRGCVSNMSTSTDNNRRSVYHSGAVACESPGAEIRAKALANLQFSWMLSAILIITCALCHKYSGKVVLPKIRSSLEYERLCRQGSDRSATVTVEAPASSDQQ

SEQ ID NO: 38257 - DNA, 1290 bp, Arabidopsis thaliana
  misc_feature (1)..(1290): Ceres Seq. ID no. 12343441
  misc_feature: MA Experiment ID: 108463 Result: Up-regulated in Transcription
  misc_feature: MA Experiment 108463 PARAMETER Experiment Name: At_Germinating_Seeds_cDNA_P Parameter: Age (day) Value: 3 vs. 0
  misc_feature: MA Experiment 108463 PARAMETER Experiment Name: At_Germinating_Seeds_cDNA_P Parameter: Tissue Value: Germinating Seeds
  misc_feature: MA Experiment ID: 20000184 Result: Down-regulated in Transcription
  misc_feature: MA Experiment 20000184 PARAMETER Experiment Name: At_Shoots__P Parameter: Age (day) Value: 7
  misc_feature: MA Experiment 20000184 PARAMETER Experiment Name: At_Shoots__P Parameter: Tissue Value: Shoots vs. Whole Plant
  misc_feature: MA Experiment ID: 20000224 Result: Up-regulated in Transcription
  misc_feature: MA Experiment ID: 20000234 Result: Down-regulated in Transcription
  misc_feature: MA Experiment 20000234 PARAMETER Experiment Name: At_Siliques_P Parameter: Age (day) Value: 21
  misc_feature: MA Experiment 20000234 PARAMETER Experiment Name: At_Siliques_P Parameter: Organism Value: A. thaliana
  misc_feature: MA Experiment 20000234 PARAMETER Experiment Name: At_Siliques_P Parameter: Plant Line Value: WS
  misc_feature: MA Experiment 20000234 PARAMETER Experiment Name: At_Siliques_P Parameter: Tissue Value: Less Than 5mm Siliques vs. Whole Plant
  misc_feature: MA Experiment ID: 20000264 Result: Down-regulated in Transcription
  misc_feature: MA Experiment 20000264 PARAMETER Experiment Name: At_Open_Flower_P Parameter: Age (day) Value: 21
  misc_feature: MA Experiment 20000264 PARAMETER Experiment Name: At_Open_Flower_P Parameter: Plant Line Value: WS
  misc_feature: MA Experiment 20000264 PARAMETER Experiment Name: At_Open_Flower_P Parameter: Tissue Value: Open Flower vs. Whole Plant
  misc_feature: MA Experiment ID: 20000265 Result: Down-regulated in Transcription
  misc_feature: MA Experiment 20000265 PARAMETER Experiment Name: At_Open_Flower_P Parameter: Age (day) Value: 21
  misc_feature: MA Experiment 20000265 PARAMETER Experiment Name: At_Open_Flower_P Parameter: Plant Line Value: WS
  misc_feature: MA Experiment 20000265 PARAMETER Experiment Name: At_Open_Flower_P Parameter: Tissue Value: Closed Flower vs. Whole Plant
  misc_feature: MA Experiment ID: 20000286 Result: Down-regulated in Transcription
  misc_feature: MA Experiment 20000286 PARAMETER Experiment Name: At_Open_Flower_P Parameter: Age (day) Value: 21
  misc_feature: MA Experiment 20000286 PARAMETER Experiment Name: At_Open_Flower_P Parameter: Plant Line Value: WS
  misc_feature: MA Experiment 20000286 PARAMETER Experiment Name: At_Open_Flower_P Parameter: Tissue Value: Half Open vs. Whole Plant
  misc_feature: MA Experiment ID: 20001247 Result: Up-regulated in Transcription
  misc_feature: MA Experiment 20001247 PARAMETER Experiment Name: At_Far-red-induction_P Parameter: Age (day) Value: 7
  misc_feature: MA Experiment 20001247 PARAMETER Experiment Name: At_Far-red-induction_P Parameter: Light Value: Far-red vs. White
  misc_feature: MA Experiment 20001247 PARAMETER Experiment Name: At_Far-red-induction_P Parameter: Organism Value: A. thaliana
  misc_feature: MA Experiment 20001247 PARAMETER Experiment Name: At_Far-red-induction_P Parameter: Plant Line Value: Columbia
  misc_feature: MA Experiment 20001247 PARAMETER Experiment Name: At_Far-red-induction_P Parameter: Timepoint (hr) Value: 1
  misc_feature: MA Experiment 20001247 PARAMETER Experiment Name: At_Far-red-induction_P Parameter: Tissue Value: Whole Plant
  misc_feature: MA Experiment ID: 20001451 Result: Up-regulated in Transcription
  misc_feature: MA Experiment 20001451 PARAMETER Experiment Name: At_Far-red-induction_P Parameter: Age (day) Value: 7
  misc_feature: MA Experiment 20001451 PARAMETER Experiment Name: At_Far-red-induction_P Parameter: Light Value: Far-red vs. White
  misc_feature: MA Experiment 20001451 PARAMETER Experiment Name: At_Far-red-induction_P Parameter: Organism Value: A. thaliana
  misc_feature: MA Experiment 20001451 PARAMETER Experiment Name: At_Far-red-induction_P Parameter: Plant Line Value: Columbia
  misc_feature: MA Experiment 20001451 PARAMETER Experiment Name: At_Far-red-induction_P Parameter: Timepoint (hr) Value: 24
  misc_feature: MA Experiment 20001451 PARAMETER Experiment Name: At_Far-red-induction_P Parameter: Tissue Value: Whole Plant
agaaaaaaggatatcgacaatttcgcttttgctttcaaaatctcattctatcactttgtgccttttttagccatcgcgaaaaacctctgaatcgcatcccttgattttctgggtttgtgactttgtgtagtggaaattaggcttgttgtttgatttcgctacgagaaaatggacaagtacgagcttgttaaagacatcggtgctgggaattttggagtggcgaggctcatgagagtcaaaaactccaaggaacttgttgctatgaagtacatcgagcgtggccctaagattgatgagaacgtggcgagagagattattaaccacagatcacttcgtcatcccaatataatccggtttaaggaggtggttttgacaccaacgcacatcgccattgctatggaatatgccgctggcggtgagctatttgagcgtatatgtagtgctggaagattcagtgaggatgaggcaagatactttttccagcagcttatctcaggagtcagctattgccatgctatgcaaatatgccacagagatctgaagcttgaaaataccctcttggatggaagtcctgctccacgcctgaaaatctgtgattttggttattccaagtcctcattgttgcactctatgcccaaatcaactgttggaactccagcatatattgcacctgaggttctttctcgcggagagtatgatggcaagatggctgatgtatggtcttgtggtgtgactctttatgtcatgctggtgggagcatacccatttgaagaccaagaggatcccaaaaacttcaaaaaaacaatacaaagaataatggctgtcaagtacaagatcccggactatgtccatatctcacaagattgcaaacatctcctctcccgtatatttgtcaccaactcgaataagaggattactatagctgacatcaagaaacatccatggttcctaaagaacctgccaagggaacttacagaaatagctcaagctgcatacttcaggaaagagaacccgacattctcactccaaagcgtcgaagagataatgaagattgtggaagaggcaaaaactccagctcgtgtttctcggtcgattggagcatttgggtggggaggaggagaagatgccgagggcaaggaggaagatgcagaggaagaagttgaggaagtagaagaagaagaagacgaagaagatgagtatgataagacggtgaagcaagtgcatgctagcatgggagaagtccgagtcagttaaaaaaaaagattggttttcttttcacgaaagtattct

SEQ ID NO: 38258 - protein, 361 aa, Arabidopsis thaliana
  peptide (1)..(361): Ceres Seq. ID no. 12343442
  misc_feature (4)..(260): Pfam Name: Protein kinase domain Pfam Description: Protein kinase domain
  misc_feature (1)..(361): Homolog of NCBI NO: 19568098 NR Description: osmotic stress-activated protein kinase
  misc_feature (1)..(358): Homolog of NCBI NO: 2129803 NR Description: probable serine/threonine-specific protein kinase
  misc_feature (1)..(361): Homolog of NCBI NO: 1362026 NR Description: probable serine/threonine-specific protein kinase
  misc_feature (1)..(361): Homolog of NCBI NO: 15220251 NR Description: Ser/Thr kinase
  misc_feature (1)..(361): Homolog of NCBI NO: 15219836 NR Description: putative serine/threonine-protein kinase
  misc_feature (1)..(361): Homolog of NCBI NO: 21618062 NR Description: putative serine/threonine-protein kinase
MDKYELVKDIGAGNFGVARLMRVKNSKELVAMKYIERGPKIDENVAREIINHRSLRHPNIIRFKEVVLTPTHIAIAMEYAAGGELFERICSAGRFSEDEARYFFQQLISGVSYCHAMQICHRDLKLENTLLDGSPAPRLKICDFGYSKSSLLHSMPKSTVGTPAYIAPEVLSRGEYDGKMADVWSCGVTLYVMLVGAYPFEDQEDPKNFKKTIQRIMAVKYKIPDYVHISQDCKHLLSRIFVTNSNKRITIADIKKHPWFLKNLPRELTEIAQAAYFRKENPTFSLQSVEEIMKIVEEAKTPARVSRSIGAFGWGGGEDAEGKEEDAEEEVEEVEEEEDEEDEYDKTVKQVHASMGEVRVS

SEQ ID NO: 38259 - protein, 341 aa, Arabidopsis thaliana
  peptide (1)..(341): Ceres Seq. ID no. 12343443
  misc_feature (1)..(240): Pfam Name: Protein kinase domain Pfam Description: Protein kinase domain
  misc_feature (1)..(341): Homolog of NCBI NO: 19568098 NR Description: osmotic stress-activated protein kinase
  misc_feature (1)..(338): Homolog of NCBI NO: 2129803 NR Description: probable serine/threonine-specific protein kinase
  misc_feature (1)..(341): Homolog of NCBI NO: 1362026 NR Description: probable serine/threonine-specific protein kinase
  misc_feature (1)..(341): Homolog of NCBI NO: 15220251 NR Description: Ser/Thr kinase
  misc_feature (1)..(341): Homolog of NCBI NO: 15219836 NR Description: putative serine/threonine-protein kinase
  misc_feature (1)..(341): Homolog of NCBI NO: 21618062 NR Description: putative serine/threonine-protein kinase
MRVKNSKELVAMKYIERGPKIDENVAREIINHRSLRHPNIIRFKEVVLTPTHIAIAMEYAAGGELFERICSAGRFSEDEARYFFQQLISGVSYCHAMQICHRDLKLENTLLDGSPAPRLKICDFGYSKSSLLHSMPKSTVGTPAYIAPEVLSRGEYDGKMADVWSCGVTLYVMLVGAYPFEDQEDPKNFKKTIQRIMAVKYKIPDYVHISQDCKHLLSRIFVTNSNKRITIADIKKHPWFLKNLPRELTEIAQAAYFRKENPTFSLQSVEEIMKIVEEAKTPARVSRSIGAFGWGGGEDAEGKEEDAEEEVEEVEEEEDEEDEYDKTVKQVHASMGEVRVS

SEQ ID NO: 38260 - protein, 330 aa, Arabidopsis thaliana
  peptide (1)..(330): Ceres Seq. ID no. 12343444
  misc_feature (1)..(229): Pfam Name: Protein kinase domain Pfam Description: Protein kinase domain
  misc_feature (1)..(330): Homolog of NCBI NO: 19568098 NR Description: osmotic stress-activated protein kinase
  misc_feature (1)..(327): Homolog of NCBI NO: 2129803 NR Description: probable serine/threonine-specific protein kinase
  misc_feature (1)..(330): Homolog of NCBI NO: 1362026 NR Description: probable serine/threonine-specific protein kinase
  misc_feature (1)..(330): Homolog of NCBI NO: 15220251 NR Description: Ser/Thr kinase
  misc_feature (1)..(330): Homolog of NCBI NO: 15219836 NR Description: putative serine/threonine-protein kinase
  misc_feature (1)..(330): Homolog of NCBI NO: 21618062 NR Description: putative serine/threonine-protein kinase
MKYIERGPKIDENVAREIINHRSLRHPNIIRFKEVVLTPTHIAIAMEYAAGGELFERICSAGRFSEDEARYFFQQLISGVSYCHAMQICHRDLKLENTLLDGSPAPRLKICDFGYSKSSLLHSMPKSTVGTPAYIAPEVLSRGEYDGKMADVWSCGVTLYVMLVGAYPFEDQEDPKNFKKTIQRIMAVKYKIPDYVHISQDCKHLLSRIFVTNSNKRITIADIKKHPWFLKNLPRELTEIAQAAYFRKENPTFSLQSVEEIMKIVEEAKTPARVSRSIGAFGWGGGEDAEGKEEDAEEEVEEVEEEEDEEDEYDKTVKQVHASMGEVRVS

SEQ ID NO: 38261 - DNA, 1668 bp, Arabidopsis thaliana
  misc_feature (1)..(1668): Ceres Seq. ID no. 12575935
  misc_feature: MA Experiment ID: 20000171 Result: Up-regulated in Transcription
  misc_feature: MA Experiment 20000171 PARAMETER Experiment Name: At_42deg_Heat_P Parameter: Age (day) Value: 14
  misc_feature: MA Experiment 20000171 PARAMETER Experiment Name: At_42deg_Heat_P Parameter: Organism Value: A. thaliana
  misc_feature: MA Experiment 20000171 PARAMETER Experiment Name: At_42deg_Heat_P Parameter: Plant Line Value: WS
  misc_feature: MA Experiment 20000171 PARAMETER Experiment Name: At_42deg_Heat_P Parameter: Temperature (deg C) Value: 42 vs. 22
  misc_feature: MA Experiment 20000171 PARAMETER Experiment Name: At_42deg_Heat_P Parameter: Timepoint (hr) Value: 1
  misc_feature: MA Experiment 20000171 PARAMETER Experiment Name: At_42deg_Heat_P Parameter: Tissue Value: Aerial
  misc_feature: MA Experiment ID: 20000184 Result: Down-regulated in Transcription
  misc_feature: MA Experiment 20000184 PARAMETER Experiment Name: At_Shoots__P Parameter: Age (day) Value: 7
  misc_feature: MA Experiment 20000184 PARAMETER Experiment Name: At_Shoots__P Parameter: Tissue Value: Shoots vs. Whole Plant
  misc_feature: MA Experiment ID: 20000185 Result: Down-regulated in Transcription
  misc_feature: MA Experiment 20000185 PARAMETER Experiment Name: At_Roots__P Parameter: Age (day) Value: 7 vs. 21
  misc_feature: MA Experiment 20000185 PARAMETER Experiment Name: At_Roots__P Parameter: Organism Value: A. thaliana
  misc_feature: MA Experiment 20000185 PARAMETER Experiment Name: At_Roots__P Parameter: Tissue Value: Roots vs. Whole Plant
  misc_feature: MA Experiment ID: 20000227 Result: Up-regulated in Transcription
  misc_feature: MA Experiment 20000227 PARAMETER Experiment Name: At_Root-Tips-vs-Tops_P Parameter: Tissue Value: Root Tips vs. Root Tops
  misc_feature: MA Experiment ID: 20000438 Result: Down-regulated in Transcription
  misc_feature: MA Experiment 20000438 PARAMETER Experiment Name: At_Shoots__P Parameter: Age (day) Value: 14
  misc_feature: MA Experiment 20000438 PARAMETER Experiment Name: At_Shoots__P Parameter: Tissue Value: Shoots vs. Whole Plant
  misc_feature: MA Experiment ID: 20000439 Result: Down-regulated in Transcription
  misc_feature: MA Experiment 20000439 PARAMETER Experiment Name: At_Roots__P Parameter: Age (day) Value: 14 vs. 21
  misc_feature: MA Experiment 20000439 PARAMETER Experiment Name: At_Roots__P Parameter: Organism Value: A. thaliana
  misc_feature: MA Experiment 20000439 PARAMETER Experiment Name: At_Roots__P Parameter: Tissue Value: Roots vs. Whole Plant
  misc_feature: MA Experiment ID: 20000451 Result: Down-regulated in Transcription
  misc_feature: MA Experiment 20000451 PARAMETER Experiment Name: At_CS6879_Shoots-Roots_P Parameter: Age (day) Value: 14
  misc_feature: MA Experiment 20000451 PARAMETER Experiment Name: At_CS6879_Shoots-Roots_P Parameter: Organism Value: A. thaliana
  misc_feature: MA Experiment 20000451 PARAMETER Experiment Name: At_CS6879_Shoots-Roots_P Parameter: Plant Line Value: CS6879 vs. WS
  misc_feature: MA Experiment 20000451 PARAMETER Experiment Name: At_CS6879_Shoots-Roots_P Parameter: Tissue Value: Roots
  misc_feature: MA Experiment ID: 20000495 Result: Down-regulated in Transcription
  misc_feature: MA Experiment 20000495 PARAMETER Experiment Name: At_Guard_Cells_P Parameter: Harvest Date Value: 8/2/2002
  misc_feature: MA Experiment 20000495 PARAMETER Experiment Name: At_Guard_Cells_P Parameter: Organism Value: A. thaliana
  misc_feature: MA Experiment 20000495 PARAMETER Experiment Name: At_Guard_Cells_P Parameter: Tissue Value: Guard Cells vs. Leaves
  misc_feature: MA Experiment ID: 20001451 Result: Down-regulated in Transcription
  misc_feature: MA Experiment 20001451 PARAMETER Experiment Name: At_Far-red-induction_P Parameter: Age (day) Value: 7
  misc_feature: MA Experiment 20001451 PARAMETER Experiment Name: At_Far-red-induction_P Parameter: Light Value: Far-red vs. White
  misc_feature: MA Experiment 20001451 PARAMETER Experiment Name: At_Far-red-induction_P Parameter: Organism Value: A. thaliana
  misc_feature: MA Experiment 20001451 PARAMETER Experiment Name: At_Far-red-induction_P Parameter: Plant Line Value: Columbia
  misc_feature: MA Experiment 20001451 PARAMETER Experiment Name: At_Far-red-induction_P Parameter: Timepoint (hr) Value: 24
  misc_feature: MA Experiment 20001451 PARAMETER Experiment Name: At_Far-red-induction_P Parameter: Tissue Value: Whole Plant
aaaaccaggcagccactagaagaaggagagatattgagggagaagaatcacattgatagattcgccgccgatctagagccgttgattttcttaatcggaaaaagaaaatgagtggaagcagaaggaaggcgacgccggcgagtaggacgcgagtagggaattacgagatgggacgaactctcggagaaggaagcttcgctaaggtgaaatacgccaagaacaccgtcaccggagatcaagccgctatcaaaatcctcgaccgagaaaaggtcttccgtcacaaaatggtcgaacagcttaaaagagaaatatctacaatgaaactgattaaacatccaaatgtggttgaaatcattgaggttatggcgagcaaaacgaagatctatatcgttcttgagcttgtcaatggaggtgaactctttgataaaatcgcgcaacaagggaggcttaaggaggatgaagctcggagatattttcagcagctcatcaatgctgtggattactgccacagtcgaggtgtctaccacagagatctcaagcctgaaaatctgatccttgacgcaaatggggttttgaaagtctctgattttgggttaagcgccttctcacgacaagttcgggaagatggtttgcttcatacagcttgtggaacgccaaactacgttgcccctgaggttttgtcggacaaaggctatgacggtgcagcagcagatgtctggtcttgtggtgtcattctctttgtgcttatggctggttacttgccttttgatgagccgaatctcatgacattatacaaacgtatatgcaaggctgagtttagctgcccaccatggttctcgcaaggtgccaagagagtcatcaagcgtattctcgaacccaaccctattaccagaataagtattgcagagttgctcgaagatgaatggttcaagaaagggtacaagccgccatcatttgaccaagatgacgaggacataaccatagatgatgttgatgctgcttttagtaactccaaggaatgtcttgtaactgagaagaaggagaaacctgtatccatgaacgctttcgaacttatctctagctcaagcgagttcagtcttgaaaacttgttcgagaagcaagcgcaacttgtgaagaaagaaacgcggtttacttctcaacgatctgcgagtgaaataatgtcgaaaatggaagaaaccgcaaagccattaggctttaatgtccgtaaagacaactacaagataaaaatgaaaggagacaaaagtggtcgtaaaggtcagctctccgtagctacagaggtgtttgaagtggcgccatcattgcatgtggtagagcttaggaaaaccggtggtgataccctcgagtttcacaagttctacaaaaacttctcatctggattaaaggatgtagtctggaatactgatgcagccgctgaagaacaaaagcaataagaaataacaagttgttcaattcaaagtttttaatcaatgttgaacatgtataatgaatagtaaacattctggagttggcaatatacaagtattgctgacaaaagagccaaactagaactagaagtggtctatagaggtagatcaccataggttagtcaatagccacatatgtgatcatcctcaaactcggtttgaaacctataaatcaaagttcaaa

SEQ ID NO: 38262 - protein, 447 aa, Arabidopsis thaliana
  peptide (1)..(447): Ceres Seq. ID no. 12575936
  misc_feature (19)..(274): Pfam Name: Protein kinase domain Pfam Description: Protein kinase domain
  misc_feature (19)..(447): Homolog of NCBI NO: 23428550 NR Description: Serine/threonine Kinase [Persea americana]
  misc_feature (16)..(437): Homolog of NCBI NO: 34903780 NR Description: unnamed protein product [Oryza sativa (japonica
  misc_feature (8)..(439): Homolog of NCBI NO: 7446372 NR Description: probable serine/threonine kinase (EC 2.7.1.-)
  misc_feature (8)..(439): Homolog of NCBI NO: 7446371 NR Description: probable serine/threonine kinase (EC 2.7.1.-)
  misc_feature (8)..(444): Homolog of NCBI NO: 25387051 NR Description: probable serine/threonine kinase
  misc_feature (8)..(444): Homolog of NCBI NO: 18397430 NR Description: serine/threonine kinase, putative
  misc_feature (2)..(447): Homolog of NCBI NO: 34902248 NR Description: Putative serine/threonine kinase
  misc_feature (1)..(447): Homolog of NCBI NO: 25387057 NR Description: protein T25K16.13 [imported] - Arabidopsis
  misc_feature (1)..(447): Homolog of NCBI NO: 14423524 NR Description: similar to wpk4 protein kinase [Arabidopsis
  misc_feature (1)..(447): Homolog of NCBI NO: 15223317 NR Description: serine threonine kinase, putative
MSGSRRKATPASRTRVGNYEMGRTLGEGSFAKVKYAKNTVTGDQAAIKILDREKVFRHKMVEQLKREISTMKLIKHPNVVEIIEVMASKTKIYIVLELVNGGELFDKIAQQGRLKEDEARRYFQQLINAVDYCHSRGVYHRDLKPENLILDANGVLKVSDFGLSAFSRQVREDGLLHTACGTPNYVAPEVLSDKGYDGAAADVWSCGVILFVLMAGYLPFDEPNLMTLYKRICKAEFSCPPWFSQGAKRVIKRILEPNPITRISIAELLEDEWFKKGYKPPSFDQDDEDITIDDVDAAFSNSKECLVTEKKEKPVSMNAFELISSSSEFSLENLFEKQAQLVKKETRFTSQRSASEIMSKMEETAKPLGFNVRKDNYKIKMKGDKSGRKGQLSVATEVFEVAPSLHVVELRKTGGDTLEFHKFYKNFSSGLKDVVWNTDAAAEEQKQ

SEQ ID NO: 38263 - protein, 427 aa, Arabidopsis thaliana
  peptide (1)..(427): Ceres Seq. ID no. 12575937
  misc_feature (1)..(254): Pfam Name: Protein kinase domain Pfam Description: Protein kinase domain
  misc_feature (1)..(427): Homolog of NCBI NO: 23428550 NR Description: Serine/threonine Kinase [Persea americana]
  misc_feature (1)..(417): Homolog of NCBI NO: 34903780 NR Description: unnamed protein product [Oryza sativa (japonica
  misc_feature (1)..(419): Homolog of NCBI NO: 7446372 NR Description: probable serine/threonine kinase (EC 2.7.1.-)
  misc_feature (1)..(419): Homolog of NCBI NO: 7446371 NR Description: probable serine/threonine kinase (EC 2.7.1.-)
  misc_feature (1)..(424): Homolog of NCBI NO: 25387051 NR Description: probable serine/threonine kinase
  misc_feature (1)..(424): Homolog of NCBI NO: 18397430 NR Description: serine/threonine kinase, putative
  misc_feature (1)..(427): Homolog of NCBI NO: 34902248 NR Description: Putative serine/threonine kinase
  misc_feature (1)..(427): Homolog of NCBI NO: 25387057 NR Description: protein T25K16.13 [imported] - Arabidopsis
  misc_feature (1)..(427): Homolog of NCBI NO: 14423524 NR Description: similar to wpk4 protein kinase [Arabidopsis
  misc_feature (1)..(427): Homolog of NCBI NO: 15223317 NR Description: serine threonine kinase, putative
MGRTLGEGSFAKVKYAKNTVTGDQAAIKILDREKVFRHKMVEQLKREISTMKLIKHPNVVEIIEVMASKTKIYIVLELVNGGELFDKIAQQGRLKEDEARRYFQQLINAVDYCHSRGVYHRDLKPENLILDANGVLKVSDFGLSAFSRQVREDGLLHTACGTPNYVAPEVLSDKGYDGAAADVWSCGVILFVLMAGYLPFDEPNLMTLYKRICKAEFSCPPWFSQGAKRVIKRILEPNPITRISIAELLEDEWFKKGYKPPSFDQDDEDITIDDVDAAFSNSKECLVTEKKEKPVSMNAFELISSSSEFSLENLFEKQAQLVKKETRFTSQRSASEIMSKMEETAKPLGFNVRKDNYKIKMKGDKSGRKGQLSVATEVFEVAPSLHVVELRKTGGDTLEFHKFYKNFSSGLKDVVWNTDAAAEEQKQ

SEQ ID NO: 38264 - protein, 388 aa, Arabidopsis thaliana
  peptide (1)..(388): Ceres Seq. ID no. 12575938
  misc_feature (1)..(215): Pfam Name: Protein kinase domain Pfam Description: Protein kinase domain
  misc_feature (1)..(388): Homolog of NCBI NO: 23428550 NR Description: Serine/threonine Kinase [Persea americana]
  misc_feature (1)..(378): Homolog of NCBI NO: 34903780 NR Description: unnamed protein product [Oryza sativa (japonica
  misc_feature (1)..(380): Homolog of NCBI NO: 7446372 NR Description: probable serine/threonine kinase (EC 2.7.1.-)
  misc_feature (1)..(380): Homolog of NCBI NO: 7446371 NR Description: probable serine/threonine kinase (EC 2.7.1.-)
  misc_feature (1)..(385): Homolog of NCBI NO: 25387051 NR Description: probable serine/threonine kinase
  misc_feature (1)..(385): Homolog of NCBI NO: 18397430 NR Description: serine/threonine kinase, putative
  misc_feature (1)..(388): Homolog of NCBI NO: 34902248 NR Description: Putative serine/threonine kinase
  misc_feature (1)..(388): Homolog of NCBI NO: 25387057 NR Description: protein T25K16.13 [imported] - Arabidopsis
  misc_feature (1)..(388): Homolog of NCBI NO: 14423524 NR Description: similar to wpk4 protein kinase [Arabidopsis
  misc_feature (1)..(388): Homolog of NCBI NO: 15223317 NR Description: serine threonine kinase, putative
MVEQLKREISTMKLIKHPNVVEIIEVMASKTKIYIVLELVNGGELFDKIAQQGRLKEDEARRYFQQLINAVDYCHSRGVYHRDLKPENLILDANGVLKVSDFGLSAFSRQVREDGLLHTACGTPNYVAPEVLSDKGYDGAAADVWSCGVILFVLMAGYLPFDEPNLMTLYKRICKAEFSCPPWFSQGAKRVIKRILEPNPITRISIAELLEDEWFKKGYKPPSFDQDDEDITIDDVDAAFSNSKECLVTEKKEKPVSMNAFELISSSSEFSLENLFEKQAQLVKKETRFTSQRSASEIMSKMEETAKPLGFNVRKDNYKIKMKGDKSGRKGQLSVATEVFEVAPSLHVVELRKTGGDTLEFHKFYKNFSSGLKDVVWNTDAAAEEQKQ

SEQ ID NO: 38265 - DNA, 764 bp, Arabidopsis thaliana
  misc_feature (1)..(764): Ceres Seq. ID no. 12579449
  misc_feature: MA Experiment ID: 108434 Result: Down-regulated in Transcription
  misc_feature: MA Experiment 108434 PARAMETER Experiment Name: At_Root_Tips_cDNA_P Parameter: Tissue Value: Root Tips
  misc_feature: MA Experiment ID: 108461 Result: Up-regulated in Transcription
  misc_feature: MA Experiment 108461 PARAMETER Experiment Name: At_Germinating_Seeds_cDNA_P Parameter: Age (day) Value: 1 vs. 0
  misc_feature: MA Experiment 108461 PARAMETER Experiment Name: At_Germinating_Seeds_cDNA_P Parameter: Tissue Value: Germinating Seeds
  misc_feature: MA Experiment ID: 108463 Result: Up-regulated in Transcription
  misc_feature: MA Experiment 108463 PARAMETER Experiment Name: At_Germinating_Seeds_cDNA_P Parameter: Age (day) Value: 3 vs. 0
  misc_feature: MA Experiment 108463 PARAMETER Experiment Name: At_Germinating_Seeds_cDNA_P Parameter: Tissue Value: Germinating Seeds
  misc_feature: MA Experiment ID: 108464 Result: Up-regulated in Transcription
  misc_feature: MA Experiment 108464 PARAMETER Experiment Name: At_Germinating_Seeds_cDNA_P Parameter: Age (day) Value: 4 vs. 0
  misc_feature: MA Experiment 108464 PARAMETER Experiment Name: At_Germinating_Seeds_cDNA_P Parameter: Tissue Value: Germinating Seeds
  misc_feature: MA Experiment ID: 108489 Result: Up-regulated in Transcription
  misc_feature: MA Experiment ID: 108577 Result: Down-regulated in Transcription
  misc_feature: MA Experiment 108577 PARAMETER Experiment Name: At_42deg_Heat_cDNA_P Parameter: Temperature (deg C) Value: 42 vs. 22
  misc_feature: MA Experiment 108577 PARAMETER Experiment Name: At_42deg_Heat_cDNA_P Parameter: Timepoint (hr) Value: 6
  misc_feature: MA Experiment 108577 PARAMETER Experiment Name: At_42deg_Heat_cDNA_P Parameter: Tissue Value: Aerial
  misc_feature: MA Experiment ID: 20000030 Result: Down-regulated in Transcription
  misc_feature: MA Experiment 20000030 PARAMETER Experiment Name: At_CS6630_Roots_cDNA_P Parameter: Plant Line Value: CS6630 vs. WS
  misc_feature: MA Experiment 20000030 PARAMETER Experiment Name: At_CS6630_Roots_cDNA_P Parameter: Tissue Value: Roots
  misc_feature: MA Experiment ID: 20000224 Result: Down-regulated in Transcription
  misc_feature: MA Experiment ID: 20000234 Result: Down-regulated in Transcription
  misc_feature: MA Experiment 20000234 PARAMETER Experiment Name: At_Siliques_P Parameter: Age (day) Value: 21
  misc_feature: MA Experiment 20000234 PARAMETER Experiment Name: At_Siliques_P Parameter: Organism Value: A. thaliana
  misc_feature: MA Experiment 20000234 PARAMETER Experiment Name: At_Siliques_P Parameter: Plant Line Value: WS
  misc_feature: MA Experiment 20000234 PARAMETER Experiment Name: At_Siliques_P Parameter: Tissue Value: Less Than 5mm Siliques vs. Whole Plant
  misc_feature: MA Experiment ID: 20000573 Result: Up-regulated in Transcription
  misc_feature: MA Experiment 20000573 PARAMETER Experiment Name: At_100uM_ABA_Mutants__P Parameter: Organism Value: A. thaliana
  misc_feature: MA Experiment 20000573 PARAMETER Experiment Name: At_100uM_ABA_Mutants__P Parameter: Plant Line Value: CS22 vs. Ler wt
  misc_feature: MA Experiment 20000573 PARAMETER Experiment Name: At_100uM_ABA_Mutants__P Parameter: Timepoint (hr) Value: N/A
  misc_feature: MA Experiment 20000573 PARAMETER Experiment Name: At_100uM_ABA_Mutants__P Parameter: Tissue Value: Whole Plant
  misc_feature: MA Experiment 20000573 PARAMETER Experiment Name: At_100uM_ABA_Mutants__P Parameter: Treatment Value: None
  misc_feature: MA Experiment ID: 20000794 Result: Up-regulated in Transcription
  misc_feature: MA Experiment 20000794 PARAMETER Experiment Name: At_Petals_P Parameter: Age (day) Value: 23-25 days
  misc_feature: MA Experiment 20000794 PARAMETER Experiment Name: At_Petals_P Parameter: Plant Line Value: WS
  misc_feature: MA Experiment 20000794 PARAMETER Experiment Name: At_Petals_P Parameter: Tissue Value: Petals vs. Whole plant
  misc_feature: MA Experiment ID: 20001557 Result: Down-regulated in Transcription
  misc_feature: MA Experiment 20001557 PARAMETER Experiment Name: At_Drought_Soil_Dry_P Parameter: Age (day) Value: 27
  misc_feature: MA Experiment 20001557 PARAMETER Experiment Name: At_Drought_Soil_Dry_P Parameter: Organism Value: A. thaliana
  misc_feature: MA Experiment 20001557 PARAMETER Experiment Name: At_Drought_Soil_Dry_P Parameter: Plant Line Value: WS
  misc_feature: MA Experiment 20001557 PARAMETER Experiment Name: At_Drought_Soil_Dry_P Parameter: Post Timepoint (hr) Value: 3
  misc_feature: MA Experiment 20001557 PARAMETER Experiment Name: At_Drought_Soil_Dry_P Parameter: Post-Treatment Value: Re-Water vs. No Drought
  misc_feature: MA Experiment 20001557 PARAMETER Experiment Name: At_Drought_Soil_Dry_P Parameter: Timepoint (day) Value: 13
  misc_feature: MA Experiment 20001557 PARAMETER Experiment Name: At_Drought_Soil_Dry_P Parameter: Treatment Value: Drought vs. No Drought
  misc_feature: MA Experiment ID: 20001558 Result: Down-regulated in Transcription
  misc_feature: MA Experiment 20001558 PARAMETER Experiment Name: At_Drought_Soil_Dry_P Parameter: Age (day) Value: 27
  misc_feature: MA Experiment 20001558 PARAMETER Experiment Name: At_Drought_Soil_Dry_P Parameter: Organism Value: A. thaliana
  misc_feature: MA Experiment 20001558 PARAMETER Experiment Name: At_Drought_Soil_Dry_P Parameter: Plant Line Value: WS
  misc_feature: MA Experiment 20001558 PARAMETER Experiment Name: At_Drought_Soil_Dry_P Parameter: Post Timepoint (hr) Value: 6
  misc_feature: MA Experiment 20001558 PARAMETER Experiment Name: At_Drought_Soil_Dry_P Parameter: Post-Treatment Value: Re-Water vs. No Drought
  misc_feature: MA Experiment 20001558 PARAMETER Experiment Name: At_Drought_Soil_Dry_P Parameter: Timepoint (day) Value: 13
  misc_feature: MA Experiment 20001558 PARAMETER Experiment Name: At_Drought_Soil_Dry_P Parameter: Treatment Value: Drought vs. No Drought
  misc_feature: MA Experiment ID: 20001906 Result: Up-regulated in Transcription
  misc_feature: MA Experiment 20001906 PARAMETER Experiment Name: At_Drought_Reproduction_P Parameter: Age (day) Value: 35
  misc_feature: MA Experiment 20001906 PARAMETER Experiment Name: At_Drought_Reproduction_P Parameter: Organism Value: A. thaliana
  misc_feature: MA Experiment 20001906 PARAMETER Experiment Name: At_Drought_Reproduction_P Parameter: Plant Line Value: WS
  misc_feature: MA Experiment 20001906 PARAMETER Experiment Name: At_Drought_Reproduction_P Parameter: Timepoint (day) Value: 5
  misc_feature: MA Experiment 20001906 PARAMETER Experiment Name: At_Drought_Reproduction_P Parameter: Tissue Value: Siliques
  misc_feature: MA Experiment 20001906 PARAMETER Experiment Name: At_Drought_Reproduction_P Parameter: Treatment Value: Drought vs. No Drought
  misc_feature: MA Experiment ID: 20001908 Result: Up-regulated in Transcription
  misc_feature: MA Experiment 20001908 PARAMETER Experiment Name: At_Drought_Reproduction_P Parameter: Age (day) Value: 40
  misc_feature: MA Experiment 20001908 PARAMETER Experiment Name: At_Drought_Reproduction_P Parameter: Organism Value: A. thaliana
  misc_feature: MA Experiment 20001908 PARAMETER Experiment Name: At_Drought_Reproduction_P Parameter: Plant Line Value: WS
  misc_feature: MA Experiment 20001908 PARAMETER Experiment Name: At_Drought_Reproduction_P Parameter: Timepoint (day) Value: 10
  misc_feature: MA Experiment 20001908 PARAMETER Experiment Name: At_Drought_Reproduction_P Parameter: Tissue Value: Siliques
  misc_feature: MA Experiment 20001908 PARAMETER Experiment Name: At_Drought_Reproduction_P Parameter: Treatment Value: Drought vs. No Drought
accatgcatcatcatcattaggtctaatatcatgcgtccacaatacaaagacgtgaacgataaattagactcgacggccaagcacgaaaccaacagccatggcggtcgttataataatccttacgtccacattactagtcccacatcagcttctgataagaggtcgaaggataaggttcttgaggtgttgaatcgctgtgggaagaaagtagaggacgctactcgcaaagcggaagcattagtcggaggtttaaaagaccacctgaattttagtcctagcataagtgatgcagcaatggctaggctttctcaaggcactaagatgatcgttgaaggaggaccagagagagtgtttcaacgagagtttggtgttttagctgtagagaaacttttagattcgtttgtttgctacatatcgactacttcgggaccagtgaccggagtgatatacatttccaacagaagaatcgctttttgtagcgactatgccattcgtcttccttcttctgccggtggaaacggtgttgcggcatatttacaaggtggtgatggagtgggagaagataagtagcattagttcatcaacgaacgtgttgaagccaagtgagagatacgtgcatatggtgacacgagatgggtttgagttttggttcatgggctttgtctcctacatcgatgctttcaattgtctcaacaaagctctcctcaattcccgttgtgatcatgccatgtaatgtaatcaaattctaactaagaattttctt

SEQ ID NO: 38266 - protein, 189 aa, Arabidopsis thaliana
  peptide (1)..(189): Ceres Seq. ID no. 12579450
  misc_feature (116)..(178): Pfam Name: GRAM domain Pfam Description: GRAM domain
  misc_feature (43)..(171): Homolog of NCBI NO: 15237287 NR Description: ABA-responsive protein, putative; protein id:
  misc_feature (55)..(178): Homolog of NCBI NO: 34906818 NR Description: contains EST C91668(E31216)~similar to FH protein
  misc_feature (18)..(161): Homolog of NCBI NO: 26452129 NR Description: unknown protein [Arabidopsis thaliana]
  misc_feature (18)..(161): Homolog of NCBI NO: 21592789 NR Description: unknown [Arabidopsis thaliana]
  misc_feature (38)..(161): Homolog of NCBI NO: 15217869 NR Description: FH protein interacting protein FIP1
  misc_feature (18)..(161): Homolog of NCBI NO: 18399985 NR Description: Expressed protein
  misc_feature (28)..(161): Homolog of NCBI NO: 34902414 NR Description: Putative FH protein interacting protein FIP1
  misc_feature (24)..(164): Homolog of NCBI NO: 29788871 NR Description: putative ABA-responsive protein
  misc_feature (43)..(178): Homolog of NCBI NO: 20271007 NR Description: putative ABA-binding protein [Arabidopsis lyrata
  misc_feature (11)..(178): Homolog of NCBI NO: 15234255 NR Description: putative ABA-repsonsive protein; protein id:
PCIIIIRSNIMRPQYKDVNDKLDSTAKHETNSHGGRYNNPYVHITSPTSASDKRSKDKVLEVLNRCGKKVEDATRKAEALVGGLKDHLNFSPSISDAAMARLSQGTKMIVEGGPERVFQREFGVLAVEKLLDSFVCYISTTSGPVTGVIYISNRRIAFCSDYAIRLPSSAGGNGVAAYLQGGDGVGEDK

SEQ ID NO: 38267 - protein, 179 aa, Arabidopsis thaliana
  peptide (1)..(179): Ceres Seq. ID no. 12579451
  misc_feature (106)..(168): Pfam Name: GRAM domain Pfam Description: GRAM domain
  misc_feature (33)..(161): Homolog of NCBI NO: 15237287 NR Description: ABA-responsive protein, putative; protein id:
  misc_feature (45)..(168): Homolog of NCBI NO: 34906818 NR Description: contains EST C91668(E31216)~similar to FH protein
  misc_feature (8)..(151): Homolog of NCBI NO: 26452129 NR Description: unknown protein [Arabidopsis thaliana]
  misc_feature (8)..(151): Homolog of NCBI NO: 21592789 NR Description: unknown [Arabidopsis thaliana]
  misc_feature (28)..(151): Homolog of NCBI NO: 15217869 NR Description: FH protein interacting protein FIP1
  misc_feature (8)..(151): Homolog of NCBI NO: 18399985 NR Description: Expressed protein
  misc_feature (18)..(151): Homolog of NCBI NO: 34902414 NR Description: Putative FH protein interacting protein FIP1
  misc_feature (14)..(154): Homolog of NCBI NO: 29788871 NR Description: putative ABA-responsive protein
  misc_feature (33)..(168): Homolog of NCBI NO: 20271007 NR Description: putative ABA-binding protein [Arabidopsis lyrata
  misc_feature (1)..(168): Homolog of NCBI NO: 15234255 NR Description: putative ABA-repsonsive protein; protein id:
MRPQYKDVNDKLDSTAKHETNSHGGRYNNPYVHITSPTSASDKRSKDKVLEVLNRCGKKVEDATRKAEALVGGLKDHLNFSPSISDAAMARLSQGTKMIVEGGPERVFQREFGVLAVEKLLDSFVCYISTTSGPVTGVIYISNRRIAFCSDYAIRLPSSAGGNGVAAYLQGGDGVGEDK

SEQ ID NO: 38268 - DNA, 651 bp, Arabidopsis thaliana
  misc_feature (1)..(651): Ceres Seq. ID no. 12370134
  misc_feature: MA Experiment ID: 108433 Result: Up-regulated in Transcription
  misc_feature: MA Experiment 108433 PARAMETER Experiment Name: At_rhl_Mutant2_cDNA_P Parameter: Age (day) Value: 7
  misc_feature: MA Experiment 108433 PARAMETER Experiment Name: At_rhl_Mutant2_cDNA_P Parameter: Organism Value: A. thaliana
  misc_feature: MA Experiment 108433 PARAMETER Experiment Name: At_rhl_Mutant2_cDNA_P Parameter: Plant Line Value: rhl Mutant vs. wt landsburg
  misc_feature: MA Experiment 108433 PARAMETER Experiment Name: At_rhl_Mutant2_cDNA_P Parameter: Tissue Value: Roots
  misc_feature: MA Experiment ID: 20000087 Result: Up-regulated in Transcription
  misc_feature: MA Experiment 20000087 PARAMETER Experiment Name: At_100uM_ABA_Mutants_cDNA_P Parameter: Plant Line Value: WS
  misc_feature: MA Experiment 20000087 PARAMETER Experiment Name: At_100uM_ABA_Mutants_cDNA_P Parameter: Timepoint (hr) Value: 6
  misc_feature: MA Experiment 20000087 PARAMETER Experiment Name: At_100uM_ABA_Mutants_cDNA_P Parameter: Tissue Value: Aerial
  misc_feature: MA Experiment 20000087 PARAMETER Experiment Name: At_100uM_ABA_Mutants_cDNA_P Parameter: Treatment Value: 100uM ABA vs. No Treatment
  misc_feature: MA Experiment ID: 20000111 Result: Up-regulated in Transcription
  misc_feature: MA Experiment 20000111 PARAMETER Experiment Name: At_42deg_Heat_cDNA_P Parameter: Temperature (deg C) Value: 42 vs. 22
  misc_feature: MA Experiment 20000111 PARAMETER Experiment Name: At_42deg_Heat_cDNA_P Parameter: Timepoint (hr) Value: 6
  misc_feature: MA Experiment 20000111 PARAMETER Experiment Name: At_42deg_Heat_cDNA_P Parameter: Tissue Value: Aerial
  misc_feature: MA Experiment ID: 20000112 Result: Up-regulated in Transcription
  misc_feature: MA Experiment 20000112 PARAMETER Experiment Name: At_42deg_Heat_cDNA_P Parameter: Temperature (deg C) Value: 42 vs. 22
  misc_feature: MA Experiment 20000112 PARAMETER Experiment Name: At_42deg_Heat_cDNA_P Parameter: Timepoint (hr) Value: 2
  misc_feature: MA Experiment 20000112 PARAMETER Experiment Name: At_42deg_Heat_cDNA_P Parameter: Tissue Value: Aerial
  misc_feature: MA Experiment ID: 20000173 Result: Up-regulated in Transcription
  misc_feature: MA Experiment 20000173 PARAMETER Experiment Name: At_42deg_Heat_P Parameter: Age (day) Value: 14
  misc_feature: MA Experiment 20000173 PARAMETER Experiment Name: At_42deg_Heat_P Parameter: Organism Value: A. thaliana
  misc_feature: MA Experiment 20000173 PARAMETER Experiment Name: At_42deg_Heat_P Parameter: Plant Line Value: WS
  misc_feature: MA Experiment 20000173 PARAMETER Experiment Name: At_42deg_Heat_P Parameter: Temperature (deg C) Value: 42 vs. 22
  misc_feature: MA Experiment 20000173 PARAMETER Experiment Name: At_42deg_Heat_P Parameter: Timepoint (hr) Value: 6
  misc_feature: MA Experiment 20000173 PARAMETER Experiment Name: At_42deg_Heat_P Parameter: Tissue Value: Aerial
atcacgatcgcaacaatggcggctgctgcgaaggagatcctacggcgaccagtggcggcaacaataaggctaaccgttccggcgggaggagcgaggccagccccaccggtaggtccggcgctaggtcagtacaggcttaacctgatggctttctgcaaagacttcaacgctaggactcaaaagtacaaaccagacactccgatggccgtgacgataacggcgttcaaggacaactctttcgaattcaccgtcaagtctccgacggtgtcgtggtacatcaagaaagcagctggagtcgataaaggaagcacacgcccgggtcatttgtcggtgacgacgctatcggtgagacacgtgtacgagatcgcgaaggtgaagcagacggatccgttttgtcagtatatgccgttggaatcgatttgcaaatccatcattggtactgctaattctatgggtatcaagatcgttcaggatttggagtgattttagggtttctgatgaaagagtggaatcaatttgcttctggtaaacgtctgtgctttgagtagtaaagtataaaccatgaatgaatttcacagattgttctgtgttttggtgttacttccattgtgttgtttgtttcaatggataattgagctccaaaagctttcc

SEQ ID NO: 38269 - protein, 160 aa, Arabidopsis thaliana
  peptide (1)..(160): Ceres Seq. ID no. 12370135
  misc_feature (85)..(155): Pfam Name: Ribosomal protein L11, RNA binding domain Pfam Description: Ribosomal protein L11, RNA binding domain
  misc_feature (3)..(158): Homolog of NCBI NO: 25306275 NR Description: mitochondrial ribosomal protein L11 isoform c
  misc_feature (14)..(155): Homolog of NCBI NO: 33594733 NR Description: 50S ribosomal protein L11 [Bordetella
  misc_feature (13)..(159): Homolog of NCBI NO: 33520004 NR Description: 50S ribosomal subunit protein L11
  misc_feature (14)..(157): Homolog of NCBI NO: 22966134 NR Description: hypothetical protein [Rhodospirillum rubrum]
  misc_feature (3)..(159): Homolog of NCBI NO: 7705618 NR Description: mitochondrial ribosomal protein L11 isoform a
  misc_feature (14)..(155): Homolog of NCBI NO: 15606945 NR Description: ribosomal protein L11 [Aquifex aeolicus]
  misc_feature (22)..(156): Homolog of NCBI NO: 19115007 NR Description: probable 50S ribosomal protein L11
  misc_feature (8)..(159): Homolog of NCBI NO: 15823668 NR Description: mitochondrial ribosomal protein L11 [Triticum
  misc_feature (6)..(159): Homolog of NCBI NO: 37535204 NR Description: putative ribosomal protein L11
  misc_feature (6)..(160): Homolog of NCBI NO: 15237029 NR Description: ribosomal protein L11 homolog
ITIATMAAAAKEILRRPVAATIRLTVPAGGARPAPPVGPALGQYRLNLMAFCKDFNARTQKYKPDTPMAVTITAFKDNSFEFTVKSPTVSWYIKKAAGVDKGSTRPGHLSVTTLSVRHVYEIAKVKQTDPFCQYMPLESICKSIIGTANSMGIKIVQDLE

SEQ ID NO: 38270 - protein, 155 aa, Arabidopsis thaliana
  peptide (1)..(155): Ceres Seq. ID no. 12370136
  misc_feature (80)..(150): Pfam Name: Ribosomal protein L11, RNA binding domain Pfam Description: Ribosomal protein L11, RNA binding domain
  misc_feature (1)..(153): Homolog of NCBI NO: 25306275 NR Description: mitochondrial ribosomal protein L11 isoform c
  misc_feature (9)..(150): Homolog of NCBI NO: 33594733 NR Description: 50S ribosomal protein L11 [Bordetella
  misc_feature (8)..(154): Homolog of NCBI NO: 33520004 NR Description: 50S ribosomal subunit protein L11
  misc_feature (9)..(152): Homolog of NCBI NO: 22966134 NR Description: hypothetical protein [Rhodospirillum rubrum]
  misc_feature (1)..(154): Homolog of NCBI NO: 7705618 NR Description: mitochondrial ribosomal protein L11 isoform a
  misc_feature (9)..(150): Homolog of NCBI NO: 15606945 NR Description: ribosomal protein L11 [Aquifex aeolicus]
  misc_feature (17)..(151): Homolog of NCBI NO: 19115007 NR Description: probable 50S ribosomal protein L11
  misc_feature (3)..(154): Homolog of NCBI NO: 15823668 NR Description: mitochondrial ribosomal protein L11 [Triticum
  misc_feature (1)..(154): Homolog of NCBI NO: 37535204 NR Description: putative ribosomal protein L11
  misc_feature (1)..(155): Homolog of NCBI NO: 15237029 NR Description: ribosomal protein L11 homolog
MAAAAKEILRRPVAATIRLTVPAGGARPAPPVGPALGQYRLNLMAFCKDFNARTQKYKPDTPMAVTITAFKDNSFEFTVKSPTVSWYIKKAAGVDKGSTRPGHLSVTTLSVRHVYEIAKVKQTDPFCQYMPLESICKSIIGTANSMGIKIVQDLE

SEQ ID NO: 38271 - protein, 112 aa, Arabidopsis thaliana
  peptide (1)..(112): Ceres Seq. ID no. 12370137
  misc_feature (37)..(107): Pfam Name: Ribosomal protein L11, RNA binding domain Pfam Description: Ribosomal protein L11, RNA binding domain
  misc_feature (1)..(110): Homolog of NCBI NO: 25306275 NR Description: mitochondrial ribosomal protein L11 isoform c
  misc_feature (1)..(107): Homolog of NCBI NO: 33594733 NR Description: 50S ribosomal protein L11 [Bordetella
  misc_feature (1)..(111): Homolog of NCBI NO: 33520004 NR Description: 50S ribosomal subunit protein L11
  misc_feature (1)..(109): Homolog of NCBI NO: 22966134 NR Description: hypothetical protein [Rhodospirillum rubrum]
  misc_feature (1)..(111): Homolog of NCBI NO: 7705618 NR Description: mitochondrial ribosomal protein L11 isoform a
  misc_feature (1)..(107): Homolog of NCBI NO: 15606945 NR Description: ribosomal protein L11 [Aquifex aeolicus]
  misc_feature (1)..(108): Homolog of NCBI NO: 19115007 NR Description: probable 50S ribosomal protein L11
  misc_feature (1)..(111): Homolog of NCBI NO: 15823668 NR Description: mitochondrial ribosomal protein L11 [Triticum
  misc_feature (1)..(111): Homolog of NCBI NO: 37535204 NR Description: putative ribosomal protein L11
  misc_feature (1)..(112): Homolog of NCBI NO: 15237029 NR Description: ribosomal protein L11 homolog
MAFCKDFNARTQKYKPDTPMAVTITAFKDNSFEFTVKSPTVSWYIKKAAGVDKGSTRPGHLSVTTLSVRHVYEIAKVKQTDPFCQYMPLESICKSIIGTANSMGIKIVQDLE

SEQ ID NO: 38272 - DNA, 901 bp, Arabidopsis thaliana
  misc_feature (1)..(901): Ceres Seq. ID no. 13487970
  misc_feature: MA Experiment ID: 108501 Result: Down-regulated in Transcription
  misc_feature: MA Experiment 108501 PARAMETER Experiment Name: At_ap2_floral_buds_cDNA_P Parameter: Plant Line Value: ap2 (Ler.)
  misc_feature: MA Experiment 108501 PARAMETER Experiment Name: At_ap2_floral_buds_cDNA_P Parameter: Tissue Value: Closed Flower
  misc_feature: MA Experiment ID: 20000184 Result: Down-regulated in Transcription
  misc_feature: MA Experiment 20000184 PARAMETER Experiment Name: At_Shoots__P Parameter: Age (day) Value: 7
  misc_feature: MA Experiment 20000184 PARAMETER Experiment Name: At_Shoots__P Parameter: Tissue Value: Shoots vs. Whole Plant
  misc_feature: MA Experiment ID: 20000794 Result: Up-regulated in Transcription
  misc_feature: MA Experiment 20000794 PARAMETER Experiment Name: At_Petals_P Parameter: Age (day) Value: 23-25 days
  misc_feature: MA Experiment 20000794 PARAMETER Experiment Name: At_Petals_P Parameter: Plant Line Value: WS
  misc_feature: MA Experiment 20000794 PARAMETER Experiment Name: At_Petals_P Parameter: Tissue Value: Petals vs. Whole plant
aacatatccattttgggaaaccataaattcccaaatgtcattcgccgaggaatttgaagctaatcttgtttcgctggcccatgttttgcagaagaaatatgctctcctgcgcgatttggataaaagtttgcaagaaaaccaacgacaaaatgaacaacgctgtgaaaaagaaatagaggatataagaaggggcagagctggaaatatcacacctaatacctctcttacaaagttctcagaggaagcacttgatgaacagaaacacagtgtccggattgctgacgagaaagtcacactggctatgcaggcatatgatctggtggatatgcatgttcagcaacttgaccagtatatgaaaaaatccggcgaagtgatccgcaaagagaaagaagctgccgctgcgacattagaactggagaacaacgggaaagccgggaatgctggtgaaggtggaagaggagggcgaaaaaagacaaggctagcaacagcagcgtcaacagcagcagcatcaactgggatgacttcaagtaatatggatctggatctgcctgtggatccaaacgaaccaacttactgcatctgcaaccaagttagctttggcgagatggttgcgtgtgacaacaatgcgtgcaagattgagtggttccatttcggttgcgtcggtctgaaagaacaacccaaggggaaatggtactgcccggagtgtgctacagtaaagaagagcaggaaaggtcgatgatttgaatgttcatgtctgctaataatccaaacagcttcatcatatctactgtaatccaaacagtttagtatatcaactcatgtaagatgttaccatgttgactataaattgtagaagtcttgtttcgttctttgtttgacaaaattaataactgagtttggg

SEQ ID NO: 38273 - protein, 245 aa, Arabidopsis thaliana
  peptide (1)..(245): Ceres Seq. ID no. 13487971
  misc_feature (191)..(238): Pfam Name: PHD-finger Pfam Description: PHD-finger
  misc_feature (174)..(245): Homolog of NCBI NO: 34855011 NR Description: similar to inhibitor of growth family, member 3
  misc_feature (8)..(120): Homolog of NCBI NO: 34855011 NR Description: similar to inhibitor of growth family, member 3
  misc_feature (174)..(245): Homolog of NCBI NO: 37682153 NR Description: inhibitor of growth family, member 3 [Danio rerio]
  misc_feature (12)..(120): Homolog of NCBI NO: 37682153 NR Description: inhibitor of growth family, member 3 [Danio rerio]
  misc_feature (174)..(245): Homolog of NCBI NO: 28278108 NR Description: Similar to inhibitor of growth family, member 3
  misc_feature (12)..(120): Homolog of NCBI NO: 28278108 NR Description: Similar to inhibitor of growth family, member 3
  misc_feature (12)..(132): Homolog of NCBI NO: 29367421 NR Description: putative PHD-finger protein
  misc_feature (121)..(245): Homolog of NCBI NO: 29367421 NR Description: putative PHD-finger protein
  misc_feature (86)..(245): Homolog of NCBI NO: 28393138 NR Description: putative PHD-finger protein [Arabidopsis thaliana]
  misc_feature (12)..(245): Homolog of NCBI NO: 18404002 NR Description: PHD-finger protein -related [Arabidopsis
TYPFWETINSQMSFAEEFEANLVSLAHVLQKKYALLRDLDKSLQENQRQNEQRCEKEIEDIRRGRAGNITPNTSLTKFSEEALDEQKHSVRIADEKVTLAMQAYDLVDMHVQQLDQYMKKSGEVIRKEKEAAAATLELENNGKAGNAGEGGRGGRKKTRLATAASTAAASTGMTSSNMDLDLPVDPNEPTYCICNQVSFGEMVACDNNACKIEWFHFGCVGLKEQPKGKWYCPECATVKKSRKGR

SEQ ID NO: 38274 - protein, 234 aa, Arabidopsis thaliana
  peptide (1)..(234): Ceres Seq. ID no. 13487972
  misc_feature (180)..(227): Pfam Name: PHD-finger Pfam Description: PHD-finger
  misc_feature (163)..(234): Homolog of NCBI NO: 34855011 NR Description: similar to inhibitor of growth family, member 3
  misc_feature (1)..(109): Homolog of NCBI NO: 34855011 NR Description: similar to inhibitor of growth family, member 3
  misc_feature (163)..(234): Homolog of NCBI NO: 37682153 NR Description: inhibitor of growth family, member 3 [Danio rerio]
  misc_feature (1)..(109): Homolog of NCBI NO: 37682153 NR Description: inhibitor of growth family, member 3 [Danio rerio]
  misc_feature (163)..(234): Homolog of NCBI NO: 28278108 NR Description: Similar to inhibitor of growth family, member 3
  misc_feature (1)..(109): Homolog of NCBI NO: 28278108 NR Description: Similar to inhibitor of growth family, member 3
  misc_feature (1)..(121): Homolog of NCBI NO: 29367421 NR Description: putative PHD-finger protein
  misc_feature (110)..(234): Homolog of NCBI NO: 29367421 NR Description: putative PHD-finger protein
  misc_feature (75)..(234): Homolog of NCBI NO: 28393138 NR Description: putative PHD-finger protein [Arabidopsis thaliana]
  misc_feature (1)..(234): Homolog of NCBI NO: 18404002 NR Description: PHD-finger protein -related [Arabidopsis
MSFAEEFEANLVSLAHVLQKKYALLRDLDKSLQENQRQNEQRCEKEIEDIRRGRAGNITPNTSLTKFSEEALDEQKHSVRIADEKVTLAMQAYDLVDMHVQQLDQYMKKSGEVIRKEKEAAAATLELENNGKAGNAGEGGRGGRKKTRLATAASTAAASTGMTSSNMDLDLPVDPNEPTYCICNQVSFGEMVACDNNACKIEWFHFGCVGLKEQPKGKWYCPECATVKKSRKGR

SEQ ID NO: 38275 - protein, 145 aa, Arabidopsis thaliana
  peptide (1)..(145): Ceres Seq. ID no. 13487973
  misc_feature (91)..(138): Pfam Name: PHD-finger Pfam Description: PHD-finger
  misc_feature (74)..(145): Homolog of NCBI NO: 34855011 NR Description: similar to inhibitor of growth family, member 3
  misc_feature (1)..(20): Homolog of NCBI NO: 34855011 NR Description: similar to inhibitor of growth family, member 3
  misc_feature (74)..(145): Homolog of NCBI NO: 37682153 NR Description: inhibitor of growth family, member 3 [Danio rerio]
  misc_feature (1)..(20): Homolog of NCBI NO: 37682153 NR Description: inhibitor of growth family, member 3 [Danio rerio]
  misc_feature (74)..(145): Homolog of NCBI NO: 28278108 NR Description: Similar to inhibitor of growth family, member 3
  misc_feature (1)..(20): Homolog of NCBI NO: 28278108 NR Description: Similar to inhibitor of growth family, member 3
  misc_feature (1)..(32): Homolog of NCBI NO: 29367421 NR Description: putative PHD-finger protein
  misc_feature (21)..(145): Homolog of NCBI NO: 29367421 NR Description: putative PHD-finger protein
  misc_feature (1)..(145): Homolog of NCBI NO: 28393138 NR Description: putative PHD-finger protein [Arabidopsis thaliana]
  misc_feature (1)..(145): Homolog of NCBI NO: 18404002 NR Description: PHD-finger protein -related [Arabidopsis
MQAYDLVDMHVQQLDQYMKKSGEVIRKEKEAAAATLELENNGKAGNAGEGGRGGRKKTRLATAASTAAASTGMTSSNMDLDLPVDPNEPTYCICNQVSFGEMVACDNNACKIEWFHFGCVGLKEQPKGKWYCPECATVKKSRKGR

SEQ ID NO: 38276 - DNA, 1617 bp, Arabidopsis thaliana
  misc_feature (1)..(1617): Ceres Seq. ID no. 13489016
  misc_feature: MA Experiment ID: 108435 Result: Down-regulated in Transcription
  misc_feature: MA Experiment 108435 PARAMETER Experiment Name: At_stm_Mutants_cDNA_P Parameter: Plant Line Value: wt Landsburg vs stm
  misc_feature: MA Experiment 108435 PARAMETER Experiment Name: At_stm_Mutants_cDNA_P Parameter: Tissue Value: Shoot Apical Meristem Region
  misc_feature: MA Experiment ID: 108461 Result: Up-regulated in Transcription
  misc_feature: MA Experiment 108461 PARAMETER Experiment Name: At_Germinating_Seeds_cDNA_P Parameter: Age (day) Value: 1 vs. 0
  misc_feature: MA Experiment 108461 PARAMETER Experiment Name: At_Germinating_Seeds_cDNA_P Parameter: Tissue Value: Germinating Seeds
  misc_feature: MA Experiment ID: 108463 Result: Up-regulated in Transcription
  misc_feature: MA Experiment 108463 PARAMETER Experiment Name: At_Germinating_Seeds_cDNA_P Parameter: Age (day) Value: 3 vs. 0
  misc_feature: MA Experiment 108463 PARAMETER Experiment Name: At_Germinating_Seeds_cDNA_P Parameter: Tissue Value: Germinating Seeds
  misc_feature: MA Experiment ID: 108464 Result: Up-regulated in Transcription
  misc_feature: MA Experiment 108464 PARAMETER Experiment Name: At_Germinating_Seeds_cDNA_P Parameter: Age (day) Value: 4 vs. 0
  misc_feature: MA Experiment 108464 PARAMETER Experiment Name: At_Germinating_Seeds_cDNA_P Parameter: Tissue Value: Germinating Seeds
  misc_feature: MA Experiment ID: 108561 Result: Up-regulated in Transcription
  misc_feature: MA Experiment 108561 PARAMETER Experiment Name: At_100uM_ABA_cDNA_P Parameter: Timepoint (hr) Value: 6
  misc_feature: MA Experiment 108561 PARAMETER Experiment Name: At_100uM_ABA_cDNA_P Parameter: Tissue Value: Aerial
  misc_feature: MA Experiment 108561 PARAMETER Experiment Name: At_100uM_ABA_cDNA_P Parameter: Treatment Value: 100uM ABA vs. No Treatment
  misc_feature: MA Experiment ID: 108585 Result: Down-regulated in Transcription
  misc_feature: MA Experiment 108585 PARAMETER Experiment Name: At_5mM_NaNP_cDNA_P Parameter: Timepoint (hr) Value: 6
  misc_feature: MA Experiment 108585 PARAMETER Experiment Name: At_5mM_NaNP_cDNA_P Parameter: Tissue Value: Aerial
  misc_feature: MA Experiment 108585 PARAMETER Experiment Name: At_5mM_NaNP_cDNA_P Parameter: Treatment Value: null
  misc_feature: MA Experiment ID: 108605 Result: Up-regulated in Transcription
  misc_feature: MA Experiment 108605 PARAMETER Experiment Name: At_100uM_ABA_cDNA_P Parameter: Timepoint (hr) Value: 6
  misc_feature: MA Experiment 108605 PARAMETER Experiment Name: At_100uM_ABA_cDNA_P Parameter: Tissue Value: Aerial
  misc_feature: MA Experiment 108605 PARAMETER Experiment Name: At_100uM_ABA_cDNA_P Parameter: Treatment Value: 100uM ABA vs. No Treatment
  misc_feature: MA Experiment ID: 108607 Result: Up-regulated in Transcription
  misc_feature: MA Experiment 108607 PARAMETER Experiment Name: At_100uM_ABA_cDNA_P Parameter: Timepoint (hr) Value: 4
  misc_feature: MA Experiment 108607 PARAMETER Experiment Name: At_100uM_ABA_cDNA_P Parameter: Tissue Value: Aerial
  misc_feature: MA Experiment 108607 PARAMETER Experiment Name: At_100uM_ABA_cDNA_P Parameter: Treatment Value: 100uM ABA vs. No Treatment
  misc_feature: MA Experiment ID: 20000030 Result: Up-regulated in Transcription
  misc_feature: MA Experiment 20000030 PARAMETER Experiment Name: At_CS6630_Roots_cDNA_P Parameter: Plant Line Value: CS6630 vs. WS
  misc_feature: MA Experiment 20000030 PARAMETER Experiment Name: At_CS6630_Roots_cDNA_P Parameter: Tissue Value: Roots
  misc_feature: MA Experiment ID: 20000068 Result: Up-regulated in Transcription
  misc_feature: MA Experiment ID: 20000069 Result: Up-regulated in Transcription
  misc_feature: MA Experiment 20000069 PARAMETER Experiment Name: At_100uM_ABA_Mutants_cDNA_P Parameter: Plant Line Value: CS23
  misc_feature: MA Experiment 20000069 PARAMETER Experiment Name: At_100uM_ABA_Mutants_cDNA_P Parameter: Timepoint (hr) Value: 6
  misc_feature: MA Experiment 20000069 PARAMETER Experiment Name: At_100uM_ABA_Mutants_cDNA_P Parameter: Tissue Value: Aerial
  misc_feature: MA Experiment 20000069 PARAMETER Experiment Name: At_100uM_ABA_Mutants_cDNA_P Parameter: Treatment Value: 100uM ABA vs. No Treatment
  misc_feature: MA Experiment ID: 20000070 Result: Up-regulated in Transcription
  misc_feature: MA Experiment 20000070 PARAMETER Experiment Name: At_100uM_ABA_Mutants_cDNA_P Parameter: Plant Line Value: CS24
  misc_feature: MA Experiment 20000070 PARAMETER Experiment Name: At_100uM_ABA_Mutants_cDNA_P Parameter: Timepoint (hr) Value: 6
  misc_feature: MA Experiment 20000070 PARAMETER Experiment Name: At_100uM_ABA_Mutants_cDNA_P Parameter: Tissue Value: Aerial
  misc_feature: MA Experiment 20000070 PARAMETER Experiment Name: At_100uM_ABA_Mutants_cDNA_P Parameter: Treatment Value: 100uM ABA vs. No Treatment
  misc_feature: MA Experiment ID: 20000071 Result: Up-regulated in Transcription
  misc_feature: MA Experiment 20000071 PARAMETER Experiment Name: At_100uM_ABA_Mutants_cDNA_P Parameter: Plant Line Value: CS8104
  misc_feature: MA Experiment 20000071 PARAMETER Experiment Name: At_100uM_ABA_Mutants_cDNA_P Parameter: Timepoint (hr) Value: 6
  misc_feature: MA Experiment 20000071 PARAMETER Experiment Name: At_100uM_ABA_Mutants_cDNA_P Parameter: Tissue Value: Aerial
  misc_feature: MA Experiment 20000071 PARAMETER Experiment Name: At_100uM_ABA_Mutants_cDNA_P Parameter: Treatment Value: 100uM ABA vs. No Treatment
  misc_feature: MA Experiment ID: 20000072 Result: Up-regulated in Transcription
  misc_feature: MA Experiment 20000072 PARAMETER Experiment Name: At_100uM_ABA_Mutants_cDNA_P Parameter: Plant Line Value: CS8105
  misc_feature: MA Experiment 20000072 PARAMETER Experiment Name: At_100uM_ABA_Mutants_cDNA_P Parameter: Timepoint (hr) Value: 6
  misc_feature: MA Experiment 20000072 PARAMETER Experiment Name: At_100uM_ABA_Mutants_cDNA_P Parameter: Tissue Value: Aerial
  misc_feature: MA Experiment 20000072 PARAMETER Experiment Name: At_100uM_ABA_Mutants_cDNA_P Parameter: Treatment Value: 100uM ABA vs. No Treatment
  misc_feature: MA Experiment ID: 20000088 Result: Up-regulated in Transcription
  misc_feature: MA Experiment 20000088 PARAMETER Experiment Name: At_100uM_ABA_Mutants_cDNA_P Parameter: Plant Line Value: Landsberg
  misc_feature: MA Experiment 20000088 PARAMETER Experiment Name: At_100uM_ABA_Mutants_cDNA_P Parameter: Timepoint (hr) Value: 6
  misc_feature: MA Experiment 20000088 PARAMETER Experiment Name: At_100uM_ABA_Mutants_cDNA_P Parameter: Tissue Value: Aerial
  misc_feature: MA Experiment 20000088 PARAMETER Experiment Name: At_100uM_ABA_Mutants_cDNA_P Parameter: Treatment Value: 100uM ABA vs. No Treatment
  misc_feature: MA Experiment ID: 20000089 Result: Up-regulated in Transcription
  misc_feature: MA Experiment ID: 20000117 Result: Up-regulated in Transcription
  misc_feature: MA Experiment 20000117 PARAMETER Experiment Name: At_100uM_ABA_Mutants_cDNA_P Parameter: Plant Line Value: Columbia
  misc_feature: MA Experiment 20000117 PARAMETER Experiment Name: At_100uM_ABA_Mutants_cDNA_P Parameter: Timepoint (hr) Value: 6
  misc_feature: MA Experiment 20000117 PARAMETER Experiment Name: At_100uM_ABA_Mutants_cDNA_P Parameter: Tissue Value: Aerial
  misc_feature: MA Experiment 20000117 PARAMETER Experiment Name: At_100uM_ABA_Mutants_cDNA_P Parameter: Treatment Value: 100uM ABA vs. No Treatment
  misc_feature: MA Experiment ID: 20000169 Result: Up-regulated in Transcription
  misc_feature: MA Experiment 20000169 PARAMETER Experiment Name: At_100uM_ABA_P Parameter: Age (day) Value: 14
  misc_feature: MA Experiment 20000169 PARAMETER Experiment Name: At_100uM_ABA_P Parameter: Organism Value: A. thaliana
  misc_feature: MA Experiment 20000169 PARAMETER Experiment Name: At_100uM_ABA_P Parameter: Plant Line Value: WS
  misc_feature: MA Experiment 20000169 PARAMETER Experiment Name: At_100uM_ABA_P Parameter: Timepoint (hr) Value: 6
  misc_feature: MA Experiment 20000169 PARAMETER Experiment Name: At_100uM_ABA_P Parameter: Tissue Value: Aerial
  misc_feature: MA Experiment 20000169 PARAMETER Experiment Name: At_100uM_ABA_P Parameter: Treatment Value: 100uM ABA vs. No Treatment
  misc_feature: MA Experiment ID: 20000173 Result: Down-regulated in Transcription
  misc_feature: MA Experiment 20000173 PARAMETER Experiment Name: At_42deg_Heat_P Parameter: Age (day) Value: 14
  misc_feature: MA Experiment 20000173 PARAMETER Experiment Name: At_42deg_Heat_P Parameter: Organism Value: A. thaliana
  misc_feature: MA Experiment 20000173 PARAMETER Experiment Name: At_42deg_Heat_P Parameter: Plant Line Value: WS
  misc_feature: MA Experiment 20000173 PARAMETER Experiment Name: At_42deg_Heat_P Parameter: Temperature (deg C) Value: 42 vs. 22
  misc_feature: MA Experiment 20000173 PARAMETER Experiment Name: At_42deg_Heat_P Parameter: Timepoint (hr) Value: 6
  misc_feature: MA Experiment 20000173 PARAMETER Experiment Name: At_42deg_Heat_P Parameter: Tissue Value: Aerial
  misc_feature: MA Experiment ID: 20000184 Result: Down-regulated in Transcription
  misc_feature: MA Experiment 20000184 PARAMETER Experiment Name: At_Shoots__P Parameter: Age (day) Value: 7
  misc_feature: MA Experiment 20000184 PARAMETER Experiment Name: At_Shoots__P Parameter: Tissue Value: Shoots vs. Whole Plant
  misc_feature: MA Experiment ID: 20000185 Result: Up-regulated in Transcription
  misc_feature: MA Experiment 20000185 PARAMETER Experiment Name: At_Roots__P Parameter: Age (day) Value: 7 vs. 21
  misc_feature: MA Experiment 20000185 PARAMETER Experiment Name: At_Roots__P Parameter: Organism Value: A. thaliana
  misc_feature: MA Experiment 20000185 PARAMETER Experiment Name: At_Roots__P Parameter: Tissue Value: Roots vs. Whole Plant
  misc_feature: MA Experiment ID: 20000224 Result: Up-regulated in Transcription
  misc_feature: MA Experiment ID: 20000227 Result: Down-regulated in Transcription
  misc_feature: MA Experiment 20000227 PARAMETER Experiment Name: At_Root-Tips-vs-Tops_P Parameter: Tissue Value: Root Tips vs. Root Tops
  misc_feature: MA Experiment ID: 20000234 Result: Down-regulated in Transcription
  misc_feature: MA Experiment 20000234 PARAMETER Experiment Name: At_Siliques_P Parameter: Age (day) Value: 21
  misc_feature: MA Experiment 20000234 PARAMETER Experiment Name: At_Siliques_P Parameter: Organism Value: A. thaliana
  misc_feature: MA Experiment 20000234 PARAMETER Experiment Name: At_Siliques_P Parameter: Plant Line Value: WS
  misc_feature: MA Experiment 20000234 PARAMETER Experiment Name: At_Siliques_P Parameter: Tissue Value: Less Than 5mm Siliques vs. Whole Plant
  misc_feature: MA Experiment ID: 20000235 Result: Down-regulated in Transcription
  misc_feature: MA Experiment 20000235 PARAMETER Experiment Name: At_Siliques_P Parameter: Age (day) Value: 21
  misc_feature: MA Experiment 20000235 PARAMETER Experiment Name: At_Siliques_P Parameter: Organism Value: A. thaliana
  misc_feature: MA Experiment 20000235 PARAMETER Experiment Name: At_Siliques_P Parameter: Plant Line Value: WS
  misc_feature: MA Experiment 20000235 PARAMETER Experiment Name: At_Siliques_P Parameter: Tissue Value: 5-10mm Siliques vs. Whole Plant
  misc_feature: MA Experiment ID: 20000265 Result: Down-regulated in Transcription
  misc_feature: MA Experiment 20000265 PARAMETER Experiment Name: At_Open_Flower_P Parameter: Age (day) Value: 21
  misc_feature: MA Experiment 20000265 PARAMETER Experiment Name: At_Open_Flower_P Parameter: Plant Line Value: WS
  misc_feature: MA Experiment 20000265 PARAMETER Experiment Name: At_Open_Flower_P Parameter: Tissue Value: Closed Flower vs. Whole Plant
  misc_feature: MA Experiment ID: 20000268 Result: Up-regulated in Transcription
  misc_feature: MA Experiment 20000268 PARAMETER Experiment Name: At_100mM_NaCl__P Parameter: Age (day) Value: 14
  misc_feature: MA Experiment 20000268 PARAMETER Experiment Name: At_100mM_NaCl__P Parameter: Organism Value: A. thaliana
  misc_feature: MA Experiment 20000268 PARAMETER Experiment Name: At_100mM_NaCl__P Parameter: Plant Line Value: WS
  misc_feature: MA Experiment 20000268 PARAMETER Experiment Name: At_100mM_NaCl__P Parameter: Timepoint (hr) Value: 6
  misc_feature: MA Experiment 20000268 PARAMETER Experiment Name: At_100mM_NaCl__P Parameter: Tissue Value: Whole Plant
  misc_feature: MA Experiment 20000268 PARAMETER Experiment Name: At_100mM_NaCl__P Parameter: Treatment Value: 100mM NaCl vs. No Treatment
  misc_feature: MA Experiment ID: 20000286 Result: Down-regulated in Transcription
  misc_feature: MA Experiment 20000286 PARAMETER Experiment Name: At_Open_Flower_P Parameter: Age (day) Value: 21
  misc_feature: MA Experiment 20000286 PARAMETER Experiment Name: At_Open_Flower_P Parameter: Plant Line Value: WS
  misc_feature: MA Experiment 20000286 PARAMETER Experiment Name: At_Open_Flower_P Parameter: Tissue Value: Half Open vs. Whole Plant
  misc_feature: MA Experiment ID: 20000436 Result: Up-regulated in Transcription
  misc_feature: MA Experiment 20000436 PARAMETER Experiment Name: At_Drought_P Parameter: Age (day) Value: 7
  misc_feature: MA Experiment 20000436 PARAMETER Experiment Name: At_Drought_P Parameter: Organism Value: A. thaliana
  misc_feature: MA Experiment 20000436 PARAMETER Experiment Name: At_Drought_P Parameter: Plant Line Value: WS
  misc_feature: MA Experiment 20000436 PARAMETER Experiment Name: At_Drought_P Parameter: Timepoint (hr) Value: 12
  misc_feature: MA Experiment 20000436 PARAMETER Experiment Name: At_Drought_P Parameter: Tissue Value: Whole Plant
  misc_feature: MA Experiment 20000436 PARAMETER Experiment Name: At_Drought_P Parameter: Treatment Value: Drought vs. No Drought
  misc_feature: MA Experiment ID: 20000437 Result: Up-regulated in Transcription
  misc_feature: MA Experiment 20000437 PARAMETER Experiment Name: At_Drought_P Parameter: Age (day) Value: 8
  misc_feature: MA Experiment 20000437 PARAMETER Experiment Name: At_Drought_P Parameter: Organism Value: A. thaliana
  misc_feature: MA Experiment 20000437 PARAMETER Experiment Name: At_Drought_P Parameter: Plant Line Value: WS
  misc_feature: MA Experiment 20000437 PARAMETER Experiment Name: At_Drought_P Parameter: Timepoint (hr) Value: 24
  misc_feature: MA Experiment 20000437 PARAMETER Experiment Name: At_Drought_P Parameter: Tissue Value: Whole Plant
  misc_feature: MA Experiment 20000437 PARAMETER Experiment Name: At_Drought_P Parameter: Treatment Value: Drought vs. No Drought
  misc_feature: MA Experiment ID: 20000438 Result: Up-regulated in Transcription
  misc_feature: MA Experiment 20000438 PARAMETER Experiment Name: At_Shoots__P Parameter: Age (day) Value: 14
  misc_feature: MA Experiment 20000438 PARAMETER Experiment Name: At_Shoots__P Parameter: Tissue Value: Shoots vs. Whole Plant
  misc_feature: MA Experiment ID: 20000439 Result: Up-regulated in Transcription
  misc_feature: MA Experiment 20000439 PARAMETER Experiment Name: At_Roots__P Parameter: Age (day) Value: 14 vs. 21
  misc_feature: MA Experiment 20000439 PARAMETER Experiment Name: At_Roots__P Parameter: Organism Value: A. thaliana
  misc_feature: MA Experiment 20000439 PARAMETER Experiment Name: At_Roots__P Parameter: Tissue Value: Roots vs. Whole Plant
  misc_feature: MA Experiment ID: 20000451 Result: Up-regulated in Transcription
  misc_feature: MA Experiment 20000451 PARAMETER Experiment Name: At_CS6879_Shoots-Roots_P Parameter: Age (day) Value: 14
  misc_feature: MA Experiment 20000451 PARAMETER Experiment Name: At_CS6879_Shoots-Roots_P Parameter: Organism Value: A. thaliana
  misc_feature: MA Experiment 20000451 PARAMETER Experiment Name: At_CS6879_Shoots-Roots_P Parameter: Plant Line Value: CS6879 vs. WS
  misc_feature: MA Experiment 20000451 PARAMETER Experiment Name: At_CS6879_Shoots-Roots_P Parameter: Tissue Value: Roots
  misc_feature: MA Experiment ID: 20000453 Result: Up-regulated in Transcription
  misc_feature: MA Experiment 20000453 PARAMETER Experiment Name: At_100uM_ABA_P Parameter: Age (day) Value: 15
  misc_feature: MA Experiment 20000453 PARAMETER Experiment Name: At_100uM_ABA_P Parameter: Organism Value: A. thaliana
  misc_feature: MA Experiment 20000453 PARAMETER Experiment Name: At_100uM_ABA_P Parameter: Plant Line Value: WS
  misc_feature: MA Experiment 20000453 PARAMETER Experiment Name: At_100uM_ABA_P Parameter: Timepoint (hr) Value: 24
  misc_feature: MA Experiment 20000453 PARAMETER Experiment Name: At_100uM_ABA_P Parameter: Tissue Value: Aerial
  misc_feature: MA Experiment 20000453 PARAMETER Experiment Name: At_100uM_ABA_P Parameter: Treatment Value: 100uM ABA vs. No Treatment
  misc_feature: MA Experiment ID: 20000455 Result: Up-regulated in Transcription
  misc_feature: MA Experiment 20000455 PARAMETER Experiment Name: At_100uM_ABA_P Parameter: Age (day) Value: 16
  misc_feature: MA Experiment 20000455 PARAMETER Experiment Name: At_100uM_ABA_P Parameter: Organism Value: A. thaliana
  misc_feature: MA Experiment 20000455 PARAMETER Experiment Name: At_100uM_ABA_P Parameter: Plant Line Value: WS
  misc_feature: MA Experiment 20000455 PARAMETER Experiment Name: At_100uM_ABA_P Parameter: Timepoint (hr) Value: 48
  misc_feature: MA Experiment 20000455 PARAMETER Experiment Name: At_100uM_ABA_P Parameter: Tissue Value: Aerial
  misc_feature: MA Experiment 20000455 PARAMETER Experiment Name: At_100uM_ABA_P Parameter: Treatment Value: 100uM ABA vs. No Treatment
  misc_feature: MA Experiment ID: 20000573 Result: Down-regulated in Transcription
  misc_feature: MA Experiment 20000573 PARAMETER Experiment Name: At_100uM_ABA_Mutants__P Parameter: Organism Value: A. thaliana
  misc_feature: MA Experiment 20000573 PARAMETER Experiment Name: At_100uM_ABA_Mutants__P Parameter: Plant Line Value: CS22 vs. Ler wt
  misc_feature: MA Experiment 20000573 PARAMETER Experiment Name: At_100uM_ABA_Mutants__P Parameter: Timepoint (hr) Value: N/A
  misc_feature: MA Experiment 20000573 PARAMETER Experiment Name: At_100uM_ABA_Mutants__P Parameter: Tissue Value: Whole Plant
  misc_feature: MA Experiment 20000573 PARAMETER Experiment Name: At_100uM_ABA_Mutants__P Parameter: Treatment Value: None
  misc_feature: MA Experiment ID: 20000574 Result: Down-regulated in Transcription
  misc_feature: MA Experiment 20000574 PARAMETER Experiment Name: At_100uM_ABA_Mutants__P Parameter: Organism Value: A. thaliana
  misc_feature: MA Experiment 20000574 PARAMETER Experiment Name: At_100uM_ABA_Mutants__P Parameter: Plant Line Value: CS23 vs. Ler wt
  misc_feature: MA Experiment 20000574 PARAMETER Experiment Name: At_100uM_ABA_Mutants__P Parameter: Timepoint (hr) Value: N/A
  misc_feature: MA Experiment 20000574 PARAMETER Experiment Name: At_100uM_ABA_Mutants__P Parameter: Tissue Value: Whole Plant
  misc_feature: MA Experiment 20000574 PARAMETER Experiment Name: At_100uM_ABA_Mutants__P Parameter: Treatment Value: None
  misc_feature: MA Experiment ID: 20000606 Result: Down-regulated in Transcription
  misc_feature: MA Experiment 20000606 PARAMETER Experiment Name: At_CS8548_Mutant_P Parameter: Age (day) Value: 14
  misc_feature: MA Experiment 20000606 PARAMETER Experiment Name: At_CS8548_Mutant_P Parameter: Plant Line Value: CS8548 vs. wt
  misc_feature: MA Experiment 20000606 PARAMETER Experiment Name: At_CS8548_Mutant_P Parameter: Tissue Value: Whole Plant
  misc_feature: MA Experiment ID: 20000794 Result: Down-regulated in Transcription
  misc_feature: MA Experiment 20000794 PARAMETER Experiment Name: At_Petals_P Parameter: Age (day) Value: 23-25 days
  misc_feature: MA Experiment 20000794 PARAMETER Experiment Name: At_Petals_P Parameter: Plant Line Value: WS
  misc_feature: MA Experiment 20000794 PARAMETER Experiment Name: At_Petals_P Parameter: Tissue Value: Petals vs. Whole plant
  misc_feature: MA Experiment ID: 20001247 Result: Down-regulated in Transcription
  misc_feature: MA Experiment 20001247 PARAMETER Experiment Name: At_Far-red-induction_P Parameter: Age (day) Value: 7
  misc_feature: MA Experiment 20001247 PARAMETER Experiment Name: At_Far-red-induction_P Parameter: Light Value: Far-red vs. White
  misc_feature: MA Experiment 20001247 PARAMETER Experiment Name: At_Far-red-induction_P Parameter: Organism Value: A. thaliana
  misc_feature: MA Experiment 20001247 PARAMETER Experiment Name: At_Far-red-induction_P Parameter: Plant Line Value: Columbia
  misc_feature: MA Experiment 20001247 PARAMETER Experiment Name: At_Far-red-induction_P Parameter: Timepoint (hr) Value: 1
  misc_feature: MA Experiment 20001247 PARAMETER Experiment Name: At_Far-red-induction_P Parameter: Tissue Value: Whole Plant
  misc_feature: MA Experiment ID: 20001248 Result: Down-regulated in Transcription
  misc_feature: MA Experiment 20001248 PARAMETER Experiment Name: At_Far-red-induction_P Parameter: Age (day) Value: 7
  misc_feature: MA Experiment 20001248 PARAMETER Experiment Name: At_Far-red-induction_P Parameter: Light Value: Far-red vs. White
  misc_feature: MA Experiment 20001248 PARAMETER Experiment Name: At_Far-red-induction_P Parameter: Organism Value: A. thaliana
  misc_feature: MA Experiment 20001248 PARAMETER Experiment Name: At_Far-red-induction_P Parameter: Plant Line Value: Columbia
  misc_feature: MA Experiment 20001248 PARAMETER Experiment Name: At_Far-red-induction_P Parameter: Timepoint (hr) Value: 4
  misc_feature: MA Experiment 20001248 PARAMETER Experiment Name: At_Far-red-induction_P Parameter: Tissue Value: Whole Plant
  misc_feature: MA Experiment ID: 20001451 Result: Down-regulated in Transcription
  misc_feature: MA Experiment 20001451 PARAMETER Experiment Name: At_Far-red-induction_P Parameter: Age (day) Value: 7
  misc_feature: MA Experiment 20001451 PARAMETER Experiment Name: At_Far-red-induction_P Parameter: Light Value: Far-red vs. White
  misc_feature: MA Experiment 20001451 PARAMETER Experiment Name: At_Far-red-induction_P Parameter: Organism Value: A. thaliana
  misc_feature: MA Experiment 20001451 PARAMETER Experiment Name: At_Far-red-induction_P Parameter: Plant Line Value: Columbia
  misc_feature: MA Experiment 20001451 PARAMETER Experiment Name: At_Far-red-induction_P Parameter: Timepoint (hr) Value: 24
  misc_feature: MA Experiment 20001451 PARAMETER Experiment Name: At_Far-red-induction_P Parameter: Tissue Value: Whole Plant
  misc_feature: MA Experiment ID: 20001554 Result: Up-regulated in Transcription
  misc_feature: MA Experiment 20001554 PARAMETER Experiment Name: At_Drought_Soil_Dry_P Parameter: Age (day) Value: 21
  misc_feature: MA Experiment 20001554 PARAMETER Experiment Name: At_Drought_Soil_Dry_P Parameter: Organism Value: A. thaliana
  misc_feature: MA Experiment 20001554 PARAMETER Experiment Name: At_Drought_Soil_Dry_P Parameter: Plant Line Value: WS
  misc_feature: MA Experiment 20001554 PARAMETER Experiment Name: At_Drought_Soil_Dry_P Parameter: Post Timepoint (hr) Value: None
  misc_feature: MA Experiment 20001554 PARAMETER Experiment Name: At_Drought_Soil_Dry_P Parameter: Post-Treatment Value: None
  misc_feature: MA Experiment 20001554 PARAMETER Experiment Name: At_Drought_Soil_Dry_P Parameter: Timepoint (day) Value: 7
  misc_feature: MA Experiment 20001554 PARAMETER Experiment Name: At_Drought_Soil_Dry_P Parameter: Treatment Value: Drought vs. No Drought
  misc_feature: MA Experiment ID: 20001555 Result: Up-regulated in Transcription
  misc_feature: MA Experiment 20001555 PARAMETER Experiment Name: At_Drought_Soil_Dry_P Parameter: Age (day) Value: 24
  misc_feature: MA Experiment 20001555 PARAMETER Experiment Name: At_Drought_Soil_Dry_P Parameter: Organism Value: A. thaliana
  misc_feature: MA Experiment 20001555 PARAMETER Experiment Name: At_Drought_Soil_Dry_P Parameter: Plant Line Value: WS
  misc_feature: MA Experiment 20001555 PARAMETER Experiment Name: At_Drought_Soil_Dry_P Parameter: Post Timepoint (hr) Value: None
  misc_feature: MA Experiment 20001555 PARAMETER Experiment Name: At_Drought_Soil_Dry_P Parameter: Post-Treatment Value: None
  misc_feature: MA Experiment 20001555 PARAMETER Experiment Name: At_Drought_Soil_Dry_P Parameter: Timepoint (day) Value: 10
  misc_feature: MA Experiment 20001555 PARAMETER Experiment Name: At_Drought_Soil_Dry_P Parameter: Treatment Value: Drought vs. No Drought
  misc_feature: MA Experiment ID: 20001559 Result: Up-regulated in Transcription
  misc_feature: MA Experiment 20001559 PARAMETER Experiment Name: At_Drought_Soil_Dry_P Parameter: Age (day) Value: 28
  misc_feature: MA Experiment 20001559 PARAMETER Experiment Name: At_Drought_Soil_Dry_P Parameter: Organism Value: A. thaliana
  misc_feature: MA Experiment 20001559 PARAMETER Experiment Name: At_Drought_Soil_Dry_P Parameter: Plant Line Value: WS
  misc_feature: MA Experiment 20001559 PARAMETER Experiment Name: At_Drought_Soil_Dry_P Parameter: Post Timepoint (hr) Value: 29
  misc_feature: MA Experiment 20001559 PARAMETER Experiment Name: At_Drought_Soil_Dry_P Parameter: Post-Treatment Value: Re-Water vs. No Drought
  misc_feature: MA Experiment 20001559 PARAMETER Experiment Name: At_Drought_Soil_Dry_P Parameter: Timepoint (day) Value: 14
  misc_feature: MA Experiment 20001559 PARAMETER Experiment Name: At_Drought_Soil_Dry_P Parameter: Treatment Value: Drought vs. No Drought
  misc_feature: MA Experiment ID: 20001906 Result: Up-regulated in Transcription
  misc_feature: MA Experiment 20001906 PARAMETER Experiment Name: At_Drought_Reproduction_P Parameter: Age (day) Value: 35
  misc_feature: MA Experiment 20001906 PARAMETER Experiment Name: At_Drought_Reproduction_P Parameter: Organism Value: A. thaliana
  misc_feature: MA Experiment 20001906 PARAMETER Experiment Name: At_Drought_Reproduction_P Parameter: Plant Line Value: WS
  misc_feature: MA Experiment 20001906 PARAMETER Experiment Name: At_Drought_Reproduction_P Parameter: Timepoint (day) Value: 5
  misc_feature: MA Experiment 20001906 PARAMETER Experiment Name: At_Drought_Reproduction_P Parameter: Tissue Value: Siliques
  misc_feature: MA Experiment 20001906 PARAMETER Experiment Name: At_Drought_Reproduction_P Parameter: Treatment Value: Drought vs. No Drought
  misc_feature: MA Experiment ID: 20001911 Result: Up-regulated in Transcription
  misc_feature: MA Experiment 20001911 PARAMETER Experiment Name: At_Drought_Reproduction_P Parameter: Age (day) Value: 40
  misc_feature: MA Experiment 20001911 PARAMETER Experiment Name: At_Drought_Reproduction_P Parameter: Organism Value: A. thaliana
  misc_feature: MA Experiment 20001911 PARAMETER Experiment Name: At_Drought_Reproduction_P Parameter: Plant Line Value: WS
  misc_feature: MA Experiment 20001911 PARAMETER Experiment Name: At_Drought_Reproduction_P Parameter: Timepoint (day) Value: 10
  misc_feature: MA Experiment 20001911 PARAMETER Experiment Name: At_Drought_Reproduction_P Parameter: Tissue Value: Flowers
  misc_feature: MA Experiment 20001911 PARAMETER Experiment Name: At_Drought_Reproduction_P Parameter: Treatment Value: Drought vs. No Drought
gggtgcttattaaaacaaaataacatacaaatggatagcatttggattctatcacttctcttcttcatcatctttcttcttctggccgccttcaaacgcaaaaatcatgggaaacatcgacgaataccatctcctcctggttttccaatcatcggaaacttacatcagctcggagaattacaacatcagtctctatggaagctctcaaagaagtatggccctgtgatgcttttgaagcttggaaaagtccccacactcatactttcttcatcagaaacagcaaaacaagctctaagagactatgatctccattgttgtagccgtccttccttagcaggaggaagagagctctcttacaacaatctagatatgtcttcatctccttataatgaatattggaaggaactaaggaagctctgcagtcaagaactctttagtgctaataaaattcaatcgattcaacctattaaggacgaggaggtcaagaaagttatcgattcaatcgcggaatcatcttctctaaagaatccggttaacttgagcaagacgtttcttgctttaactacaagtgtagtatgcaaggcagcatttggtgtgagttttgagggaagtgtgctcaacagtgatagattcaataagttagtccgagatactttcgagatgttgggaagcttctctgcctcagattttattccgtatgtcggatggatcatcgataagttcaatggtttacaagggtggagaaagaaaagctttcgagatcttgatgcgttctatgaacaaatttttgatctgcataaggaagagaaggaagtaggaagtgaagatttagtggatgtgctcttgaggttggagaaagaagaaattgttgttggaaatggcaagctcacaagaaatcatatcaaagcaattttgatgaacattcttttaggaggaatcgatacttctgcaataacaatgacatgggcaatggcagaacttgctaaaaaccctagagtgatgaagaaagttcaagcagaaatcagaaaccaaatcaagaacaaagaaagaatcagctttgatgacactgataagctcgagtacttgaaaatggtgatcaaagaaacatggaggttacatcctccaacacctcttctcctcccaagagatgtaatcactgaatttgagatcaatggctacacgattcctgccaaaacacggcttcatgtgaatgtttgggctatcgggcgtgatcctgatacatggaaagatccagaaatgtttctccccgaaaggtttaatgatagtaacattgatgcaaaaggacagaactttgagttgttgtcgtttgggagtggtaggagaatttgtcctggactgtacatgggaacaacaatggtggagtttggcctagctaatatgttgtatcattttgattggaagttaccagaaggcatggtagtcgaagatatcgatatggaagaagctcctggacttactgtgagcaaaaaaagtgagcttgtacttgttccagtgaagtatttagaccattgattcacgtgaattagttcttcatcgattgtactatgaatgagaacgaaatgataatgataattttcaatgtaatattttttttct

SEQ ID NO: 38277 - protein, 510 aa, Arabidopsis thaliana
  peptide (1)..(510): Ceres Seq. ID no. 13489017
  misc_feature (11)..(251): Homolog of NCBI NO: 9294287 NR Description: cytochrome P450 [Arabidopsis thaliana]
  misc_feature (11)..(510): Homolog of NCBI NO: 7430672 NR Description: probable cytochrome P450 At2g02580
  misc_feature (11)..(510): Homolog of NCBI NO: 18175891 NR Description: putative cytochrome P450 protein [Arabidopsis
  misc_feature (11)..(510): Homolog of NCBI NO: 15227003 NR Description: cytochrome P450 family [Arabidopsis thaliana]
  misc_feature (11)..(509): Homolog of NCBI NO: 9294291 NR Description: cytochrome p450 [Arabidopsis thaliana]
  misc_feature (11)..(510): Homolog of NCBI NO: 15231541 NR Description: cytochrome P450 71B36 [Arabidopsis thaliana]
  misc_feature (11)..(509): Homolog of NCBI NO: 15231542 NR Description: cytochrome p450 family [Arabidopsis thaliana]
  misc_feature (11)..(504): Homolog of NCBI NO: 15231539 NR Description: cytochrome P450 family [Arabidopsis thaliana]
  misc_feature (11)..(509): Homolog of NCBI NO: 15231538 NR Description: cytochrome P450 family [Arabidopsis thaliana]
  misc_feature (11)..(510): Homolog of NCBI NO: 15231537 NR Description: cytochrome p450 71B26 [Arabidopsis thaliana]
GCLLKQNNIQMDSIWILSLLFFIIFLLLAAFKRKNHGKHRRIPSPPGFPIIGNLHQLGELQHQSLWKLSKKYGPVMLLKLGKVPTLILSSSETAKQALRDYDLHCCSRPSLAGGRELSYNNLDMSSSPYNEYWKELRKLCSQELFSANKIQSIQPIKDEEVKKVIDSIAESSSLKNPVNLSKTFLALTTSVVCKAAFGVSFEGSVLNSDRFNKLVRDTFEMLGSFSASDFIPYVGWIIDKFNGLQGWRKKSFRDLDAFYEQIFDLHKEEKEVGSEDLVDVLLRLEKEEIVVGNGKLTRNHIKAILMNILLGGIDTSAITMTWAMAELAKNPRVMKKVQAEIRNQIKNKERISFDDTDKLEYLKMVIKETWRLHPPTPLLLPRDVITEFEINGYTIPAKTRLHVNVWAIGRDPDTWKDPEMFLPERFNDSNIDAKGQNFELLSFGSGRRICPGLYMGTTMVEFGLANMLYHFDWKLPEGMVVEDIDMEEAPGLTVSKKSELVLVPVKYLDH

SEQ ID NO: 38278 - protein, 500 aa, Arabidopsis thaliana
  peptide (1)..(500): Ceres Seq. ID no. 13489018
  misc_feature (1)..(241): Homolog of NCBI NO: 9294287 NR Description: cytochrome P450 [Arabidopsis thaliana]
  misc_feature (1)..(500): Homolog of NCBI NO: 7430672 NR Description: probable cytochrome P450 At2g02580
  misc_feature (1)..(500): Homolog of NCBI NO: 18175891 NR Description: putative cytochrome P450 protein [Arabidopsis
  misc_feature (1)..(500): Homolog of NCBI NO: 15227003 NR Description: cytochrome P450 family [Arabidopsis thaliana]
  misc_feature (1)..(499): Homolog of NCBI NO: 9294291 NR Description: cytochrome p450 [Arabidopsis thaliana]
  misc_feature (1)..(500): Homolog of NCBI NO: 15231541 NR Description: cytochrome P450 71B36 [Arabidopsis thaliana]
  misc_feature (1)..(499): Homolog of NCBI NO: 15231542 NR Description: cytochrome p450 family [Arabidopsis thaliana]
  misc_feature (1)..(494): Homolog of NCBI NO: 15231539 NR Description: cytochrome P450 family [Arabidopsis thaliana]
  misc_feature (1)..(499): Homolog of NCBI NO: 15231538 NR Description: cytochrome P450 family [Arabidopsis thaliana]
  misc_feature (1)..(500): Homolog of NCBI NO: 15231537 NR Description: cytochrome p450 71B26 [Arabidopsis thaliana]
MDSIWILSLLFFIIFLLLAAFKRKNHGKHRRIPSPPGFPIIGNLHQLGELQHQSLWKLSKKYGPVMLLKLGKVPTLILSSSETAKQALRDYDLHCCSRPSLAGGRELSYNNLDMSSSPYNEYWKELRKLCSQELFSANKIQSIQPIKDEEVKKVIDSIAESSSLKNPVNLSKTFLALTTSVVCKAAFGVSFEGSVLNSDRFNKLVRDTFEMLGSFSASDFIPYVGWIIDKFNGLQGWRKKSFRDLDAFYEQIFDLHKEEKEVGSEDLVDVLLRLEKEEIVVGNGKLTRNHIKAILMNILLGGIDTSAITMTWAMAELAKNPRVMKKVQAEIRNQIKNKERISFDDTDKLEYLKMVIKETWRLHPPTPLLLPRDVITEFEINGYTIPAKTRLHVNVWAIGRDPDTWKDPEMFLPERFNDSNIDAKGQNFELLSFGSGRRICPGLYMGTTMVEFGLANMLYHFDWKLPEGMVVEDIDMEEAPGLTVSKKSELVLVPVKYLDH

SEQ ID NO: 38279 - protein, 435 aa, Arabidopsis thaliana
  peptide (1)..(435): Ceres Seq. ID no. 13489019
  misc_feature (1)..(176): Homolog of NCBI NO: 9294287 NR Description: cytochrome P450 [Arabidopsis thaliana]
  misc_feature (1)..(435): Homolog of NCBI NO: 7430672 NR Description: probable cytochrome P450 At2g02580
  misc_feature (1)..(435): Homolog of NCBI NO: 18175891 NR Description: putative cytochrome P450 protein [Arabidopsis
  misc_feature (1)..(435): Homolog of NCBI NO: 15227003 NR Description: cytochrome P450 family [Arabidopsis thaliana]
  misc_feature (1)..(434): Homolog of NCBI NO: 9294291 NR Description: cytochrome p450 [Arabidopsis thaliana]
  misc_feature (1)..(435): Homolog of NCBI NO: 15231541 NR Description: cytochrome P450 71B36 [Arabidopsis thaliana]
  misc_feature (1)..(434): Homolog of NCBI NO: 15231542 NR Description: cytochrome p450 family [Arabidopsis thaliana]
  misc_feature (1)..(429): Homolog of NCBI NO: 15231539 NR Description: cytochrome P450 family [Arabidopsis thaliana]
  misc_feature (1)..(434): Homolog of NCBI NO: 15231538 NR Description: cytochrome P450 family [Arabidopsis thaliana]
  misc_feature (1)..(435): Homolog of NCBI NO: 15231537 NR Description: cytochrome p450 71B26 [Arabidopsis thaliana]
MLLKLGKVPTLILSSSETAKQALRDYDLHCCSRPSLAGGRELSYNNLDMSSSPYNEYWKELRKLCSQELFSANKIQSIQPIKDEEVKKVIDSIAESSSLKNPVNLSKTFLALTTSVVCKAAFGVSFEGSVLNSDRFNKLVRDTFEMLGSFSASDFIPYVGWIIDKFNGLQGWRKKSFRDLDAFYEQIFDLHKEEKEVGSEDLVDVLLRLEKEEIVVGNGKLTRNHIKAILMNILLGGIDTSAITMTWAMAELAKNPRVMKKVQAEIRNQIKNKERISFDDTDKLEYLKMVIKETWRLHPPTPLLLPRDVITEFEINGYTIPAKTRLHVNVWAIGRDPDTWKDPEMFLPERFNDSNIDAKGQNFELLSFGSGRRICPGLYMGTTMVEFGLANMLYHFDWKLPEGMVVEDIDMEEAPGLTVSKKSELVLVPVKYLDH

SEQ ID NO: 38280 - DNA, 1567 bp, Arabidopsis thaliana; identical to SEQ ID NO: 37456
  misc_feature (1)..(1567): Ceres Seq. ID no. 12389081
  misc_feature: MA Experiment ID: 20000184 Result: Up-regulated in Transcription
  misc_feature: MA Experiment 20000184 PARAMETER Experiment Name: At_Shoots__P Parameter: Age (day) Value: 7
  misc_feature: MA Experiment 20000184 PARAMETER Experiment Name: At_Shoots__P Parameter: Tissue Value: Shoots vs. Whole Plant
  misc_feature: MA Experiment ID: 20000265 Result: Up-regulated in Transcription
  misc_feature: MA Experiment 20000265 PARAMETER Experiment Name: At_Open_Flower_P Parameter: Age (day) Value: 21
  misc_feature: MA Experiment 20000265 PARAMETER Experiment Name: At_Open_Flower_P Parameter: Plant Line Value: WS
  misc_feature: MA Experiment 20000265 PARAMETER Experiment Name: At_Open_Flower_P Parameter: Tissue Value: Closed Flower vs. Whole Plant
  misc_feature: MA Experiment ID: 20000286 Result: Up-regulated in Transcription
  misc_feature: MA Experiment 20000286 PARAMETER Experiment Name: At_Open_Flower_P Parameter: Age (day) Value: 21
  misc_feature: MA Experiment 20000286 PARAMETER Experiment Name: At_Open_Flower_P Parameter: Plant Line Value: WS
  misc_feature: MA Experiment 20000286 PARAMETER Experiment Name: At_Open_Flower_P Parameter: Tissue Value: Half Open vs. Whole Plant

SEQ ID NO: 38281 - protein, 395 aa, Arabidopsis thaliana; identical to SEQ ID NO: 37457
  peptide (1)..(395): Ceres Seq. ID no. 12389082
  misc_feature (36)..(394): Homolog of NCBI NO: 417820 NR Description: Acyl-
  misc_feature (36)..(394): Homolog of NCBI NO: 134945 NR Description: Acyl-
  misc_feature (22)..(393): Homolog of NCBI NO: 3355634 NR Description: stearoyl-acyl carrier protein desaturase [Linum
  misc_feature (36)..(394): Homolog of NCBI NO: 575942 NR Description: stearoyl-acyl carrier protein desaturase [Sesamum
  misc_feature (22)..(393): Homolog of NCBI NO: 3355632 NR Description: stearoyl-acyl carrier protein desaturase [Linum
  misc_feature (1)..(395): Homolog of NCBI NO: 21592896 NR Description: putative stearoyl-acyl carrier protein desaturase
  misc_feature (1)..(395): Homolog of NCBI NO: 20466636 NR Description: putative stearoyl-acyl carrier protein desaturase
  misc_feature (1)..(395): Homolog of NCBI NO: 15232943 NR Description: putative stearoyl-acyl carrier protein desaturase
  misc_feature (1)..(395): Homolog of NCBI NO: 15237308 NR Description: stearoyl-acyl carrier protein desaturase
  misc_feature (1)..(395): Homolog of NCBI NO: 21593675 NR Description: stearoyl-acyl carrier protein desaturase
  misc_feature (36)..(394): Homolog of NCBI NO: 417820 NR Description: Acyl-
  misc_feature (36)..(394): Homolog of NCBI NO: 134945 NR Description: Acyl-
  misc_feature (22)..(393): Homolog of NCBI NO: 3355634 NR Description: stearoyl-acyl carrier protein desaturase [Linum
  misc_feature (36)..(394): Homolog of NCBI NO: 575942 NR Description: stearoyl-acyl carrier protein desaturase [Sesamum
  misc_feature (22)..(393): Homolog of NCBI NO: 3355632 NR Description: stearoyl-acyl carrier protein desaturase [Linum
  misc_feature (1)..(395): Homolog of NCBI NO: 21592896 NR Description: putative stearoyl-acyl carrier protein desaturase
  misc_feature (1)..(395): Homolog of NCBI NO: 20466636 NR Description: putative stearoyl-acyl carrier protein desaturase
  misc_feature (1)..(395): Homolog of NCBI NO: 15232943 NR Description: putative stearoyl-acyl carrier protein desaturase
  misc_feature (1)..(395): Homolog of NCBI NO: 15237308 NR Description: stearoyl-acyl carrier protein desaturase
  misc_feature (1)..(395): Homolog of NCBI NO: 21593675 NR Description: stearoyl-acyl carrier protein desaturase

SEQ ID NO: 38282 - protein, 393 aa, Arabidopsis thaliana; identical to SEQ ID NO: 37458
  peptide (1)..(393): Ceres Seq. ID no. 12389083
  misc_feature (34)..(392): Homolog of NCBI NO: 417820 NR Description: Acyl-
  misc_feature (34)..(392): Homolog of NCBI NO: 134945 NR Description: Acyl-
  misc_feature (20)..(391): Homolog of NCBI NO: 3355634 NR Description: stearoyl-acyl carrier protein desaturase [Linum
  misc_feature (34)..(392): Homolog of NCBI NO: 575942 NR Description: stearoyl-acyl carrier protein desaturase [Sesamum
  misc_feature (20)..(391): Homolog of NCBI NO: 3355632 NR Description: stearoyl-acyl carrier protein desaturase [Linum
  misc_feature (1)..(393): Homolog of NCBI NO: 21592896 NR Description: putative stearoyl-acyl carrier protein desaturase
  misc_feature (1)..(393): Homolog of NCBI NO: 20466636 NR Description: putative stearoyl-acyl carrier protein desaturase
  misc_feature (1)..(393): Homolog of NCBI NO: 15232943 NR Description: putative stearoyl-acyl carrier protein desaturase
  misc_feature (1)..(393): Homolog of NCBI NO: 15237308 NR Description: stearoyl-acyl carrier protein desaturase
  misc_feature (1)..(393): Homolog of NCBI NO: 21593675 NR Description: stearoyl-acyl carrier protein desaturase
  misc_feature (34)..(392): Homolog of NCBI NO: 417820 NR Description: Acyl-
  misc_feature (34)..(392): Homolog of NCBI NO: 134945 NR Description: Acyl-
  misc_feature (20)..(391): Homolog of NCBI NO: 3355634 NR Description: stearoyl-acyl carrier protein desaturase [Linum
  misc_feature (34)..(392): Homolog of NCBI NO: 575942 NR Description: stearoyl-acyl carrier protein desaturase [Sesamum
  misc_feature (20)..(391): Homolog of NCBI NO: 3355632 NR Description: stearoyl-acyl carrier protein desaturase [Linum
  misc_feature (1)..(393): Homolog of NCBI NO: 21592896 NR Description: putative stearoyl-acyl carrier protein desaturase
  misc_feature (1)..(393): Homolog of NCBI NO: 20466636 NR Description: putative stearoyl-acyl carrier protein desaturase
  misc_feature (1)..(393): Homolog of NCBI NO: 15232943 NR Description: putative stearoyl-acyl carrier protein desaturase
  misc_feature (1)..(393): Homolog of NCBI NO: 15237308 NR Description: stearoyl-acyl carrier protein desaturase
  misc_feature (1)..(393): Homolog of NCBI NO: 21593675 NR Description: stearoyl-acyl carrier protein desaturase

SEQ ID NO: 38283 - protein, 391 aa, Arabidopsis thaliana; identical to SEQ ID NO: 37459
  peptide (1)..(391): Ceres Seq. ID no. 12389084
  misc_feature (32)..(390): Homolog of NCBI NO: 417820 NR Description: Acyl-
  misc_feature (32)..(390): Homolog of NCBI NO: 134945 NR Description: Acyl-
  misc_feature (18)..(389): Homolog of NCBI NO: 3355634 NR Description: stearoyl-acyl carrier protein desaturase [Linum
  misc_feature (32)..(390): Homolog of NCBI NO: 575942 NR Description: stearoyl-acyl carrier protein desaturase [Sesamum
  misc_feature (18)..(389): Homolog of NCBI NO: 3355632 NR Description: stearoyl-acyl carrier protein desaturase [Linum
  misc_feature (1)..(391): Homolog of NCBI NO: 21592896 NR Description: putative stearoyl-acyl carrier protein desaturase
  misc_feature (1)..(391): Homolog of NCBI NO: 20466636 NR Description: putative stearoyl-acyl carrier protein desaturase
  misc_feature (1)..(391): Homolog of NCBI NO: 15232943 NR Description: putative stearoyl-acyl carrier protein desaturase
  misc_feature (1)..(391): Homolog of NCBI NO: 15237308 NR Description: stearoyl-acyl carrier protein desaturase
  misc_feature (1)..(391): Homolog of NCBI NO: 21593675 NR Description: stearoyl-acyl carrier protein desaturase
  misc_feature (32)..(390): Homolog of NCBI NO: 417820 NR Description: Acyl-
  misc_feature (32)..(390): Homolog of NCBI NO: 134945 NR Description: Acyl-
  misc_feature (18)..(389): Homolog of NCBI NO: 3355634 NR Description: stearoyl-acyl carrier protein desaturase [Linum
  misc_feature (32)..(390): Homolog of NCBI NO: 575942 NR Description: stearoyl-acyl carrier protein desaturase [Sesamum
  misc_feature (18)..(389): Homolog of NCBI NO: 3355632 NR Description: stearoyl-acyl carrier protein desaturase [Linum
  misc_feature (1)..(391): Homolog of NCBI NO: 21592896 NR Description: putative stearoyl-acyl carrier protein desaturase
  misc_feature (1)..(391): Homolog of NCBI NO: 20466636 NR Description: putative stearoyl-acyl carrier protein desaturase
  misc_feature (1)..(391): Homolog of NCBI NO: 15232943 NR Description: putative stearoyl-acyl carrier protein desaturase
  misc_feature (1)..(391): Homolog of NCBI NO: 15237308 NR Description: stearoyl-acyl carrier protein desaturase
  misc_feature (1)..(391): Homolog of NCBI NO: 21593675 NR Description: stearoyl-acyl carrier protein desaturase

SEQ ID NO: 38284 - DNA, 1780 bp, Arabidopsis thaliana
  misc_feature (1)..(1780): Ceres Seq. ID no. 13489509
  misc_feature: MA Experiment ID: 108434 Result: Up-regulated in Transcription
  misc_feature: MA Experiment 108434 PARAMETER Experiment Name: At_Root_Tips_cDNA_P Parameter: Tissue Value: Root Tips
  misc_feature: MA Experiment ID: 108462 Result: Down-regulated in Transcription
  misc_feature: MA Experiment 108462 PARAMETER Experiment Name: At_Germinating_Seeds_cDNA_P Parameter: Age (day) Value: 2 vs. 0
  misc_feature: MA Experiment 108462 PARAMETER Experiment Name: At_Germinating_Seeds_cDNA_P Parameter: Tissue Value: Germinating Seeds
  misc_feature: MA Experiment ID: 108463 Result: Down-regulated in Transcription
  misc_feature: MA Experiment 108463 PARAMETER Experiment Name: At_Germinating_Seeds_cDNA_P Parameter: Age (day) Value: 3 vs. 0
  misc_feature: MA Experiment 108463 PARAMETER Experiment Name: At_Germinating_Seeds_cDNA_P Parameter: Tissue Value: Germinating Seeds
  misc_feature: MA Experiment ID: 108464 Result: Down-regulated in Transcription
  misc_feature: MA Experiment 108464 PARAMETER Experiment Name: At_Germinating_Seeds_cDNA_P Parameter: Age (day) Value: 4 vs. 0
  misc_feature: MA Experiment 108464 PARAMETER Experiment Name: At_Germinating_Seeds_cDNA_P Parameter: Tissue Value: Germinating Seeds
  misc_feature: MA Experiment ID: 20000180 Result: Down-regulated in Transcription
  misc_feature: MA Experiment 20000180 PARAMETER Experiment Name: At_Germinating_Seeds_P Parameter: Age (hr) Value: 24 vs. 0
  misc_feature: MA Experiment 20000180 PARAMETER Experiment Name: At_Germinating_Seeds_P Parameter: Tissue Value: Germinating Seeds
  misc_feature: MA Experiment ID: 20000185 Result: Up-regulated in Transcription
  misc_feature: MA Experiment 20000185 PARAMETER Experiment Name: At_Roots__P Parameter: Age (day) Value: 7 vs. 21
  misc_feature: MA Experiment 20000185 PARAMETER Experiment Name: At_Roots__P Parameter: Organism Value: A. thaliana
  misc_feature: MA Experiment 20000185 PARAMETER Experiment Name: At_Roots__P Parameter: Tissue Value: Roots vs. Whole Plant
  misc_feature: MA Experiment ID: 20000439 Result: Up-regulated in Transcription
  misc_feature: MA Experiment 20000439 PARAMETER Experiment Name: At_Roots__P Parameter: Age (day) Value: 14 vs. 21
  misc_feature: MA Experiment 20000439 PARAMETER Experiment Name: At_Roots__P Parameter: Organism Value: A. thaliana
  misc_feature: MA Experiment 20000439 PARAMETER Experiment Name: At_Roots__P Parameter: Tissue Value: Roots vs. Whole Plant
  misc_feature: MA Experiment ID: 20000456 Result: Up-regulated in Transcription
  misc_feature: MA Experiment 20000456 PARAMETER Experiment Name: At_100uM_BA_P Parameter: Age (day) Value: 14
  misc_feature: MA Experiment 20000456 PARAMETER Experiment Name: At_100uM_BA_P Parameter: Organism Value: A. thaliana
  misc_feature: MA Experiment 20000456 PARAMETER Experiment Name: At_100uM_BA_P Parameter: Plant Line Value: WS
  misc_feature: MA Experiment 20000456 PARAMETER Experiment Name: At_100uM_BA_P Parameter: Timepoint (hr) Value: 6
  misc_feature: MA Experiment 20000456 PARAMETER Experiment Name: At_100uM_BA_P Parameter: Tissue Value: Aerial
  misc_feature: MA Experiment 20000456 PARAMETER Experiment Name: At_100uM_BA_P Parameter: Treatment Value: 100uM BA vs. No Treatment
  misc_feature: MA Experiment ID: 20001558 Result: Up-regulated in Transcription
  misc_feature: MA Experiment 20001558 PARAMETER Experiment Name: At_Drought_Soil_Dry_P Parameter: Age (day) Value: 27
  misc_feature: MA Experiment 20001558 PARAMETER Experiment Name: At_Drought_Soil_Dry_P Parameter: Organism Value: A. thaliana
  misc_feature: MA Experiment 20001558 PARAMETER Experiment Name: At_Drought_Soil_Dry_P Parameter: Plant Line Value: WS
  misc_feature: MA Experiment 20001558 PARAMETER Experiment Name: At_Drought_Soil_Dry_P Parameter: Post Timepoint (hr) Value: 6
  misc_feature: MA Experiment 20001558 PARAMETER Experiment Name: At_Drought_Soil_Dry_P Parameter: Post-Treatment Value: Re-Water vs. No Drought
  misc_feature: MA Experiment 20001558 PARAMETER Experiment Name: At_Drought_Soil_Dry_P Parameter: Timepoint (day) Value: 13
  misc_feature: MA Experiment 20001558 PARAMETER Experiment Name: At_Drought_Soil_Dry_P Parameter: Treatment Value: Drought vs. No Drought
  misc_feature: MA Experiment ID: 20001757 Result: Up-regulated in Transcription
  misc_feature: MA Experiment 20001757 PARAMETER Experiment Name: At_50mM_NH4NO3_L-to-H_P Parameter: Timepoint (hr) Value: 6
  misc_feature: MA Experiment 20001757 PARAMETER Experiment Name: At_50mM_NH4NO3_L-to-H_P Parameter: Tissue Value: Leaf
  misc_feature: MA Experiment 20001757 PARAMETER Experiment Name: At_50mM_NH4NO3_L-to-H_P Parameter: Treatment Value: 50mM NH4NO3 vs 100mM Mannitol
aagtcgcaacgctccaacgacttcaattcaatttactttcgattttgtcctcttccaaaaacccttccgcttaaaccctaattcacttcgccggccatgtcgacactcgaggatggatttccggcggataagctcttcgctcaaggatactcttacacctacgacgacgtcatctttcttcctcacttcatcgatttctccacagacgctgtttctctatccacgcgccttagccggcgcgtgcctctctccataccttgcgtttcgtctccgatggatactgtttcggaatctcacatggctgctgctatggcttctcttggtgggattggaatcgtccactataactgtggcatcgccgctcaagcatcgattattcgccaagctaagtcgcttaaacatccgattgcttccgacgccggtgtgaagttcccggagtatgagattacttctttagatgcttttggtccttcttccttcgtttttgtcgagcaaacaggaacaatgacgactcctaaattgttaggctatgtaacgaaatcgcagtggaagagaatgaattacgaacaaagggagatgaagatatacgattacatgaagagctgtgatagcagtgactattgtgtaccatgggaaattgattttgaaaagttggagtttgttttagaagataagcaaaagggctttgtggttcttgagagggatggtgagactgtgaacgtggtgacgaaagatgatatacagagggttaaaggatatcccaagtctggaccagggactgtgggcccagacggtgagtggatggttggtgcagcgataggtacgagggagtctgataaggagaggcttgagcatttggttaatgttggggtcaatgctgtagtgttggatagttcgcaagggaactctatttaccagcttgagatgatcaagtatgtgaaaaagacttaccctgaattggatgtgattggtggcaatgttgtgacaatgtaccaggcacagaatttgatccaagcaggagttgatgggttgagagttggtatgggatctggttcgatatgtaccacacaagaggtttgtgcagttggtcgtggacaggctactgctgtgtacaaggtttgttcgatcgctgctcagagcgggattccagttatagcggatggtggtatctcaaattcagggcacattgtaaaggctctcgtccttggagcatcaactgttatgatgggtagctttttagctggaagtactgaggctcccgggggttacgagtatacgaacggtaagaggatcaagaagtaccgtggaatgggatcgctagaagcaatgactaaaggaagtgaccaaagatacttaggagatcaaacaaaactcaagattgctcaaggagtggttggagcagtcgcggataaaggctcagtgttgaagctgataccttacacaatgcacgccgtgaaacaaggtttccaagaccttggtgcttcttccttgcaatctgctcatggtctgttgagatcaaacatccttaggcttgaggctcgaactggtgctgcacaggtcgaaggaggagttcacgggctggtttcttatgaaaagaaatcgttttaagctttggcctaaaattgagtgctaagagtgtttcttatatcatgttccatgttatttttatagatattacttttcaatctagtaactttagtctttttatttattgacatgatttacattgtctcctaaaatcaattttcctctaatattgtcttatatctactaagttact

SEQ ID NO: 38285 - protein, 503 aa, Arabidopsis thaliana
  peptide (1)..(503): Ceres Seq. ID no. 13489510
  misc_feature (18)..(100): Pfam Name: IMP dehydrogenase / GMP reductase domain Pfam Description: IMP dehydrogenase / GMP reductase domain
  misc_feature (1)..(503): Homolog of NCBI NO: 28413147 NR Description: inosine monophosphate dehydrogenase [Vigna
  misc_feature (1)..(503): Homolog of NCBI NO: 15219217 NR Description: inosine-5'-monophosphate dehydrogenase, putative
  misc_feature (1)..(503): Homolog of NCBI NO: 21618070 NR Description: inosine-5'-monophosphate dehydrogenase, putative
  misc_feature (1)..(503): Homolog of NCBI NO: 15219385 NR Description: inosine-5'-monophosphate dehydrogenase
MSTLEDGFPADKLFAQGYSYTYDDVIFLPHFIDFSTDAVSLSTRLSRRVPLSIPCVSSPMDTVSESHMAAAMASLGGIGIVHYNCGIAAQASIIRQAKSLKHPIASDAGVKFPEYEITSLDAFGPSSFVFVEQTGTMTTPKLLGYVTKSQWKRMNYEQREMKIYDYMKSCDSSDYCVPWEIDFEKLEFVLEDKQKGFVVLERDGETVNVVTKDDIQRVKGYPKSGPGTVGPDGEWMVGAAIGTRESDKERLEHLVNVGVNAVVLDSSQGNSIYQLEMIKYVKKTYPELDVIGGNVVTMYQAQNLIQAGVDGLRVGMGSGSICTTQEVCAVGRGQATAVYKVCSIAAQSGIPVIADGGISNSGHIVKALVLGASTVMMGSFLAGSTEAPGGYEYTNGKRIKKYRGMGSLEAMTKGSDQRYLGDQTKLKIAQGVVGAVADKGSVLKLIPYTMHAVKQGFQDLGASSLQSAHGLLRSNILRLEARTGAAQVEGGVHGLVSYEKKSF

SEQ ID NO: 38286 - protein, 444 aa, Arabidopsis thaliana
  peptide (1)..(444): Ceres Seq. ID no. 13489511
  misc_feature (162)..(434): Pfam Name: IMP dehydrogenase / GMP reductase domain Pfam Description: IMP dehydrogenase / GMP reductase domain
  misc_feature (1)..(444): Homolog of NCBI NO: 28413147 NR Description: inosine monophosphate dehydrogenase [Vigna
  misc_feature (1)..(444): Homolog of NCBI NO: 15219217 NR Description: inosine-5'-monophosphate dehydrogenase, putative
  misc_feature (1)..(444): Homolog of NCBI NO: 21618070 NR Description: inosine-5'-monophosphate dehydrogenase, putative
  misc_feature (1)..(444): Homolog of NCBI NO: 15219385 NR Description: inosine-5'-monophosphate dehydrogenase
MDTVSESHMAAAMASLGGIGIVHYNCGIAAQASIIRQAKSLKHPIASDAGVKFPEYEITSLDAFGPSSFVFVEQTGTMTTPKLLGYVTKSQWKRMNYEQREMKIYDYMKSCDSSDYCVPWEIDFEKLEFVLEDKQKGFVVLERDGETVNVVTKDDIQRVKGYPKSGPGTVGPDGEWMVGAAIGTRESDKERLEHLVNVGVNAVVLDSSQGNSIYQLEMIKYVKKTYPELDVIGGNVVTMYQAQNLIQAGVDGLRVGMGSGSICTTQEVCAVGRGQATAVYKVCSIAAQSGIPVIADGGISNSGHIVKALVLGASTVMMGSFLAGSTEAPGGYEYTNGKRIKKYRGMGSLEAMTKGSDQRYLGDQTKLKIAQGVVGAVADKGSVLKLIPYTMHAVKQGFQDLGASSLQSAHGLLRSNILRLEARTGAAQVEGGVHGLVSYEKKSF

SEQ ID NO: 38287 - protein, 436 aa, Arabidopsis thaliana
  peptide (1)..(436): Ceres Seq. ID no. 13489512
  misc_feature (154)..(426): Pfam Name: IMP dehydrogenase / GMP reductase domain Pfam Description: IMP dehydrogenase / GMP reductase domain
  misc_feature (1)..(436): Homolog of NCBI NO: 28413147 NR Description: inosine monophosphate dehydrogenase [Vigna
  misc_feature (1)..(436): Homolog of NCBI NO: 15219217 NR Description: inosine-5'-monophosphate dehydrogenase, putative
  misc_feature (1)..(436): Homolog of NCBI NO: 21618070 NR Description: inosine-5'-monophosphate dehydrogenase, putative
  misc_feature (1)..(436): Homolog of NCBI NO: 15219385 NR Description: inosine-5'-monophosphate dehydrogenase
MAAAMASLGGIGIVHYNCGIAAQASIIRQAKSLKHPIASDAGVKFPEYEITSLDAFGPSSFVFVEQTGTMTTPKLLGYVTKSQWKRMNYEQREMKIYDYMKSCDSSDYCVPWEIDFEKLEFVLEDKQKGFVVLERDGETVNVVTKDDIQRVKGYPKSGPGTVGPDGEWMVGAAIGTRESDKERLEHLVNVGVNAVVLDSSQGNSIYQLEMIKYVKKTYPELDVIGGNVVTMYQAQNLIQAGVDGLRVGMGSGSICTTQEVCAVGRGQATAVYKVCSIAAQSGIPVIADGGISNSGHIVKALVLGASTVMMGSFLAGSTEAPGGYEYTNGKRIKKYRGMGSLEAMTKGSDQRYLGDQTKLKIAQGVVGAVADKGSVLKLIPYTMHAVKQGFQDLGASSLQSAHGLLRSNILRLEARTGAAQVEGGVHGLVSYEKKSF

SEQ ID NO: 38288 - DNA, 767 bp, Arabidopsis thaliana
  misc_feature (1)..(767): Ceres Seq. ID no. 13497708
  misc_feature: MA Experiment ID: 108434 Result: Up-regulated in Transcription
  misc_feature: MA Experiment 108434 PARAMETER Experiment Name: At_Root_Tips_cDNA_P Parameter: Tissue Value: Root Tips
  misc_feature: MA Experiment ID: 108435 Result: Up-regulated in Transcription
  misc_feature: MA Experiment 108435 PARAMETER Experiment Name: At_stm_Mutants_cDNA_P Parameter: Plant Line Value: wt Landsburg vs stm
  misc_feature: MA Experiment 108435 PARAMETER Experiment Name: At_stm_Mutants_cDNA_P Parameter: Tissue Value: Shoot Apical Meristem Region
  misc_feature: MA Experiment ID: 108461 Result: Up-regulated in Transcription
  misc_feature: MA Experiment 108461 PARAMETER Experiment Name: At_Germinating_Seeds_cDNA_P Parameter: Age (day) Value: 1 vs. 0
  misc_feature: MA Experiment 108461 PARAMETER Experiment Name: At_Germinating_Seeds_cDNA_P Parameter: Tissue Value: Germinating Seeds
  misc_feature: MA Experiment ID: 108462 Result: Up-regulated in Transcription
  misc_feature: MA Experiment 108462 PARAMETER Experiment Name: At_Germinating_Seeds_cDNA_P Parameter: Age (day) Value: 2 vs. 0
  misc_feature: MA Experiment 108462 PARAMETER Experiment Name: At_Germinating_Seeds_cDNA_P Parameter: Tissue Value: Germinating Seeds
  misc_feature: MA Experiment ID: 108463 Result: Up-regulated in Transcription
  misc_feature: MA Experiment 108463 PARAMETER Experiment Name: At_Germinating_Seeds_cDNA_P Parameter: Age (day) Value: 3 vs. 0
  misc_feature: MA Experiment 108463 PARAMETER Experiment Name: At_Germinating_Seeds_cDNA_P Parameter: Tissue Value: Germinating Seeds
  misc_feature: MA Experiment ID: 108474 Result: Down-regulated in Transcription
  misc_feature: MA Experiment 108474 PARAMETER Experiment Name: At_Drought_Flowers_cDNA_P Parameter: Timepoint (hr) Value: null
  misc_feature: MA Experiment 108474 PARAMETER Experiment Name: At_Drought_Flowers_cDNA_P Parameter: Treatment Value: Drought vs. No Drought
  misc_feature: MA Experiment ID: 108501 Result: Up-regulated in Transcription
  misc_feature: MA Experiment 108501 PARAMETER Experiment Name: At_ap2_floral_buds_cDNA_P Parameter: Plant Line Value: ap2 (Ler.)
  misc_feature: MA Experiment 108501 PARAMETER Experiment Name: At_ap2_floral_buds_cDNA_P Parameter: Tissue Value: Closed Flower
  misc_feature: MA Experiment ID: 108561 Result: Down-regulated in Transcription
  misc_feature: MA Experiment 108561 PARAMETER Experiment Name: At_100uM_ABA_cDNA_P Parameter: Timepoint (hr) Value: 6
  misc_feature: MA Experiment 108561 PARAMETER Experiment Name: At_100uM_ABA_cDNA_P Parameter: Tissue Value: Aerial
  misc_feature: MA Experiment 108561 PARAMETER Experiment Name: At_100uM_ABA_cDNA_P Parameter: Treatment Value: 100uM ABA vs. No Treatment
  misc_feature: MA Experiment ID: 108572 Result: Down-regulated in Transcription
  misc_feature: MA Experiment 108572 PARAMETER Experiment Name: At_Drought_cDNA_P Parameter: Timepoint (hr) Value: 1
  misc_feature: MA Experiment 108572 PARAMETER Experiment Name: At_Drought_cDNA_P Parameter: Tissue Value: Aerial
  misc_feature: MA Experiment 108572 PARAMETER Experiment Name: At_Drought_cDNA_P Parameter: Treatment Value: Drought vs. No Drought
  misc_feature: MA Experiment ID: 108576 Result: Down-regulated in Transcription
  misc_feature: MA Experiment 108576 PARAMETER Experiment Name: At_42deg_Heat_cDNA_P Parameter: Temperature (deg C) Value: 42 vs. 22
  misc_feature: MA Experiment 108576 PARAMETER Experiment Name: At_42deg_Heat_cDNA_P Parameter: Timepoint (hr) Value: 1
  misc_feature: MA Experiment 108576 PARAMETER Experiment Name: At_42deg_Heat_cDNA_P Parameter: Tissue Value: Aerial
  misc_feature: MA Experiment ID: 108577 Result: Up-regulated in Transcription
  misc_feature: MA Experiment 108577 PARAMETER Experiment Name: At_42deg_Heat_cDNA_P Parameter: Temperature (deg C) Value: 42 vs. 22
  misc_feature: MA Experiment 108577 PARAMETER Experiment Name: At_42deg_Heat_cDNA_P Parameter: Timepoint (hr) Value: 6
  misc_feature: MA Experiment 108577 PARAMETER Experiment Name: At_42deg_Heat_cDNA_P Parameter: Tissue Value: Aerial
  misc_feature: MA Experiment ID: 108579 Result: Up-regulated in Transcription
  misc_feature: MA Experiment 108579 PARAMETER Experiment Name: At_4deg_Cold_cDNA_P Parameter: Temperature (deg C) Value: 4 vs. 22
  misc_feature: MA Experiment 108579 PARAMETER Experiment Name: At_4deg_Cold_cDNA_P Parameter: Timepoint (hr) Value: 6
  misc_feature: MA Experiment 108579 PARAMETER Experiment Name: At_4deg_Cold_cDNA_P Parameter: Tissue Value: Aerial
  misc_feature: MA Experiment ID: 108585 Result: Up-regulated in Transcription
  misc_feature: MA Experiment 108585 PARAMETER Experiment Name: At_5mM_NaNP_cDNA_P Parameter: Timepoint (hr) Value: 6
  misc_feature: MA Experiment 108585 PARAMETER Experiment Name: At_5mM_NaNP_cDNA_P Parameter: Tissue Value: Aerial
  misc_feature: MA Experiment 108585 PARAMETER Experiment Name: At_5mM_NaNP_cDNA_P Parameter: Treatment Value: null
  misc_feature: MA Experiment ID: 108595 Result: Up-regulated in Transcription
  misc_feature: MA Experiment 108595 PARAMETER Experiment Name: At_Ler-pi_Ovule_cDNA_P Parameter: Plant Line Value: null
  misc_feature: MA Experiment ID: 108605 Result: Down-regulated in Transcription
  misc_feature: MA Experiment 108605 PARAMETER Experiment Name: At_100uM_ABA_cDNA_P Parameter: Timepoint (hr) Value: 6
  misc_feature: MA Experiment 108605 PARAMETER Experiment Name: At_100uM_ABA_cDNA_P Parameter: Tissue Value: Aerial
  misc_feature: MA Experiment 108605 PARAMETER Experiment Name: At_100uM_ABA_cDNA_P Parameter: Treatment Value: 100uM ABA vs. No Treatment
  misc_feature: MA Experiment ID: 108668 Result: Up-regulated in Transcription
  misc_feature: MA Experiment 108668 PARAMETER Experiment Name: At_2mM_SA_cDNA_P Parameter: Plant Line Value: WS
  misc_feature: MA Experiment 108668 PARAMETER Experiment Name: At_2mM_SA_cDNA_P Parameter: Timepoint (hr) Value: 6
  misc_feature: MA Experiment 108668 PARAMETER Experiment Name: At_2mM_SA_cDNA_P Parameter: Treatment Value: 2mM SA vs. No Treatment
  misc_feature: MA Experiment ID: 20000069 Result: Down-regulated in Transcription
  misc_feature: MA Experiment 20000069 PARAMETER Experiment Name: At_100uM_ABA_Mutants_cDNA_P Parameter: Plant Line Value: CS23
  misc_feature: MA Experiment 20000069 PARAMETER Experiment Name: At_100uM_ABA_Mutants_cDNA_P Parameter: Timepoint (hr) Value: 6
  misc_feature: MA Experiment 20000069 PARAMETER Experiment Name: At_100uM_ABA_Mutants_cDNA_P Parameter: Tissue Value: Aerial
  misc_feature: MA Experiment 20000069 PARAMETER Experiment Name: At_100uM_ABA_Mutants_cDNA_P Parameter: Treatment Value: 100uM ABA vs. No Treatment
  misc_feature: MA Experiment ID: 20000070 Result: Down-regulated in Transcription
  misc_feature: MA Experiment 20000070 PARAMETER Experiment Name: At_100uM_ABA_Mutants_cDNA_P Parameter: Plant Line Value: CS24
  misc_feature: MA Experiment 20000070 PARAMETER Experiment Name: At_100uM_ABA_Mutants_cDNA_P Parameter: Timepoint (hr) Value: 6
  misc_feature: MA Experiment 20000070 PARAMETER Experiment Name: At_100uM_ABA_Mutants_cDNA_P Parameter: Tissue Value: Aerial
  misc_feature: MA Experiment 20000070 PARAMETER Experiment Name: At_100uM_ABA_Mutants_cDNA_P Parameter: Treatment Value: 100uM ABA vs. No Treatment
  misc_feature: MA Experiment ID: 20000071 Result: Down-regulated in Transcription
  misc_feature: MA Experiment 20000071 PARAMETER Experiment Name: At_100uM_ABA_Mutants_cDNA_P Parameter: Plant Line Value: CS8104
  misc_feature: MA Experiment 20000071 PARAMETER Experiment Name: At_100uM_ABA_Mutants_cDNA_P Parameter: Timepoint (hr) Value: 6
  misc_feature: MA Experiment 20000071 PARAMETER Experiment Name: At_100uM_ABA_Mutants_cDNA_P Parameter: Tissue Value: Aerial
  misc_feature: MA Experiment 20000071 PARAMETER Experiment Name: At_100uM_ABA_Mutants_cDNA_P Parameter: Treatment Value: 100uM ABA vs. No Treatment
  misc_feature: MA Experiment ID: 20000072 Result: Down-regulated in Transcription
  misc_feature: MA Experiment 20000072 PARAMETER Experiment Name: At_100uM_ABA_Mutants_cDNA_P Parameter: Plant Line Value: CS8105
  misc_feature: MA Experiment 20000072 PARAMETER Experiment Name: At_100uM_ABA_Mutants_cDNA_P Parameter: Timepoint (hr) Value: 6
  misc_feature: MA Experiment 20000072 PARAMETER Experiment Name: At_100uM_ABA_Mutants_cDNA_P Parameter: Tissue Value: Aerial
  misc_feature: MA Experiment 20000072 PARAMETER Experiment Name: At_100uM_ABA_Mutants_cDNA_P Parameter: Treatment Value: 100uM ABA vs. No Treatment
  misc_feature: MA Experiment ID: 20000087 Result: Down-regulated in Transcription
  misc_feature: MA Experiment 20000087 PARAMETER Experiment Name: At_100uM_ABA_Mutants_cDNA_P Parameter: Plant Line Value: WS
  misc_feature: MA Experiment 20000087 PARAMETER Experiment Name: At_100uM_ABA_Mutants_cDNA_P Parameter: Timepoint (hr) Value: 6
  misc_feature: MA Experiment 20000087 PARAMETER Experiment Name: At_100uM_ABA_Mutants_cDNA_P Parameter: Tissue Value: Aerial
  misc_feature: MA Experiment 20000087 PARAMETER Experiment Name: At_100uM_ABA_Mutants_cDNA_P Parameter: Treatment Value: 100uM ABA vs. No Treatment
  misc_feature: MA Experiment ID: 20000088 Result: Down-regulated in Transcription
  misc_feature: MA Experiment 20000088 PARAMETER Experiment Name: At_100uM_ABA_Mutants_cDNA_P Parameter: Plant Line Value: Landsberg
  misc_feature: MA Experiment 20000088 PARAMETER Experiment Name: At_100uM_ABA_Mutants_cDNA_P Parameter: Timepoint (hr) Value: 6
  misc_feature: MA Experiment 20000088 PARAMETER Experiment Name: At_100uM_ABA_Mutants_cDNA_P Parameter: Tissue Value: Aerial
  misc_feature: MA Experiment 20000088 PARAMETER Experiment Name: At_100uM_ABA_Mutants_cDNA_P Parameter: Treatment Value: 100uM ABA vs. No Treatment
  misc_feature: MA Experiment ID: 20000111 Result: Up-regulated in Transcription
  misc_feature: MA Experiment 20000111 PARAMETER Experiment Name: At_42deg_Heat_cDNA_P Parameter: Temperature (deg C) Value: 42 vs. 22
  misc_feature: MA Experiment 20000111 PARAMETER Experiment Name: At_42deg_Heat_cDNA_P Parameter: Timepoint (hr) Value: 6
  misc_feature: MA Experiment 20000111 PARAMETER Experiment Name: At_42deg_Heat_cDNA_P Parameter: Tissue Value: Aerial
  misc_feature: MA Experiment ID: 20000112 Result: Up-regulated in Transcription
  misc_feature: MA Experiment 20000112 PARAMETER Experiment Name: At_42deg_Heat_cDNA_P Parameter: Temperature (deg C) Value: 42 vs. 22
  misc_feature: MA Experiment 20000112 PARAMETER Experiment Name: At_42deg_Heat_cDNA_P Parameter: Timepoint (hr) Value: 2
  misc_feature: MA Experiment 20000112 PARAMETER Experiment Name: At_42deg_Heat_cDNA_P Parameter: Tissue Value: Aerial
  misc_feature: MA Experiment ID: 20000117 Result: Down-regulated in Transcription
  misc_feature: MA Experiment 20000117 PARAMETER Experiment Name: At_100uM_ABA_Mutants_cDNA_P Parameter: Plant Line Value: Columbia
  misc_feature: MA Experiment 20000117 PARAMETER Experiment Name: At_100uM_ABA_Mutants_cDNA_P Parameter: Timepoint (hr) Value: 6
  misc_feature: MA Experiment 20000117 PARAMETER Experiment Name: At_100uM_ABA_Mutants_cDNA_P Parameter: Tissue Value: Aerial
  misc_feature: MA Experiment 20000117 PARAMETER Experiment Name: At_100uM_ABA_Mutants_cDNA_P Parameter: Treatment Value: 100uM ABA vs. No Treatment
  misc_feature: MA Experiment ID: 20000144 Result: Up-regulated in Transcription
  misc_feature: MA Experiment 20000144 PARAMETER Experiment Name: At_42deg_Heat_cDNA_P Parameter: Temperature (deg C) Value: 42 vs. 22
  misc_feature: MA Experiment 20000144 PARAMETER Experiment Name: At_42deg_Heat_cDNA_P Parameter: Timepoint (hr) Value: 1
  misc_feature: MA Experiment 20000144 PARAMETER Experiment Name: At_42deg_Heat_cDNA_P Parameter: Tissue Value: Aerial
  misc_feature: MA Experiment ID: 20000169 Result: Down-regulated in Transcription
  misc_feature: MA Experiment 20000169 PARAMETER Experiment Name: At_100uM_ABA_P Parameter: Age (day) Value: 14
  misc_feature: MA Experiment 20000169 PARAMETER Experiment Name: At_100uM_ABA_P Parameter: Organism Value: A. thaliana
  misc_feature: MA Experiment 20000169 PARAMETER Experiment Name: At_100uM_ABA_P Parameter: Plant Line Value: WS
  misc_feature: MA Experiment 20000169 PARAMETER Experiment Name: At_100uM_ABA_P Parameter: Timepoint (hr) Value: 6
  misc_feature: MA Experiment 20000169 PARAMETER Experiment Name: At_100uM_ABA_P Parameter: Tissue Value: Aerial
  misc_feature: MA Experiment 20000169 PARAMETER Experiment Name: At_100uM_ABA_P Parameter: Treatment Value: 100uM ABA vs. No Treatment
  misc_feature: MA Experiment ID: 20000171 Result: Up-regulated in Transcription
  misc_feature: MA Experiment 20000171 PARAMETER Experiment Name: At_42deg_Heat_P Parameter: Age (day) Value: 14
  misc_feature: MA Experiment 20000171 PARAMETER Experiment Name: At_42deg_Heat_P Parameter: Organism Value: A. thaliana
  misc_feature: MA Experiment 20000171 PARAMETER Experiment Name: At_42deg_Heat_P Parameter: Plant Line Value: WS
  misc_feature: MA Experiment 20000171 PARAMETER Experiment Name: At_42deg_Heat_P Parameter: Temperature (deg C) Value: 42 vs. 22
  misc_feature: MA Experiment 20000171 PARAMETER Experiment Name: At_42deg_Heat_P Parameter: Timepoint (hr) Value: 1
  misc_feature: MA Experiment 20000171 PARAMETER Experiment Name: At_42deg_Heat_P Parameter: Tissue Value: Aerial
  misc_feature: MA Experiment ID: 20000173 Result: Up-regulated in Transcription
  misc_feature: MA Experiment 20000173 PARAMETER Experiment Name: At_42deg_Heat_P Parameter: Age (day) Value: 14
  misc_feature: MA Experiment 20000173 PARAMETER Experiment Name: At_42deg_Heat_P Parameter: Organism Value: A. thaliana
  misc_feature: MA Experiment 20000173 PARAMETER Experiment Name: At_42deg_Heat_P Parameter: Plant Line Value: WS
  misc_feature: MA Experiment 20000173 PARAMETER Experiment Name: At_42deg_Heat_P Parameter: Temperature (deg C) Value: 42 vs. 22
  misc_feature: MA Experiment 20000173 PARAMETER Experiment Name: At_42deg_Heat_P Parameter: Timepoint (hr) Value: 6
  misc_feature: MA Experiment 20000173 PARAMETER Experiment Name: At_42deg_Heat_P Parameter: Tissue Value: Aerial
  misc_feature: MA Experiment ID: 20000179 Result: Up-regulated in Transcription
  misc_feature: MA Experiment 20000179 PARAMETER Experiment Name: At_Germinating_Seeds_P Parameter: Age (hr) Value: 6 vs. 0
  misc_feature: MA Experiment 20000179 PARAMETER Experiment Name: At_Germinating_Seeds_P Parameter: Tissue Value: Germinating Seeds
  misc_feature: MA Experiment ID: 20000180 Result: Up-regulated in Transcription
  misc_feature: MA Experiment 20000180 PARAMETER Experiment Name: At_Germinating_Seeds_P Parameter: Age (hr) Value: 24 vs. 0
  misc_feature: MA Experiment 20000180 PARAMETER Experiment Name: At_Germinating_Seeds_P Parameter: Tissue Value: Germinating Seeds
  misc_feature: MA Experiment ID: 20000182 Result: Up-regulated in Transcription
  misc_feature: MA Experiment 20000182 PARAMETER Experiment Name: At_2mM_SA_P Parameter: Age (day) Value: 14
  misc_feature: MA Experiment 20000182 PARAMETER Experiment Name: At_2mM_SA_P Parameter: Organism Value: A. thaliana
  misc_feature: MA Experiment 20000182 PARAMETER Experiment Name: At_2mM_SA_P Parameter: Plant Line Value: WS
  misc_feature: MA Experiment 20000182 PARAMETER Experiment Name: At_2mM_SA_P Parameter: Timepoint (hr) Value: 6
  misc_feature: MA Experiment 20000182 PARAMETER Experiment Name: At_2mM_SA_P Parameter: Tissue Value: Aerial
  misc_feature: MA Experiment 20000182 PARAMETER Experiment Name: At_2mM_SA_P Parameter: Treatment Value: 2mM SA vs. No Treatment
  misc_feature: MA Experiment ID: 20000185 Result: Up-regulated in Transcription
  misc_feature: MA Experiment 20000185 PARAMETER Experiment Name: At_Roots__P Parameter: Age (day) Value: 7 vs. 21
  misc_feature: MA Experiment 20000185 PARAMETER Experiment Name: At_Roots__P Parameter: Organism Value: A. thaliana
  misc_feature: MA Experiment 20000185 PARAMETER Experiment Name: At_Roots__P Parameter: Tissue Value: Roots vs. Whole Plant
  misc_feature: MA Experiment ID: 20000213 Result: Up-regulated in Transcription
  misc_feature: MA Experiment 20000213 PARAMETER Experiment Name: At_4deg_Cold_P Parameter: Timepoint (hr) Value: 2
  misc_feature: MA Experiment ID: 20000234 Result: Up-regulated in Transcription
  misc_feature: MA Experiment 20000234 PARAMETER Experiment Name: At_Siliques_P Parameter: Age (day) Value: 21
  misc_feature: MA Experiment 20000234 PARAMETER Experiment Name: At_Siliques_P Parameter: Organism Value: A. thaliana
  misc_feature: MA Experiment 20000234 PARAMETER Experiment Name: At_Siliques_P Parameter: Plant Line Value: WS
  misc_feature: MA Experiment 20000234 PARAMETER Experiment Name: At_Siliques_P Parameter: Tissue Value: Less Than 5mm Siliques vs. Whole Plant
  misc_feature: MA Experiment ID: 20000235 Result: Up-regulated in Transcription
  misc_feature: MA Experiment 20000235 PARAMETER Experiment Name: At_Siliques_P Parameter: Age (day) Value: 21
  misc_feature: MA Experiment 20000235 PARAMETER Experiment Name: At_Siliques_P Parameter: Organism Value: A. thaliana
  misc_feature: MA Experiment 20000235 PARAMETER Experiment Name: At_Siliques_P Parameter: Plant Line Value: WS
  misc_feature: MA Experiment 20000235 PARAMETER Experiment Name: At_Siliques_P Parameter: Tissue Value: 5-10mm Siliques vs. Whole Plant
  misc_feature: MA Experiment ID: 20000264 Result: Up-regulated in Transcription
  misc_feature: MA Experiment 20000264 PARAMETER Experiment Name: At_Open_Flower_P Parameter: Age (day) Value: 21
  misc_feature: MA Experiment 20000264 PARAMETER Experiment Name: At_Open_Flower_P Parameter: Plant Line Value: WS
  misc_feature: MA Experiment 20000264 PARAMETER Experiment Name: At_Open_Flower_P Parameter: Tissue Value: Open Flower vs. Whole Plant
  misc_feature: MA Experiment ID: 20000265 Result: Up-regulated in Transcription
  misc_feature: MA Experiment 20000265 PARAMETER Experiment Name: At_Open_Flower_P Parameter: Age (day) Value: 21
  misc_feature: MA Experiment 20000265 PARAMETER Experiment Name: At_Open_Flower_P Parameter: Plant Line Value: WS
  misc_feature: MA Experiment 20000265 PARAMETER Experiment Name: At_Open_Flower_P Parameter: Tissue Value: Closed Flower vs. Whole Plant
  misc_feature: MA Experiment ID: 20000267 Result: Up-regulated in Transcription
  misc_feature: MA Experiment 20000267 PARAMETER Experiment Name: At_Drought_P Parameter: Age (day) Value: 7
  misc_feature: MA Experiment 20000267 PARAMETER Experiment Name: At_Drought_P Parameter: Organism Value: A. thaliana
  misc_feature: MA Experiment 20000267 PARAMETER Experiment Name: At_Drought_P Parameter: Plant Line Value: WS
  misc_feature: MA Experiment 20000267 PARAMETER Experiment Name: At_Drought_P Parameter: Timepoint (hr) Value: 6
  misc_feature: MA Experiment 20000267 PARAMETER Experiment Name: At_Drought_P Parameter: Tissue Value: Whole Plant
  misc_feature: MA Experiment 20000267 PARAMETER Experiment Name: At_Drought_P Parameter: Treatment Value: Drought vs. No Drought
  misc_feature: MA Experiment ID: 20000268 Result: Up-regulated in Transcription
  misc_feature: MA Experiment 20000268 PARAMETER Experiment Name: At_100mM_NaCl__P Parameter: Age (day) Value: 14
  misc_feature: MA Experiment 20000268 PARAMETER Experiment Name: At_100mM_NaCl__P Parameter: Organism Value: A. thaliana
  misc_feature: MA Experiment 20000268 PARAMETER Experiment Name: At_100mM_NaCl__P Parameter: Plant Line Value: WS
  misc_feature: MA Experiment 20000268 PARAMETER Experiment Name: At_100mM_NaCl__P Parameter: Timepoint (hr) Value: 6
  misc_feature: MA Experiment 20000268 PARAMETER Experiment Name: At_100mM_NaCl__P Parameter: Tissue Value: Whole Plant
  misc_feature: MA Experiment 20000268 PARAMETER Experiment Name: At_100mM_NaCl__P Parameter: Treatment Value: 100mM NaCl vs. No Treatment
  misc_feature: MA Experiment ID: 20000286 Result: Up-regulated in Transcription
  misc_feature: MA Experiment 20000286 PARAMETER Experiment Name: At_Open_Flower_P Parameter: Age (day) Value: 21
  misc_feature: MA Experiment 20000286 PARAMETER Experiment Name: At_Open_Flower_P Parameter: Plant Line Value: WS
  misc_feature: MA Experiment 20000286 PARAMETER Experiment Name: At_Open_Flower_P Parameter: Tissue Value: Half Open vs. Whole Plant
  misc_feature: MA Experiment ID: 20000439 Result: Up-regulated in Transcription
  misc_feature: MA Experiment 20000439 PARAMETER Experiment Name: At_Roots__P Parameter: Age (day) Value: 14 vs. 21
  misc_feature: MA Experiment 20000439 PARAMETER Experiment Name: At_Roots__P Parameter: Organism Value: A. thaliana
  misc_feature: MA Experiment 20000439 PARAMETER Experiment Name: At_Roots__P Parameter: Tissue Value: Roots vs. Whole Plant
  misc_feature: MA Experiment ID: 20000456 Result: Up-regulated in Transcription
  misc_feature: MA Experiment 20000456 PARAMETER Experiment Name: At_100uM_BA_P Parameter: Age (day) Value: 14
  misc_feature: MA Experiment 20000456 PARAMETER Experiment Name: At_100uM_BA_P Parameter: Organism Value: A. thaliana
  misc_feature: MA Experiment 20000456 PARAMETER Experiment Name: At_100uM_BA_P Parameter: Plant Line Value: WS
  misc_feature: MA Experiment 20000456 PARAMETER Experiment Name: At_100uM_BA_P Parameter: Timepoint (hr) Value: 6
  misc_feature: MA Experiment 20000456 PARAMETER Experiment Name: At_100uM_BA_P Parameter: Tissue Value: Aerial
  misc_feature: MA Experiment 20000456 PARAMETER Experiment Name: At_100uM_BA_P Parameter: Treatment Value: 100uM BA vs. No Treatment
  misc_feature: MA Experiment ID: 20000495 Result: Down-regulated in Transcription
  misc_feature: MA Experiment 20000495 PARAMETER Experiment Name: At_Guard_Cells_P Parameter: Harvest Date Value: 8/2/2002
  misc_feature: MA Experiment 20000495 PARAMETER Experiment Name: At_Guard_Cells_P Parameter: Organism Value: A. thaliana
  misc_feature: MA Experiment 20000495 PARAMETER Experiment Name: At_Guard_Cells_P Parameter: Tissue Value: Guard Cells vs. Leaves
  misc_feature: MA Experiment ID: 20000527 Result: Up-regulated in Transcription
  misc_feature: MA Experiment 20000527 PARAMETER Experiment Name: At_10percent_PEG_P Parameter: Age (day) Value: 20
  misc_feature: MA Experiment 20000527 PARAMETER Experiment Name: At_10percent_PEG_P Parameter: Organism Value: A. thaliana
  misc_feature: MA Experiment 20000527 PARAMETER Experiment Name: At_10percent_PEG_P Parameter: Plant Line Value: WS
  misc_feature: MA Experiment 20000527 PARAMETER Experiment Name: At_10percent_PEG_P Parameter: Timepoint (day) Value: 20
  misc_feature: MA Experiment 20000527 PARAMETER Experiment Name: At_10percent_PEG_P Parameter: Tissue Value: Whole Plant
  misc_feature: MA Experiment 20000527 PARAMETER Experiment Name: At_10percent_PEG_P Parameter: Treatment Value: 10percent PEG vs. No Treatment
  misc_feature: MA Experiment ID: 20000709 Result: Up-regulated in Transcription
  misc_feature: MA Experiment 20000709 PARAMETER Experiment Name: At_15mM_NH4NO3_L-to-H_P Parameter: Age (hr) Value: 14
  misc_feature: MA Experiment 20000709 PARAMETER Experiment Name: At_15mM_NH4NO3_L-to-H_P Parameter: Organism Value: A. thaliana
  misc_feature: MA Experiment 20000709 PARAMETER Experiment Name: At_15mM_NH4NO3_L-to-H_P Parameter: Plant Line Value: WS
  misc_feature: MA Experiment 20000709 PARAMETER Experiment Name: At_15mM_NH4NO3_L-to-H_P Parameter: Timepoint (hr) Value: 4
  misc_feature: MA Experiment 20000709 PARAMETER Experiment Name: At_15mM_NH4NO3_L-to-H_P Parameter: Tissue Value: Aerial
  misc_feature: MA Experiment 20000709 PARAMETER Experiment Name: At_15mM_NH4NO3_L-to-H_P Parameter: Treatment Value: 15mM NH4NO3 vs. 30mM Mannitol
  misc_feature: MA Experiment ID: 20000794 Result: Up-regulated in Transcription
  misc_feature: MA Experiment 20000794 PARAMETER Experiment Name: At_Petals_P Parameter: Age (day) Value: 23-25 days
  misc_feature: MA Experiment 20000794 PARAMETER Experiment Name: At_Petals_P Parameter: Plant Line Value: WS
  misc_feature: MA Experiment 20000794 PARAMETER Experiment Name: At_Petals_P Parameter: Tissue Value: Petals vs. Whole plant
  misc_feature: MA Experiment ID: 20001248 Result: Down-regulated in Transcription
  misc_feature: MA Experiment 20001248 PARAMETER Experiment Name: At_Far-red-induction_P Parameter: Age (day) Value: 7
  misc_feature: MA Experiment 20001248 PARAMETER Experiment Name: At_Far-red-induction_P Parameter: Light Value: Far-red vs. White
  misc_feature: MA Experiment 20001248 PARAMETER Experiment Name: At_Far-red-induction_P Parameter: Organism Value: A. thaliana
  misc_feature: MA Experiment 20001248 PARAMETER Experiment Name: At_Far-red-induction_P Parameter: Plant Line Value: Columbia
  misc_feature: MA Experiment 20001248 PARAMETER Experiment Name: At_Far-red-induction_P Parameter: Timepoint (hr) Value: 4
  misc_feature: MA Experiment 20001248 PARAMETER Experiment Name: At_Far-red-induction_P Parameter: Tissue Value: Whole Plant
  misc_feature: MA Experiment ID: 20001451 Result: Up-regulated in Transcription
  misc_feature: MA Experiment 20001451 PARAMETER Experiment Name: At_Far-red-induction_P Parameter: Age (day) Value: 7
  misc_feature: MA Experiment 20001451 PARAMETER Experiment Name: At_Far-red-induction_P Parameter: Light Value: Far-red vs. White
  misc_feature: MA Experiment 20001451 PARAMETER Experiment Name: At_Far-red-induction_P Parameter: Organism Value: A. thaliana
  misc_feature: MA Experiment 20001451 PARAMETER Experiment Name: At_Far-red-induction_P Parameter: Plant Line Value: Columbia
  misc_feature: MA Experiment 20001451 PARAMETER Experiment Name: At_Far-red-induction_P Parameter: Timepoint (hr) Value: 24
  misc_feature: MA Experiment 20001451 PARAMETER Experiment Name: At_Far-red-induction_P Parameter: Tissue Value: Whole Plant
  misc_feature: MA Experiment ID: 20001557 Result: Up-regulated in Transcription
  misc_feature: MA Experiment 20001557 PARAMETER Experiment Name: At_Drought_Soil_Dry_P Parameter: Age (day) Value: 27
  misc_feature: MA Experiment 20001557 PARAMETER Experiment Name: At_Drought_Soil_Dry_P Parameter: Organism Value: A. thaliana
  misc_feature: MA Experiment 20001557 PARAMETER Experiment Name: At_Drought_Soil_Dry_P Parameter: Plant Line Value: WS
  misc_feature: MA Experiment 20001557 PARAMETER Experiment Name: At_Drought_Soil_Dry_P Parameter: Post Timepoint (hr) Value: 3
  misc_feature: MA Experiment 20001557 PARAMETER Experiment Name: At_Drought_Soil_Dry_P Parameter: Post-Treatment Value: Re-Water vs. No Drought
  misc_feature: MA Experiment 20001557 PARAMETER Experiment Name: At_Drought_Soil_Dry_P Parameter: Timepoint (day) Value: 13
  misc_feature: MA Experiment 20001557 PARAMETER Experiment Name: At_Drought_Soil_Dry_P Parameter: Treatment Value: Drought vs. No Drought
  misc_feature: MA Experiment ID: 20001560 Result: Up-regulated in Transcription
  misc_feature: MA Experiment 20001560 PARAMETER Experiment Name: At_Drought_Soil_Dry_P Parameter: Age (day) Value: 28
  misc_feature: MA Experiment 20001560 PARAMETER Experiment Name: At_Drought_Soil_Dry_P Parameter: Organism Value: A. thaliana
  misc_feature: MA Experiment 20001560 PARAMETER Experiment Name: At_Drought_Soil_Dry_P Parameter: Plant Line Value: WS
  misc_feature: MA Experiment 20001560 PARAMETER Experiment Name: At_Drought_Soil_Dry_P Parameter: Post Timepoint (hr) Value: None
  misc_feature: MA Experiment 20001560 PARAMETER Experiment Name: At_Drought_Soil_Dry_P Parameter: Post-Treatment Value: None
  misc_feature: MA Experiment 20001560 PARAMETER Experiment Name: At_Drought_Soil_Dry_P Parameter: Timepoint (day) Value: 14
  misc_feature: MA Experiment 20001560 PARAMETER Experiment Name: At_Drought_Soil_Dry_P Parameter: Treatment Value: Drought vs. No Drought
  misc_feature: MA Experiment ID: 20001755 Result: Down-regulated in Transcription
  misc_feature: MA Experiment 20001755 PARAMETER Experiment Name: At_50mM_NH4NO3_L-to-H_P Parameter: Timepoint (hr) Value: 2
  misc_feature: MA Experiment 20001755 PARAMETER Experiment Name: At_50mM_NH4NO3_L-to-H_P Parameter: Tissue Value: Leaf
  misc_feature: MA Experiment 20001755 PARAMETER Experiment Name: At_50mM_NH4NO3_L-to-H_P Parameter: Treatment Value: 50mM NH4NO3 vs 100mM Mannitol
  misc_feature: MA Experiment ID: 20001756 Result: Up-regulated in Transcription
  misc_feature: MA Experiment 20001756 PARAMETER Experiment Name: At_50mM_NH4NO3_L-to-H_P Parameter: Timepoint (hr) Value: 4
  misc_feature: MA Experiment 20001756 PARAMETER Experiment Name: At_50mM_NH4NO3_L-to-H_P Parameter: Tissue Value: Leaf
  misc_feature: MA Experiment 20001756 PARAMETER Experiment Name: At_50mM_NH4NO3_L-to-H_P Parameter: Treatment Value: 50mM NH4NO3 vs 100mM Mannitol
  misc_feature: MA Experiment ID: 20001757 Result: Down-regulated in Transcription
  misc_feature: MA Experiment 20001757 PARAMETER Experiment Name: At_50mM_NH4NO3_L-to-H_P Parameter: Timepoint (hr) Value: 6
  misc_feature: MA Experiment 20001757 PARAMETER Experiment Name: At_50mM_NH4NO3_L-to-H_P Parameter: Tissue Value: Leaf
  misc_feature: MA Experiment 20001757 PARAMETER Experiment Name: At_50mM_NH4NO3_L-to-H_P Parameter: Treatment Value: 50mM NH4NO3 vs 100mM Mannitol
  misc_feature: MA Experiment ID: 20001760 Result: Up-regulated in Transcription
  misc_feature: MA Experiment 20001760 PARAMETER Experiment Name: At_50mM_NH4NO3_L-to-H_P Parameter: Timepoint (hr) Value: 2
  misc_feature: MA Experiment 20001760 PARAMETER Experiment Name: At_50mM_NH4NO3_L-to-H_P Parameter: Tissue Value: Siliques
  misc_feature: MA Experiment 20001760 PARAMETER Experiment Name: At_50mM_NH4NO3_L-to-H_P Parameter: Treatment Value: 50mM NH4NO3 vs 100mM Mannitol
  misc_feature: MA Experiment ID: 20001771 Result: Up-regulated in Transcription
  misc_feature: MA Experiment 20001771 PARAMETER Experiment Name: At_Far-red-enriched-adult_P Parameter: Age (day) Value: 28
  misc_feature: MA Experiment 20001771 PARAMETER Experiment Name: At_Far-red-enriched-adult_P Parameter: Light Value: Far-red enriched vs. White
  misc_feature: MA Experiment 20001771 PARAMETER Experiment Name: At_Far-red-enriched-adult_P Parameter: Organism Value: A. thaliana
  misc_feature: MA Experiment 20001771 PARAMETER Experiment Name: At_Far-red-enriched-adult_P Parameter: Plant Line Value: Columbia
  misc_feature: MA Experiment 20001771 PARAMETER Experiment Name: At_Far-red-enriched-adult_P Parameter: Timepoint (hr) Value: 16
  misc_feature: MA Experiment 20001771 PARAMETER Experiment Name: At_Far-red-enriched-adult_P Parameter: Tissue Value: Aerial
  misc_feature: MA Experiment ID: 20001904 Result: Up-regulated in Transcription
  misc_feature: MA Experiment 20001904 PARAMETER Experiment Name: At_Drought_Reproduction_P Parameter: Age (day) Value: 37
  misc_feature: MA Experiment 20001904 PARAMETER Experiment Name: At_Drought_Reproduction_P Parameter: Organism Value: A. thaliana
  misc_feature: MA Experiment 20001904 PARAMETER Experiment Name: At_Drought_Reproduction_P Parameter: Plant Line Value: WS
  misc_feature: MA Experiment 20001904 PARAMETER Experiment Name: At_Drought_Reproduction_P Parameter: Timepoint (day) Value: 7
  misc_feature: MA Experiment 20001904 PARAMETER Experiment Name: At_Drought_Reproduction_P Parameter: Tissue Value: Rosettes
  misc_feature: MA Experiment 20001904 PARAMETER Experiment Name: At_Drought_Reproduction_P Parameter: Treatment Value: Drought vs. No Drought
  misc_feature: MA Experiment ID: 20001906 Result: Up-regulated in Transcription
  misc_feature: MA Experiment 20001906 PARAMETER Experiment Name: At_Drought_Reproduction_P Parameter: Age (day) Value: 35
  misc_feature: MA Experiment 20001906 PARAMETER Experiment Name: At_Drought_Reproduction_P Parameter: Organism Value: A. thaliana
  misc_feature: MA Experiment 20001906 PARAMETER Experiment Name: At_Drought_Reproduction_P Parameter: Plant Line Value: WS
  misc_feature: MA Experiment 20001906 PARAMETER Experiment Name: At_Drought_Reproduction_P Parameter: Timepoint (day) Value: 5
  misc_feature: MA Experiment 20001906 PARAMETER Experiment Name: At_Drought_Reproduction_P Parameter: Tissue Value: Siliques
  misc_feature: MA Experiment 20001906 PARAMETER Experiment Name: At_Drought_Reproduction_P Parameter: Treatment Value: Drought vs. No Drought
  misc_feature: MA Experiment ID: 20001908 Result: Up-regulated in Transcription
  misc_feature: MA Experiment 20001908 PARAMETER Experiment Name: At_Drought_Reproduction_P Parameter: Age (day) Value: 40
  misc_feature: MA Experiment 20001908 PARAMETER Experiment Name: At_Drought_Reproduction_P Parameter: Organism Value: A. thaliana
  misc_feature: MA Experiment 20001908 PARAMETER Experiment Name: At_Drought_Reproduction_P Parameter: Plant Line Value: WS
  misc_feature: MA Experiment 20001908 PARAMETER Experiment Name: At_Drought_Reproduction_P Parameter: Timepoint (day) Value: 10
  misc_feature: MA Experiment 20001908 PARAMETER Experiment Name: At_Drought_Reproduction_P Parameter: Tissue Value: Siliques
  misc_feature: MA Experiment 20001908 PARAMETER Experiment Name: At_Drought_Reproduction_P Parameter: Treatment Value: Drought vs. No Drought
aaaccaactccatctcacttctcaagtcttataatttattcatttctctcttcttcatcgatctttggcttttagaaaacctaatcagaaatggcaacggcgtcgtttaacatgcagtcagtgttcgctgctccttccggtgtattgactacacgcaacatcagaaacacaaaccaactcttcttcaagaggaatgctccggtaggagtcagatgcatggctcagggcgatcctatcaaggaagatccttctgtgccctcgacctcgacttcggccactcaaccacaaatgccacagtctcctcctccaccagttagcaagcctaaggtgagtacgaagtttggagatttgctagcgtttagcggtccagcacccgagaggatcaacgggagactagcaatggttggattcgtggcggccatcgccgtggagttatcaaagggagaaaacgtgtttgctcagatctctgacggtggtgtcgggtggtttctaggaacaaccgcgttgttgacgttggcatcgatggttccgttgttcaagggaataagggcagaggcaaagtcaaaagggttcatgacttcagacgccgagctatggaacggtcggtttgcgatgctcggtctcgttgcgttggccttcaccgagtacgtcactggtgggactctagtctaaggctaaagctttttgtttgctagtttaaggacaaatttggagaatgattatgtaacgcatagtttgatttaatactatgagttttaaacagtgtg

SEQ ID NO: 38289 - protein, 193 aa, Arabidopsis thaliana
  peptide (1)..(193): Ceres Seq. ID no. 13497709
  misc_feature (1)..(193): Homolog of NCBI NO: 38123375 NR Description: ELIP [Brassica rapa subsp. pekinensis]
  misc_feature (1)..(193): Homolog of NCBI NO: 15228866 NR Description: early light-induced protein [Arabidopsis
  misc_feature (8)..(193): Homolog of NCBI NO: 25315849 NR Description: early light-inducable protein [imported] -
  misc_feature (1)..(192): Homolog of NCBI NO: 7488128 NR Description: probable light induced protein - Arabidopsis
  misc_feature (1)..(193): Homolog of NCBI NO: 18414282 NR Description: expressed protein [Arabidopsis thaliana]
  misc_feature (1)..(193): Homolog of NCBI NO: 21618071 NR Description: light-induced protein-like protein [Arabidopsis
  misc_feature (1)..(193): Homolog of NCBI NO: 38123375 NR Description: ELIP [Brassica rapa subsp. pekinensis]
  misc_feature (1)..(193): Homolog of NCBI NO: 15228866 NR Description: early light-induced protein [Arabidopsis
  misc_feature (8)..(193): Homolog of NCBI NO: 25315849 NR Description: early light-inducable protein [imported] -
  misc_feature (1)..(192): Homolog of NCBI NO: 7488128 NR Description: probable light induced protein - Arabidopsis
  misc_feature (1)..(193): Homolog of NCBI NO: 18414282 NR Description: expressed protein [Arabidopsis thaliana]
  misc_feature (1)..(193): Homolog of NCBI NO: 21618071 NR Description: light-induced protein-like protein [Arabidopsis
MATASFNMQSVFAAPSGVLTTRNIRNTNQLFFKRNAPVGVRCMAQGDPIKEDPSVPSTSTSATQPQMPQSPPPPVSKPKVSTKFGDLLAFSGPAPERINGRLAMVGFVAAIAVELSKGENVFAQISDGGVGWFLGTTALLTLASMVPLFKGIRAEAKSKGFMTSDAELWNGRFAMLGLVALAFTEYVTGGTLV

SEQ ID NO: 38290 - protein, 186 aa, Arabidopsis thaliana
  peptide (1)..(186): Ceres Seq. ID no. 13497710
  misc_feature (1)..(186): Homolog of NCBI NO: 38123375 NR Description: ELIP [Brassica rapa subsp. pekinensis]
  misc_feature (1)..(186): Homolog of NCBI NO: 15228866 NR Description: early light-induced protein [Arabidopsis
  misc_feature (1)..(186): Homolog of NCBI NO: 25315849 NR Description: early light-inducable protein [imported] -
  misc_feature (1)..(185): Homolog of NCBI NO: 7488128 NR Description: probable light induced protein - Arabidopsis
  misc_feature (1)..(186): Homolog of NCBI NO: 18414282 NR Description: expressed protein [Arabidopsis thaliana]
  misc_feature (1)..(186): Homolog of NCBI NO: 21618071 NR Description: light-induced protein-like protein [Arabidopsis
  misc_feature (1)..(186): Homolog of NCBI NO: 38123375 NR Description: ELIP [Brassica rapa subsp. pekinensis]
  misc_feature (1)..(186): Homolog of NCBI NO: 15228866 NR Description: early light-induced protein [Arabidopsis
  misc_feature (1)..(186): Homolog of NCBI NO: 25315849 NR Description: early light-inducable protein [imported] -
  misc_feature (1)..(185): Homolog of NCBI NO: 7488128 NR Description: probable light induced protein - Arabidopsis
  misc_feature (1)..(186): Homolog of NCBI NO: 18414282 NR Description: expressed protein [Arabidopsis thaliana]
  misc_feature (1)..(186): Homolog of NCBI NO: 21618071 NR Description: light-induced protein-like protein [Arabidopsis
MQSVFAAPSGVLTTRNIRNTNQLFFKRNAPVGVRCMAQGDPIKEDPSVPSTSTSATQPQMPQSPPPPVSKPKVSTKFGDLLAFSGPAPERINGRLAMVGFVAAIAVELSKGENVFAQISDGGVGWFLGTTALLTLASMVPLFKGIRAEAKSKGFMTSDAELWNGRFAMLGLVALAFTEYVTGGTLV

SEQ ID NO: 38291 - protein, 151 aa, Arabidopsis thaliana
  peptide (1)..(151): Ceres Seq. ID no. 13497711
  misc_feature (1)..(151): Homolog of NCBI NO: 38123375 NR Description: ELIP [Brassica rapa subsp. pekinensis]
  misc_feature (1)..(151): Homolog of NCBI NO: 15228866 NR Description: early light-induced protein [Arabidopsis
  misc_feature (1)..(151): Homolog of NCBI NO: 25315849 NR Description: early light-inducable protein [imported] -
  misc_feature (1)..(150): Homolog of NCBI NO: 7488128 NR Description: probable light induced protein - Arabidopsis
  misc_feature (1)..(151): Homolog of NCBI NO: 18414282 NR Description: expressed protein [Arabidopsis thaliana]
  misc_feature (1)..(151): Homolog of NCBI NO: 21618071 NR Description: light-induced protein-like protein [Arabidopsis
  misc_feature (1)..(151): Homolog of NCBI NO: 38123375 NR Description: ELIP [Brassica rapa subsp. pekinensis]
  misc_feature (1)..(151): Homolog of NCBI NO: 15228866 NR Description: early light-induced protein [Arabidopsis
  misc_feature (1)..(151): Homolog of NCBI NO: 25315849 NR Description: early light-inducable protein [imported] -
  misc_feature (1)..(150): Homolog of NCBI NO: 7488128 NR Description: probable light induced protein - Arabidopsis
  misc_feature (1)..(151): Homolog of NCBI NO: 18414282 NR Description: expressed protein [Arabidopsis thaliana]
  misc_feature (1)..(151): Homolog of NCBI NO: 21618071 NR Description: light-induced protein-like protein [Arabidopsis
MAQGDPIKEDPSVPSTSTSATQPQMPQSPPPPVSKPKVSTKFGDLLAFSGPAPERINGRLAMVGFVAAIAVELSKGENVFAQISDGGVGWFLGTTALLTLASMVPLFKGIRAEAKSKGFMTSDAELWNGRFAMLGLVALAFTEYVTGGTLV

SEQ ID NO: 38292 - DNA, 753 bp, Arabidopsis thaliana
  misc_feature (1)..(753): Ceres Seq. ID no. 12488252
  misc_feature: MA Experiment ID: 108434 Result: Down-regulated in Transcription
  misc_feature: MA Experiment 108434 PARAMETER Experiment Name: At_Root_Tips_cDNA_P Parameter: Tissue Value: Root Tips
  misc_feature: MA Experiment ID: 108435 Result: Down-regulated in Transcription
  misc_feature: MA Experiment 108435 PARAMETER Experiment Name: At_stm_Mutants_cDNA_P Parameter: Plant Line Value: wt Landsburg vs stm
  misc_feature: MA Experiment 108435 PARAMETER Experiment Name: At_stm_Mutants_cDNA_P Parameter: Tissue Value: Shoot Apical Meristem Region
  misc_feature: MA Experiment ID: 108461 Result: Up-regulated in Transcription
  misc_feature: MA Experiment 108461 PARAMETER Experiment Name: At_Germinating_Seeds_cDNA_P Parameter: Age (day) Value: 1 vs. 0
  misc_feature: MA Experiment 108461 PARAMETER Experiment Name: At_Germinating_Seeds_cDNA_P Parameter: Tissue Value: Germinating Seeds
  misc_feature: MA Experiment ID: 108462 Result: Up-regulated in Transcription
  misc_feature: MA Experiment 108462 PARAMETER Experiment Name: At_Germinating_Seeds_cDNA_P Parameter: Age (day) Value: 2 vs. 0
  misc_feature: MA Experiment 108462 PARAMETER Experiment Name: At_Germinating_Seeds_cDNA_P Parameter: Tissue Value: Germinating Seeds
  misc_feature: MA Experiment ID: 108464 Result: Up-regulated in Transcription
  misc_feature: MA Experiment 108464 PARAMETER Experiment Name: At_Germinating_Seeds_cDNA_P Parameter: Age (day) Value: 4 vs. 0
  misc_feature: MA Experiment 108464 PARAMETER Experiment Name: At_Germinating_Seeds_cDNA_P Parameter: Tissue Value: Germinating Seeds
  misc_feature: MA Experiment ID: 108489 Result: Down-regulated in Transcription
  misc_feature: MA Experiment ID: 108595 Result: Down-regulated in Transcription
  misc_feature: MA Experiment 108595 PARAMETER Experiment Name: At_Ler-pi_Ovule_cDNA_P Parameter: Plant Line Value: null
  misc_feature: MA Experiment ID: 20000180 Result: Up-regulated in Transcription
  misc_feature: MA Experiment 20000180 PARAMETER Experiment Name: At_Germinating_Seeds_P Parameter: Age (hr) Value: 24 vs. 0
  misc_feature: MA Experiment 20000180 PARAMETER Experiment Name: At_Germinating_Seeds_P Parameter: Tissue Value: Germinating Seeds
  misc_feature: MA Experiment ID: 20000185 Result: Down-regulated in Transcription
  misc_feature: MA Experiment 20000185 PARAMETER Experiment Name: At_Roots__P Parameter: Age (day) Value: 7 vs. 21
  misc_feature: MA Experiment 20000185 PARAMETER Experiment Name: At_Roots__P Parameter: Organism Value: A. thaliana
  misc_feature: MA Experiment 20000185 PARAMETER Experiment Name: At_Roots__P Parameter: Tissue Value: Roots vs. Whole Plant
  misc_feature: MA Experiment ID: 20000224 Result: Down-regulated in Transcription
  misc_feature: MA Experiment ID: 20000264 Result: Down-regulated in Transcription
  misc_feature: MA Experiment 20000264 PARAMETER Experiment Name: At_Open_Flower_P Parameter: Age (day) Value: 21
  misc_feature: MA Experiment 20000264 PARAMETER Experiment Name: At_Open_Flower_P Parameter: Plant Line Value: WS
  misc_feature: MA Experiment 20000264 PARAMETER Experiment Name: At_Open_Flower_P Parameter: Tissue Value: Open Flower vs. Whole Plant
  misc_feature: MA Experiment ID: 20000286 Result: Down-regulated in Transcription
  misc_feature: MA Experiment 20000286 PARAMETER Experiment Name: At_Open_Flower_P Parameter: Age (day) Value: 21
  misc_feature: MA Experiment 20000286 PARAMETER Experiment Name: At_Open_Flower_P Parameter: Plant Line Value: WS
  misc_feature: MA Experiment 20000286 PARAMETER Experiment Name: At_Open_Flower_P Parameter: Tissue Value: Half Open vs. Whole Plant
  misc_feature: MA Experiment ID: 20000438 Result: Up-regulated in Transcription
  misc_feature: MA Experiment 20000438 PARAMETER Experiment Name: At_Shoots__P Parameter: Age (day) Value: 14
  misc_feature: MA Experiment 20000438 PARAMETER Experiment Name: At_Shoots__P Parameter: Tissue Value: Shoots vs. Whole Plant
  misc_feature: MA Experiment ID: 20000439 Result: Down-regulated in Transcription
  misc_feature: MA Experiment 20000439 PARAMETER Experiment Name: At_Roots__P Parameter: Age (day) Value: 14 vs. 21
  misc_feature: MA Experiment 20000439 PARAMETER Experiment Name: At_Roots__P Parameter: Organism Value: A. thaliana
  misc_feature: MA Experiment 20000439 PARAMETER Experiment Name: At_Roots__P Parameter: Tissue Value: Roots vs. Whole Plant
  misc_feature: MA Experiment ID: 20000794 Result: Down-regulated in Transcription
  misc_feature: MA Experiment 20000794 PARAMETER Experiment Name: At_Petals_P Parameter: Age (day) Value: 23-25 days
  misc_feature: MA Experiment 20000794 PARAMETER Experiment Name: At_Petals_P Parameter: Plant Line Value: WS
  misc_feature: MA Experiment 20000794 PARAMETER Experiment Name: At_Petals_P Parameter: Tissue Value: Petals vs. Whole plant
  misc_feature: MA Experiment ID: 20001451 Result: Down-regulated in Transcription
  misc_feature: MA Experiment 20001451 PARAMETER Experiment Name: At_Far-red-induction_P Parameter: Age (day) Value: 7
  misc_feature: MA Experiment 20001451 PARAMETER Experiment Name: At_Far-red-induction_P Parameter: Light Value: Far-red vs. White
  misc_feature: MA Experiment 20001451 PARAMETER Experiment Name: At_Far-red-induction_P Parameter: Organism Value: A. thaliana
  misc_feature: MA Experiment 20001451 PARAMETER Experiment Name: At_Far-red-induction_P Parameter: Plant Line Value: Columbia
  misc_feature: MA Experiment 20001451 PARAMETER Experiment Name: At_Far-red-induction_P Parameter: Timepoint (hr) Value: 24
  misc_feature: MA Experiment 20001451 PARAMETER Experiment Name: At_Far-red-induction_P Parameter: Tissue Value: Whole Plant
  misc_feature: MA Experiment ID: 20001557 Result: Down-regulated in Transcription
  misc_feature: MA Experiment 20001557 PARAMETER Experiment Name: At_Drought_Soil_Dry_P Parameter: Age (day) Value: 27
  misc_feature: MA Experiment 20001557 PARAMETER Experiment Name: At_Drought_Soil_Dry_P Parameter: Organism Value: A. thaliana
  misc_feature: MA Experiment 20001557 PARAMETER Experiment Name: At_Drought_Soil_Dry_P Parameter: Plant Line Value: WS
  misc_feature: MA Experiment 20001557 PARAMETER Experiment Name: At_Drought_Soil_Dry_P Parameter: Post Timepoint (hr) Value: 3
  misc_feature: MA Experiment 20001557 PARAMETER Experiment Name: At_Drought_Soil_Dry_P Parameter: Post-Treatment Value: Re-Water vs. No Drought
  misc_feature: MA Experiment 20001557 PARAMETER Experiment Name: At_Drought_Soil_Dry_P Parameter: Timepoint (day) Value: 13
  misc_feature: MA Experiment 20001557 PARAMETER Experiment Name: At_Drought_Soil_Dry_P Parameter: Treatment Value: Drought vs. No Drought
  misc_feature: MA Experiment ID: 20001757 Result: Up-regulated in Transcription
  misc_feature: MA Experiment 20001757 PARAMETER Experiment Name: At_50mM_NH4NO3_L-to-H_P Parameter: Timepoint (hr) Value: 6
  misc_feature: MA Experiment 20001757 PARAMETER Experiment Name: At_50mM_NH4NO3_L-to-H_P Parameter: Tissue Value: Leaf
  misc_feature: MA Experiment 20001757 PARAMETER Experiment Name: At_50mM_NH4NO3_L-to-H_P Parameter: Treatment Value: 50mM NH4NO3 vs 100mM Mannitol
  misc_feature: MA Experiment ID: 20001905 Result: Down-regulated in Transcription
  misc_feature: MA Experiment 20001905 PARAMETER Experiment Name: At_Drought_Reproduction_P Parameter: Age (day) Value: 40
  misc_feature: MA Experiment 20001905 PARAMETER Experiment Name: At_Drought_Reproduction_P Parameter: Organism Value: A. thaliana
  misc_feature: MA Experiment 20001905 PARAMETER Experiment Name: At_Drought_Reproduction_P Parameter: Plant Line Value: WS
  misc_feature: MA Experiment 20001905 PARAMETER Experiment Name: At_Drought_Reproduction_P Parameter: Timepoint (day) Value: 10
  misc_feature: MA Experiment 20001905 PARAMETER Experiment Name: At_Drought_Reproduction_P Parameter: Tissue Value: Rosettes
  misc_feature: MA Experiment 20001905 PARAMETER Experiment Name: At_Drought_Reproduction_P Parameter: Treatment Value: Drought vs. No Drought
  misc_feature: MA Experiment ID: 20001906 Result: Down-regulated in Transcription
  misc_feature: MA Experiment 20001906 PARAMETER Experiment Name: At_Drought_Reproduction_P Parameter: Age (day) Value: 35
  misc_feature: MA Experiment 20001906 PARAMETER Experiment Name: At_Drought_Reproduction_P Parameter: Organism Value: A. thaliana
  misc_feature: MA Experiment 20001906 PARAMETER Experiment Name: At_Drought_Reproduction_P Parameter: Plant Line Value: WS
  misc_feature: MA Experiment 20001906 PARAMETER Experiment Name: At_Drought_Reproduction_P Parameter: Timepoint (day) Value: 5
  misc_feature: MA Experiment 20001906 PARAMETER Experiment Name: At_Drought_Reproduction_P Parameter: Tissue Value: Siliques
  misc_feature: MA Experiment 20001906 PARAMETER Experiment Name: At_Drought_Reproduction_P Parameter: Treatment Value: Drought vs. No Drought
  misc_feature: MA Experiment ID: 20001908 Result: Down-regulated in Transcription
  misc_feature: MA Experiment 20001908 PARAMETER Experiment Name: At_Drought_Reproduction_P Parameter: Age (day) Value: 40
  misc_feature: MA Experiment 20001908 PARAMETER Experiment Name: At_Drought_Reproduction_P Parameter: Organism Value: A. thaliana
  misc_feature: MA Experiment 20001908 PARAMETER Experiment Name: At_Drought_Reproduction_P Parameter: Plant Line Value: WS
  misc_feature: MA Experiment 20001908 PARAMETER Experiment Name: At_Drought_Reproduction_P Parameter: Timepoint (day) Value: 10
  misc_feature: MA Experiment 20001908 PARAMETER Experiment Name: At_Drought_Reproduction_P Parameter: Tissue Value: Siliques
  misc_feature: MA Experiment 20001908 PARAMETER Experiment Name: At_Drought_Reproduction_P Parameter: Treatment Value: Drought vs. No Drought
actcatttttctattactgaaatttttcttagagaagaagaagaagaggcaaaatggccacaagcgcatcagctttgctctcaccaatagcttcttcctctgctctttcccttgcgatcgcatctgcgtacacttttctcctcccatcttccgggattacactgaaaagctcgtccactggcgcgatggtgctgatggatctgtagaaacttccaccaccttattttctgccacggccgtattcgcaaaaatgtctgctaccagcgacgcaatcttcaacttccagagagagaacgtagcaaaacagggcttaccggagcagaacggaaaaacccatttcgaagctggagatgatcgtgctaaggagtacgtcagtctcttgaaatcgaacgatccaattggattcaacattgttgatgttcttgcttggggttctattggacacatcgttgcttactacatcttggctacttccagcaatggatacgacccaagcttctttggatgattcgtttcaatgtcaatctctcgtatatgtatatgtatatgtttgacttgtgttgcaagctatctaatctgttctctatctctgtttcttcttctgttgttgntgtttttgtctaagacttgtccctctttttgcaaatgttttatttctccatttacaaatattggtttgcagagttttataagaagaacataatagtataaaaaaaaaaaaaaaaaagcttctcgtgccggcttctcgtgccg

SEQ ID NO: 38293 - protein, 168 aa, Arabidopsis thaliana
  peptide (1)..(168): Ceres Seq. ID no. 12488253
  misc_feature (92)..(164): Pfam Name: Photosystem I psaG / psaK Pfam Description: Photosystem I psaG / psaK
  misc_feature (61)..(163): Homolog of NCBI NO: 17369611 NR Description: Photosystem I reaction center subunit V,
  misc_feature (92)..(167): Homolog of NCBI NO: 131194 NR Description: Photosystem I reaction center subunit V,
  misc_feature (64)..(168): Homolog of NCBI NO: 131192 NR Description: Photosystem I reaction center subunit V,
  misc_feature (92)..(168): Homolog of NCBI NO: 15222757 NR Description: photosystem I subunit V precursor, putative
LIFLLLKFFLEKKKKRQNGHKRISFALTNSFFLCSFPCDRICVHFSPPIFRDYTEKLVHWRDGADGSVETSTTLFSATAVFAKMSATSDAIFNFQRENVAKQGLPEQNGKTHFEAGDDRAKEYVSLLKSNDPIGFNIVDVLAWGSIGHIVAYYILATSSNGYDPSFFG

SEQ ID NO: 38294 - protein, 85 aa, Arabidopsis thaliana
  peptide (1)..(85): Ceres Seq. ID no. 12488254
  misc_feature (9)..(81): Pfam Name: Photosystem I psaG / psaK Pfam Description: Photosystem I psaG / psaK
  misc_feature (1)..(80): Homolog of NCBI NO: 17369611 NR Description: Photosystem I reaction center subunit V,
  misc_feature (9)..(84): Homolog of NCBI NO: 131194 NR Description: Photosystem I reaction center subunit V,
  misc_feature (1)..(85): Homolog of NCBI NO: 131192 NR Description: Photosystem I reaction center subunit V,
  misc_feature (9)..(85): Homolog of NCBI NO: 15222757 NR Description: photosystem I subunit V precursor, putative
MSATSDAIFNFQRENVAKQGLPEQNGKTHFEAGDDRAKEYVSLLKSNDPIGFNIVDVLAWGSIGHIVAYYILATSSNGYDPSFFG

SEQ ID NO: 38295 - DNA, 1689 bp, Arabidopsis thaliana
  misc_feature (1)..(1689): Ceres Seq. ID no. 12669827
  misc_feature: MA Experiment ID: 20000184 Result: Up-regulated in Transcription
  misc_feature: MA Experiment 20000184 PARAMETER Experiment Name: At_Shoots__P Parameter: Age (day) Value: 7
  misc_feature: MA Experiment 20000184 PARAMETER Experiment Name: At_Shoots__P Parameter: Tissue Value: Shoots vs. Whole Plant
  misc_feature: MA Experiment ID: 20000185 Result: Down-regulated in Transcription
  misc_feature: MA Experiment 20000185 PARAMETER Experiment Name: At_Roots__P Parameter: Age (day) Value: 7 vs. 21
  misc_feature: MA Experiment 20000185 PARAMETER Experiment Name: At_Roots__P Parameter: Organism Value: A. thaliana
  misc_feature: MA Experiment 20000185 PARAMETER Experiment Name: At_Roots__P Parameter: Tissue Value: Roots vs. Whole Plant
  misc_feature: MA Experiment ID: 20000437 Result: Down-regulated in Transcription
  misc_feature: MA Experiment 20000437 PARAMETER Experiment Name: At_Drought_P Parameter: Age (day) Value: 8
  misc_feature: MA Experiment 20000437 PARAMETER Experiment Name: At_Drought_P Parameter: Organism Value: A. thaliana
  misc_feature: MA Experiment 20000437 PARAMETER Experiment Name: At_Drought_P Parameter: Plant Line Value: WS
  misc_feature: MA Experiment 20000437 PARAMETER Experiment Name: At_Drought_P Parameter: Timepoint (hr) Value: 24
  misc_feature: MA Experiment 20000437 PARAMETER Experiment Name: At_Drought_P Parameter: Tissue Value: Whole Plant
  misc_feature: MA Experiment 20000437 PARAMETER Experiment Name: At_Drought_P Parameter: Treatment Value: Drought vs. No Drought
  misc_feature: MA Experiment ID: 20000438 Result: Up-regulated in Transcription
  misc_feature: MA Experiment 20000438 PARAMETER Experiment Name: At_Shoots__P Parameter: Age (day) Value: 14
  misc_feature: MA Experiment 20000438 PARAMETER Experiment Name: At_Shoots__P Parameter: Tissue Value: Shoots vs. Whole Plant
  misc_feature: MA Experiment ID: 20000439 Result: Down-regulated in Transcription
  misc_feature: MA Experiment 20000439 PARAMETER Experiment Name: At_Roots__P Parameter: Age (day) Value: 14 vs. 21
  misc_feature: MA Experiment 20000439 PARAMETER Experiment Name: At_Roots__P Parameter: Organism Value: A. thaliana
  misc_feature: MA Experiment 20000439 PARAMETER Experiment Name: At_Roots__P Parameter: Tissue Value: Roots vs. Whole Plant
atccccaaatcttctccttctccaaaaaaatttcaaaccctagcttctcgatttctctcctctgctctccaattccatcttcccatggcgatttcggctccagccgcttgttcttcctcctctagaattctctgttcctactcctctccttctccttctctctgtcccgccatttccacctctggtaaactcaaaaccctaactctctcttcctccttcctcccttcttactcattaaccaccacctccgcttctcaatccactcgtcgctccttcaccgtccgcgccgctcgtggaaagttcgagaggaagaagcctcatgtcaacatcggaaccatcggtcatgttgaccatgggaaaactactttaaccgcagctctaaccatggctctcgcttccattggttccagcgtcgctaaaaagtacgacgagattgacgctgcgccggaggagagagctcgtggtatcacaatcaacactgctactgttgagtacgagactgagaatcgtcactacgctcacgttgattgtcctggtcacgctgattacgttaagaatatgattaccggagctgcacagatggacggagctatcctcgttgtttccggcgccgatggtcctatgcctcagactaaagagcatatccttttggctaagcaggttggtgttcctgatatggttgtgtttcttaacaaagaggatcaagtagatgatgcagagttgctagagctcgttgagcttgaggttcgtgagcttctctcgtcttatgaatttaacggtgatgatattccgattatctctggttctgctcttttagccgttgagactcttactgagaatcctaaggttaagagaggtgataacaaatgggtagataagatttatgaacttatggatgctgttgatgattacatccctatccctcagagacaaactgaattgccattcttgttagctgttgaggatgtgttctctatcactggacgtggtacggtggctacagggcgtgtcgagagaggtacggttaaggtaggagagactgtagatttagtgggtttgagggagactaggagttacactgtcactggggttgaaatgtttcagaagattcttgatgaggctttagctggtgacaatgtagggttgttgcttaggggtattcaaaaggctgatattcagagaggtatggttttagctaagccgggatcgattactccacataccaagtttgaagcaattatctatgtgttgaagaaagaggaaggtggaaggcattctccattctttgcagggtacaggcctcagttctacatgaggacgactgatgttacgggtaaagtgacgaagatcatgaacgacaaagatgaagagtcgaagatggttatgcccggtgatcgagtgaagattgttgttgagcttattgtgccggtggcttgtgaacaagggatgaggtttgctatcagagaaggaggaaagactgttggtgctggagttattgggacgatcctcgaatgattataaggttttagagagtttcatatagtgagcatctctacttgctttctttttgtttcactcttgattctcaaactctttgagtttttacctttttttatttatttttgtgccattttccataagaacttgaaatcaaaatgtcatatatttcttgattttctgatccttgtt

SEQ ID NO: 38296 - protein, 504 aa, Arabidopsis thaliana
  peptide (1)..(504): Ceres Seq. ID no. 12669828
  misc_feature (105)..(309): Pfam Name: Elongation factor Tu GTP binding domain Pfam Description: Elongation factor Tu GTP binding domain
  misc_feature (105)..(309): Pfam Name: Elongation factor Tu GTP binding domain Pfam Description: Elongation factor Tu GTP binding domain
  misc_feature (29)..(504): Homolog of NCBI NO: 23397095 NR Description: putative chloroplast translation elongation
  misc_feature (29)..(504): Homolog of NCBI NO: 23397095 NR Description: putative chloroplast translation elongation
  misc_feature (29)..(504): Homolog of NCBI NO: 15237059 NR Description: elongation factor Tu, chloroplast precursor
  misc_feature (29)..(504): Homolog of NCBI NO: 15237059 NR Description: elongation factor Tu, chloroplast precursor
IPKSSPSPKKFQTLASRFLSSALQFHLPMAISAPAACSSSSRILCSYSSPSPSLCPAISTSGKLKTLTLSSSFLPSYSLTTTSASQSTRRSFTVRAARGKFERKKPHVNIGTIGHVDHGKTTLTAALTMALASIGSSVAKKYDEIDAAPEERARGITINTATVEYETENRHYAHVDCPGHADYVKNMITGAAQMDGAILVVSGADGPMPQTKEHILLAKQVGVPDMVVFLNKEDQVDDAELLELVELEVRELLSSYEFNGDDIPIISGSALLAVETLTENPKVKRGDNKWVDKIYELMDAVDDYIPIPQRQTELPFLLAVEDVFSITGRGTVATGRVERGTVKVGETVDLVGLRETRSYTVTGVEMFQKILDEALAGDNVGLLLRGIQKADIQRGMVLAKPGSITPHTKFEAIIYVLKKEEGGRHSPFFAGYRPQFYMRTTDVTGKVTKIMNDKDEESKMVMPGDRVKIVVELIVPVACEQGMRFAIREGGKTVGAGVIGTILE

SEQ ID NO: 38297 - protein, 476 aa, Arabidopsis thaliana
  peptide (1)..(476): Ceres Seq. ID no. 12669829
  misc_feature (77)..(281): Pfam Name: Elongation factor Tu GTP binding domain Pfam Description: Elongation factor Tu GTP binding domain
  misc_feature (77)..(281): Pfam Name: Elongation factor Tu GTP binding domain Pfam Description: Elongation factor Tu GTP binding domain
  misc_feature (1)..(476): Homolog of NCBI NO: 23397095 NR Description: putative chloroplast translation elongation
  misc_feature (1)..(476): Homolog of NCBI NO: 23397095 NR Description: putative chloroplast translation elongation
  misc_feature (1)..(476): Homolog of NCBI NO: 15237059 NR Description: elongation factor Tu, chloroplast precursor
  misc_feature (1)..(476): Homolog of NCBI NO: 15237059 NR Description: elongation factor Tu, chloroplast precursor
MAISAPAACSSSSRILCSYSSPSPSLCPAISTSGKLKTLTLSSSFLPSYSLTTTSASQSTRRSFTVRAARGKFERKKPHVNIGTIGHVDHGKTTLTAALTMALASIGSSVAKKYDEIDAAPEERARGITINTATVEYETENRHYAHVDCPGHADYVKNMITGAAQMDGAILVVSGADGPMPQTKEHILLAKQVGVPDMVVFLNKEDQVDDAELLELVELEVRELLSSYEFNGDDIPIISGSALLAVETLTENPKVKRGDNKWVDKIYELMDAVDDYIPIPQRQTELPFLLAVEDVFSITGRGTVATGRVERGTVKVGETVDLVGLRETRSYTVTGVEMFQKILDEALAGDNVGLLLRGIQKADIQRGMVLAKPGSITPHTKFEAIIYVLKKEEGGRHSPFFAGYRPQFYMRTTDVTGKVTKIMNDKDEESKMVMPGDRVKIVVELIVPVACEQGMRFAIREGGKTVGAGVIGTILE

SEQ ID NO: 38298 - protein, 376 aa, Arabidopsis thaliana
  peptide (1)..(376): Ceres Seq. ID no. 12669830
  misc_feature (1)..(181): Pfam Name: Elongation factor Tu GTP binding domain Pfam Description: Elongation factor Tu GTP binding domain
  misc_feature (1)..(181): Pfam Name: Elongation factor Tu GTP binding domain Pfam Description: Elongation factor Tu GTP binding domain
  misc_feature (1)..(376): Homolog of NCBI NO: 23397095 NR Description: putative chloroplast translation elongation
  misc_feature (1)..(376): Homolog of NCBI NO: 23397095 NR Description: putative chloroplast translation elongation
  misc_feature (1)..(376): Homolog of NCBI NO: 15237059 NR Description: elongation factor Tu, chloroplast precursor
  misc_feature (1)..(376): Homolog of NCBI NO: 15237059 NR Description: elongation factor Tu, chloroplast precursor
MALASIGSSVAKKYDEIDAAPEERARGITINTATVEYETENRHYAHVDCPGHADYVKNMITGAAQMDGAILVVSGADGPMPQTKEHILLAKQVGVPDMVVFLNKEDQVDDAELLELVELEVRELLSSYEFNGDDIPIISGSALLAVETLTENPKVKRGDNKWVDKIYELMDAVDDYIPIPQRQTELPFLLAVEDVFSITGRGTVATGRVERGTVKVGETVDLVGLRETRSYTVTGVEMFQKILDEALAGDNVGLLLRGIQKADIQRGMVLAKPGSITPHTKFEAIIYVLKKEEGGRHSPFFAGYRPQFYMRTTDVTGKVTKIMNDKDEESKMVMPGDRVKIVVELIVPVACEQGMRFAIREGGKTVGAGVIGTILE

SEQ ID NO: 38299 - DNA, 1049 bp, Arabidopsis thaliana
  misc_feature (1)..(1049): Ceres Seq. ID no. 12371939
  misc_feature: MA Experiment ID: 108461 Result: Up-regulated in Transcription
  misc_feature: MA Experiment 108461 PARAMETER Experiment Name: At_Germinating_Seeds_cDNA_P Parameter: Age (day) Value: 1 vs. 0
  misc_feature: MA Experiment 108461 PARAMETER Experiment Name: At_Germinating_Seeds_cDNA_P Parameter: Tissue Value: Germinating Seeds
  misc_feature: MA Experiment ID: 108462 Result: Up-regulated in Transcription
  misc_feature: MA Experiment 108462 PARAMETER Experiment Name: At_Germinating_Seeds_cDNA_P Parameter: Age (day) Value: 2 vs. 0
  misc_feature: MA Experiment 108462 PARAMETER Experiment Name: At_Germinating_Seeds_cDNA_P Parameter: Tissue Value: Germinating Seeds
  misc_feature: MA Experiment ID: 108501 Result: Down-regulated in Transcription
  misc_feature: MA Experiment 108501 PARAMETER Experiment Name: At_ap2_floral_buds_cDNA_P Parameter: Plant Line Value: ap2 (Ler.)
  misc_feature: MA Experiment 108501 PARAMETER Experiment Name: At_ap2_floral_buds_cDNA_P Parameter: Tissue Value: Closed Flower
  misc_feature: MA Experiment ID: 108668 Result: Up-regulated in Transcription
  misc_feature: MA Experiment 108668 PARAMETER Experiment Name: At_2mM_SA_cDNA_P Parameter: Plant Line Value: WS
  misc_feature: MA Experiment 108668 PARAMETER Experiment Name: At_2mM_SA_cDNA_P Parameter: Timepoint (hr) Value: 6
  misc_feature: MA Experiment 108668 PARAMETER Experiment Name: At_2mM_SA_cDNA_P Parameter: Treatment Value: 2mM SA vs. No Treatment
  misc_feature: MA Experiment ID: 20000179 Result: Up-regulated in Transcription
  misc_feature: MA Experiment 20000179 PARAMETER Experiment Name: At_Germinating_Seeds_P Parameter: Age (hr) Value: 6 vs. 0
  misc_feature: MA Experiment 20000179 PARAMETER Experiment Name: At_Germinating_Seeds_P Parameter: Tissue Value: Germinating Seeds
  misc_feature: MA Experiment ID: 20000180 Result: Up-regulated in Transcription
  misc_feature: MA Experiment 20000180 PARAMETER Experiment Name: At_Germinating_Seeds_P Parameter: Age (hr) Value: 24 vs. 0
  misc_feature: MA Experiment 20000180 PARAMETER Experiment Name: At_Germinating_Seeds_P Parameter: Tissue Value: Germinating Seeds
  misc_feature: MA Experiment ID: 20000182 Result: Up-regulated in Transcription
  misc_feature: MA Experiment 20000182 PARAMETER Experiment Name: At_2mM_SA_P Parameter: Age (day) Value: 14
  misc_feature: MA Experiment 20000182 PARAMETER Experiment Name: At_2mM_SA_P Parameter: Organism Value: A. thaliana
  misc_feature: MA Experiment 20000182 PARAMETER Experiment Name: At_2mM_SA_P Parameter: Plant Line Value: WS
  misc_feature: MA Experiment 20000182 PARAMETER Experiment Name: At_2mM_SA_P Parameter: Timepoint (hr) Value: 6
  misc_feature: MA Experiment 20000182 PARAMETER Experiment Name: At_2mM_SA_P Parameter: Tissue Value: Aerial
  misc_feature: MA Experiment 20000182 PARAMETER Experiment Name: At_2mM_SA_P Parameter: Treatment Value: 2mM SA vs. No Treatment
  misc_feature: MA Experiment ID: 20000185 Result: Up-regulated in Transcription
  misc_feature: MA Experiment 20000185 PARAMETER Experiment Name: At_Roots__P Parameter: Age (day) Value: 7 vs. 21
  misc_feature: MA Experiment 20000185 PARAMETER Experiment Name: At_Roots__P Parameter: Organism Value: A. thaliana
  misc_feature: MA Experiment 20000185 PARAMETER Experiment Name: At_Roots__P Parameter: Tissue Value: Roots vs. Whole Plant
  misc_feature: MA Experiment ID: 20000264 Result: Down-regulated in Transcription
  misc_feature: MA Experiment 20000264 PARAMETER Experiment Name: At_Open_Flower_P Parameter: Age (day) Value: 21
  misc_feature: MA Experiment 20000264 PARAMETER Experiment Name: At_Open_Flower_P Parameter: Plant Line Value: WS
  misc_feature: MA Experiment 20000264 PARAMETER Experiment Name: At_Open_Flower_P Parameter: Tissue Value: Open Flower vs. Whole Plant
  misc_feature: MA Experiment ID: 20000437 Result: Down-regulated in Transcription
  misc_feature: MA Experiment 20000437 PARAMETER Experiment Name: At_Drought_P Parameter: Age (day) Value: 8
  misc_feature: MA Experiment 20000437 PARAMETER Experiment Name: At_Drought_P Parameter: Organism Value: A. thaliana
  misc_feature: MA Experiment 20000437 PARAMETER Experiment Name: At_Drought_P Parameter: Plant Line Value: WS
  misc_feature: MA Experiment 20000437 PARAMETER Experiment Name: At_Drought_P Parameter: Timepoint (hr) Value: 24
  misc_feature: MA Experiment 20000437 PARAMETER Experiment Name: At_Drought_P Parameter: Tissue Value: Whole Plant
  misc_feature: MA Experiment 20000437 PARAMETER Experiment Name: At_Drought_P Parameter: Treatment Value: Drought vs. No Drought
  misc_feature: MA Experiment ID: 20000496 Result: Up-regulated in Transcription
  misc_feature: MA Experiment 20000496 PARAMETER Experiment Name: At_Guard_Cells_P Parameter: Harvest Date Value: 7/19/2002
  misc_feature: MA Experiment 20000496 PARAMETER Experiment Name: At_Guard_Cells_P Parameter: Organism Value: Canola
  misc_feature: MA Experiment 20000496 PARAMETER Experiment Name: At_Guard_Cells_P Parameter: Tissue Value: Guard Cells vs. Leaves
  misc_feature: MA Experiment ID: 20000794 Result: Down-regulated in Transcription
  misc_feature: MA Experiment 20000794 PARAMETER Experiment Name: At_Petals_P Parameter: Age (day) Value: 23-25 days
  misc_feature: MA Experiment 20000794 PARAMETER Experiment Name: At_Petals_P Parameter: Plant Line Value: WS
  misc_feature: MA Experiment 20000794 PARAMETER Experiment Name: At_Petals_P Parameter: Tissue Value: Petals vs. Whole plant
  misc_feature: MA Experiment ID: 20001905 Result: Down-regulated in Transcription
  misc_feature: MA Experiment 20001905 PARAMETER Experiment Name: At_Drought_Reproduction_P Parameter: Age (day) Value: 40
  misc_feature: MA Experiment 20001905 PARAMETER Experiment Name: At_Drought_Reproduction_P Parameter: Organism Value: A. thaliana
  misc_feature: MA Experiment 20001905 PARAMETER Experiment Name: At_Drought_Reproduction_P Parameter: Plant Line Value: WS
  misc_feature: MA Experiment 20001905 PARAMETER Experiment Name: At_Drought_Reproduction_P Parameter: Timepoint (day) Value: 10
  misc_feature: MA Experiment 20001905 PARAMETER Experiment Name: At_Drought_Reproduction_P Parameter: Tissue Value: Rosettes
  misc_feature: MA Experiment 20001905 PARAMETER Experiment Name: At_Drought_Reproduction_P Parameter: Treatment Value: Drought vs. No Drought
  misc_feature: MA Experiment ID: 20001911 Result: Down-regulated in Transcription
  misc_feature: MA Experiment 20001911 PARAMETER Experiment Name: At_Drought_Reproduction_P Parameter: Age (day) Value: 40
  misc_feature: MA Experiment 20001911 PARAMETER Experiment Name: At_Drought_Reproduction_P Parameter: Organism Value: A. thaliana
  misc_feature: MA Experiment 20001911 PARAMETER Experiment Name: At_Drought_Reproduction_P Parameter: Plant Line Value: WS
  misc_feature: MA Experiment 20001911 PARAMETER Experiment Name: At_Drought_Reproduction_P Parameter: Timepoint (day) Value: 10
  misc_feature: MA Experiment 20001911 PARAMETER Experiment Name: At_Drought_Reproduction_P Parameter: Tissue Value: Flowers
  misc_feature: MA Experiment 20001911 PARAMETER Experiment Name: At_Drought_Reproduction_P Parameter: Treatment Value: Drought vs. No Drought
aaaattactacgattgctataatgtcgatgtctcggctcggattgttgttgttcgtcgctatattgctcgtcttgcttcagtcttccacttgtctgattagttctccaagttctatcatcaatccttctaaagtcaaacaggtttcgtcgaagcccagggcatttgtgtatgaaggttttttgacggacttggaatgtgatcatctaatctctcttgcgaaagagaatctgcagagatctgcggttgctgataacgataatggcgagagtcaagtcagtgatgttcgtaccagctccggcacttttatctccaaaggaaaggatcctattgtttccggtatcgaggacaagctctcaacatggacatttctcccaaaagaaaacggggaagaccttcaggtattgagatatgagcacggtcagaaatatgatgctcactttgactacttccacgacaaagtcaacattgcccgtggtggacaccgcatagcaacggttctcttgtatctgtccaatgtcacaaagggtggagaaactgttttccccgatgcacaggaattctctcgccgctcgctttctgagaataaagacgatctttctgattgtgcaaagaaaggaatcgctgtgaaaccgaagaaagggaatgctctgttgttcttcaacctccaacaagacgcaatcccagacccctttagccttcacggaggttgtccagtgatcgaaggagagaaatggtcggctactaagtggatccacgtggactcattcgataagatattgacacatgatggtaattgtactgacgtaaacgagagctgtgagagatgggcagtgcttggagaatgtggaaagaatccagagtatatggttggaactccagagatccctgggaattgcagacgtagctgtaaagcttgttaaagactttaaactcctctttttctctgtaacattaaaagtttttttttcttgatcgagtttcattttcttgtttctgattgttgttacatgtatcgtctcgctttatagaatgatttttttcgtctggc

SEQ ID NO: 38300 - protein, 306 aa, Arabidopsis thaliana
  peptide (1)..(306): Ceres Seq. ID no. 12371940
  misc_feature (128)..(253): Pfam Name: 2OG-Fe(II) oxygenase superfamily Pfam Description: 2OG-Fe(II) oxygenase superfamily
  misc_feature (34)..(306): Homolog of NCBI NO: 18086437 NR Description: AT3g28480/MFJ20_16 [Arabidopsis thaliana]
  misc_feature (34)..(306): Homolog of NCBI NO: 18405808 NR Description: prolyl 4-hydroxylase, putative
  misc_feature (34)..(306): Homolog of NCBI NO: 9294583 NR Description: prolyl 4-hydroxylase alpha subunit-like protein
  misc_feature (15)..(306): Homolog of NCBI NO: 29150365 NR Description: putative oxidoreductase [Oryza sativa (japonica
  misc_feature (10)..(306): Homolog of NCBI NO: 20260280 NR Description: unknown protein [Arabidopsis thaliana]
  misc_feature (10)..(306): Homolog of NCBI NO: 15239594 NR Description: putative protein
  misc_feature (207)..(306): Homolog of NCBI NO: 6437556 NR Description: unknown protein [Arabidopsis thaliana]
  misc_feature (8)..(185): Homolog of NCBI NO: 6437556 NR Description: unknown protein [Arabidopsis thaliana]
  misc_feature (10)..(306): Homolog of NCBI NO: 21618073 NR Description: prolyl 4-hydroxylase alpha subunit-like protein
  misc_feature (8)..(306): Homolog of NCBI NO: 18397528 NR Description: expressed protein
KITTIAIMSMSRLGLLLFVAILLVLLQSSTCLISSPSSIINPSKVKQVSSKPRAFVYEGFLTDLECDHLISLAKENLQRSAVADNDNGESQVSDVRTSSGTFISKGKDPIVSGIEDKLSTWTFLPKENGEDLQVLRYEHGQKYDAHFDYFHDKVNIARGGHRIATVLLYLSNVTKGGETVFPDAQEFSRRSLSENKDDLSDCAKKGIAVKPKKGNALLFFNLQQDAIPDPFSLHGGCPVIEGEKWSATKWIHVDSFDKILTHDGNCTDVNESCERWAVLGECGKNPEYMVGTPEIPGNCRRSCKAC

SEQ ID NO: 38301 - protein, 299 aa, Arabidopsis thaliana
  peptide (1)..(299): Ceres Seq. ID no. 12371941
  misc_feature (121)..(246): Pfam Name: 2OG-Fe(II) oxygenase superfamily Pfam Description: 2OG-Fe(II) oxygenase superfamily
  misc_feature (27)..(299): Homolog of NCBI NO: 18086437 NR Description: AT3g28480/MFJ20_16 [Arabidopsis thaliana]
  misc_feature (27)..(299): Homolog of NCBI NO: 18405808 NR Description: prolyl 4-hydroxylase, putative
  misc_feature (27)..(299): Homolog of NCBI NO: 9294583 NR Description: prolyl 4-hydroxylase alpha subunit-like protein
  misc_feature (8)..(299): Homolog of NCBI NO: 29150365 NR Description: putative oxidoreductase [Oryza sativa (japonica
  misc_feature (3)..(299): Homolog of NCBI NO: 20260280 NR Description: unknown protein [Arabidopsis thaliana]
  misc_feature (3)..(299): Homolog of NCBI NO: 15239594 NR Description: putative protein
  misc_feature (200)..(299): Homolog of NCBI NO: 6437556 NR Description: unknown protein [Arabidopsis thaliana]
  misc_feature (1)..(178): Homolog of NCBI NO: 6437556 NR Description: unknown protein [Arabidopsis thaliana]
  misc_feature (3)..(299): Homolog of NCBI NO: 21618073 NR Description: prolyl 4-hydroxylase alpha subunit-like protein
  misc_feature (1)..(299): Homolog of NCBI NO: 18397528 NR Description: expressed protein
MSMSRLGLLLFVAILLVLLQSSTCLISSPSSIINPSKVKQVSSKPRAFVYEGFLTDLECDHLISLAKENLQRSAVADNDNGESQVSDVRTSSGTFISKGKDPIVSGIEDKLSTWTFLPKENGEDLQVLRYEHGQKYDAHFDYFHDKVNIARGGHRIATVLLYLSNVTKGGETVFPDAQEFSRRSLSENKDDLSDCAKKGIAVKPKKGNALLFFNLQQDAIPDPFSLHGGCPVIEGEKWSATKWIHVDSFDKILTHDGNCTDVNESCERWAVLGECGKNPEYMVGTPEIPGNCRRSCKAC

SEQ ID NO: 38302 - protein, 297 aa, Arabidopsis thaliana
  peptide (1)..(297): Ceres Seq. ID no. 12371942
  misc_feature (119)..(244): Pfam Name: 2OG-Fe(II) oxygenase superfamily Pfam Description: 2OG-Fe(II) oxygenase superfamily
  misc_feature (25)..(297): Homolog of NCBI NO: 18086437 NR Description: AT3g28480/MFJ20_16 [Arabidopsis thaliana]
  misc_feature (25)..(297): Homolog of NCBI NO: 18405808 NR Description: prolyl 4-hydroxylase, putative
  misc_feature (25)..(297): Homolog of NCBI NO: 9294583 NR Description: prolyl 4-hydroxylase alpha subunit-like protein
  misc_feature (6)..(297): Homolog of NCBI NO: 29150365 NR Description: putative oxidoreductase [Oryza sativa (japonica
  misc_feature (1)..(297): Homolog of NCBI NO: 20260280 NR Description: unknown protein [Arabidopsis thaliana]
  misc_feature (1)..(297): Homolog of NCBI NO: 15239594 NR Description: putative protein
  misc_feature (198)..(297): Homolog of NCBI NO: 6437556 NR Description: unknown protein [Arabidopsis thaliana]
  misc_feature (1)..(176): Homolog of NCBI NO: 6437556 NR Description: unknown protein [Arabidopsis thaliana]
  misc_feature (1)..(297): Homolog of NCBI NO: 21618073 NR Description: prolyl 4-hydroxylase alpha subunit-like protein
  misc_feature (1)..(297): Homolog of NCBI NO: 18397528 NR Description: expressed protein
MSRLGLLLFVAILLVLLQSSTCLISSPSSIINPSKVKQVSSKPRAFVYEGFLTDLECDHLISLAKENLQRSAVADNDNGESQVSDVRTSSGTFISKGKDPIVSGIEDKLSTWTFLPKENGEDLQVLRYEHGQKYDAHFDYFHDKVNIARGGHRIATVLLYLSNVTKGGETVFPDAQEFSRRSLSENKDDLSDCAKKGIAVKPKKGNALLFFNLQQDAIPDPFSLHGGCPVIEGEKWSATKWIHVDSFDKILTHDGNCTDVNESCERWAVLGECGKNPEYMVGTPEIPGNCRRSCKAC

SEQ ID NO: 38303 - DNA, 2967 bp, Arabidopsis thaliana
  misc_feature (1)..(2967): Ceres Seq. ID no. 13580311
  misc_feature: MA Experiment ID: 108434 Result: Up-regulated in Transcription
  misc_feature: MA Experiment 108434 PARAMETER Experiment Name: At_Root_Tips_cDNA_P Parameter: Tissue Value: Root Tips
  misc_feature: MA Experiment ID: 108461 Result: Up-regulated in Transcription
  misc_feature: MA Experiment 108461 PARAMETER Experiment Name: At_Germinating_Seeds_cDNA_P Parameter: Age (day) Value: 1 vs. 0
  misc_feature: MA Experiment 108461 PARAMETER Experiment Name: At_Germinating_Seeds_cDNA_P Parameter: Tissue Value: Germinating Seeds
  misc_feature: MA Experiment ID: 108462 Result: Up-regulated in Transcription
  misc_feature: MA Experiment 108462 PARAMETER Experiment Name: At_Germinating_Seeds_cDNA_P Parameter: Age (day) Value: 2 vs. 0
  misc_feature: MA Experiment 108462 PARAMETER Experiment Name: At_Germinating_Seeds_cDNA_P Parameter: Tissue Value: Germinating Seeds
  misc_feature: MA Experiment ID: 108463 Result: Up-regulated in Transcription
  misc_feature: MA Experiment 108463 PARAMETER Experiment Name: At_Germinating_Seeds_cDNA_P Parameter: Age (day) Value: 3 vs. 0
  misc_feature: MA Experiment 108463 PARAMETER Experiment Name: At_Germinating_Seeds_cDNA_P Parameter: Tissue Value: Germinating Seeds
  misc_feature: MA Experiment ID: 108489 Result: Down-regulated in Transcription
  misc_feature: MA Experiment ID: 108573 Result: Down-regulated in Transcription
  misc_feature: MA Experiment 108573 PARAMETER Experiment Name: At_Drought_cDNA_P Parameter: Timepoint (hr) Value: 6
  misc_feature: MA Experiment 108573 PARAMETER Experiment Name: At_Drought_cDNA_P Parameter: Tissue Value: Aerial
  misc_feature: MA Experiment 108573 PARAMETER Experiment Name: At_Drought_cDNA_P Parameter: Treatment Value: Drought vs. No Drought
  misc_feature: MA Experiment ID: 108607 Result: Up-regulated in Transcription
  misc_feature: MA Experiment 108607 PARAMETER Experiment Name: At_100uM_ABA_cDNA_P Parameter: Timepoint (hr) Value: 4
  misc_feature: MA Experiment 108607 PARAMETER Experiment Name: At_100uM_ABA_cDNA_P Parameter: Tissue Value: Aerial
  misc_feature: MA Experiment 108607 PARAMETER Experiment Name: At_100uM_ABA_cDNA_P Parameter: Treatment Value: 100uM ABA vs. No Treatment
  misc_feature: MA Experiment ID: 108668 Result: Down-regulated in Transcription
  misc_feature: MA Experiment 108668 PARAMETER Experiment Name: At_2mM_SA_cDNA_P Parameter: Plant Line Value: WS
  misc_feature: MA Experiment 108668 PARAMETER Experiment Name: At_2mM_SA_cDNA_P Parameter: Timepoint (hr) Value: 6
  misc_feature: MA Experiment 108668 PARAMETER Experiment Name: At_2mM_SA_cDNA_P Parameter: Treatment Value: 2mM SA vs. No Treatment
  misc_feature: MA Experiment ID: 20000090 Result: Down-regulated in Transcription
  misc_feature: MA Experiment ID: 20000307 Result: Up-regulated in Transcription
  misc_feature: MA Experiment 20000307 PARAMETER Experiment Name: At_Germinating_Seeds_Sub_P Parameter: Age (hr) Value: 24 vs. 0
  misc_feature: MA Experiment 20000307 PARAMETER Experiment Name: At_Germinating_Seeds_Sub_P Parameter: Organism Value: A. thaliana
  misc_feature: MA Experiment 20000307 PARAMETER Experiment Name: At_Germinating_Seeds_Sub_P Parameter: Plant Line Value: WS
  misc_feature: MA Experiment 20000307 PARAMETER Experiment Name: At_Germinating_Seeds_Sub_P Parameter: Tissue Value: Germinating Seeds
  misc_feature: MA Experiment ID: 20000328 Result: Down-regulated in Transcription
  misc_feature: MA Experiment 20000328 PARAMETER Experiment Name: At_42deg_Heat_Sub_P Parameter: Age (day) Value: 14
  misc_feature: MA Experiment 20000328 PARAMETER Experiment Name: At_42deg_Heat_Sub_P Parameter: Organism Value: A. thaliana
  misc_feature: MA Experiment 20000328 PARAMETER Experiment Name: At_42deg_Heat_Sub_P Parameter: Plant Line Value: WS
  misc_feature: MA Experiment 20000328 PARAMETER Experiment Name: At_42deg_Heat_Sub_P Parameter: Temperature (deg C) Value: 42 vs. 22
  misc_feature: MA Experiment 20000328 PARAMETER Experiment Name: At_42deg_Heat_Sub_P Parameter: Timepoint (hr) Value: 6
  misc_feature: MA Experiment 20000328 PARAMETER Experiment Name: At_42deg_Heat_Sub_P Parameter: Tissue Value: Aerial
  misc_feature: MA Experiment ID: 20000347 Result: Down-regulated in Transcription
  misc_feature: MA Experiment 20000347 PARAMETER Experiment Name: At_2mM_SA_Sub_P Parameter: Age (day) Value: 14
  misc_feature: MA Experiment 20000347 PARAMETER Experiment Name: At_2mM_SA_Sub_P Parameter: Organism Value: A. thaliana
  misc_feature: MA Experiment 20000347 PARAMETER Experiment Name: At_2mM_SA_Sub_P Parameter: Plant Line Value: WS
  misc_feature: MA Experiment 20000347 PARAMETER Experiment Name: At_2mM_SA_Sub_P Parameter: Timepoint (hr) Value: 6
  misc_feature: MA Experiment 20000347 PARAMETER Experiment Name: At_2mM_SA_Sub_P Parameter: Tissue Value: Aerial
  misc_feature: MA Experiment 20000347 PARAMETER Experiment Name: At_2mM_SA_Sub_P Parameter: Treatment Value: 2mM SA vs. No Treatment
  misc_feature: MA Experiment ID: 20000348 Result: Up-regulated in Transcription
  misc_feature: MA Experiment 20000348 PARAMETER Experiment Name: At_100uM_ABA_Sub_P Parameter: Age (day) Value: 14
  misc_feature: MA Experiment 20000348 PARAMETER Experiment Name: At_100uM_ABA_Sub_P Parameter: Organism Value: A. thaliana
  misc_feature: MA Experiment 20000348 PARAMETER Experiment Name: At_100uM_ABA_Sub_P Parameter: Plant Line Value: WS
  misc_feature: MA Experiment 20000348 PARAMETER Experiment Name: At_100uM_ABA_Sub_P Parameter: Timepoint (hr) Value: 1
  misc_feature: MA Experiment 20000348 PARAMETER Experiment Name: At_100uM_ABA_Sub_P Parameter: Tissue Value: Aerial
  misc_feature: MA Experiment 20000348 PARAMETER Experiment Name: At_100uM_ABA_Sub_P Parameter: Treatment Value: 100uM ABA vs. No Treatment
  misc_feature: MA Experiment ID: 20000355 Result: Up-regulated in Transcription
  misc_feature: MA Experiment 20000355 PARAMETER Experiment Name: At_Siliques_Sub_P Parameter: Age (day) Value: 21
  misc_feature: MA Experiment 20000355 PARAMETER Experiment Name: At_Siliques_Sub_P Parameter: Organism Value: A. thaliana
  misc_feature: MA Experiment 20000355 PARAMETER Experiment Name: At_Siliques_Sub_P Parameter: Plant Line Value: WS
  misc_feature: MA Experiment 20000355 PARAMETER Experiment Name: At_Siliques_Sub_P Parameter: Tissue Value: Less Than 5mm Siliques vs. Whole Plant
  misc_feature: MA Experiment ID: 20001807 Result: Down-regulated in Transcription
  misc_feature: MA Experiment 20001807 PARAMETER Experiment Name: At_50mM_NH4NO3_L-to-H_Sub_P Parameter: Timepoint (hr) Value: 6
  misc_feature: MA Experiment 20001807 PARAMETER Experiment Name: At_50mM_NH4NO3_L-to-H_Sub_P Parameter: Tissue Value: Leaf
  misc_feature: MA Experiment 20001807 PARAMETER Experiment Name: At_50mM_NH4NO3_L-to-H_Sub_P Parameter: Treatment Value: 50mM NH4NO3 vs 100mM Mannitol
agagaagagaatcttccaaaaatgttaaatcttgtgaaacaaataaagcatagcaaagcaaagtccaaagtccaatgagctaaaacaaaatcaaaaaggtttctttatgttttttttttttgaagtaagaaaaaaaaagagtttataaagaaacagtgaagaaataaatagcagaacaaagagaaagatcggagaaaagaatctttttaggctctctctcgcagacttcgcactcacacactcacttccattgctccaaaaaaacattgtatctacttcacttgctgtagagatatggtatcaagatcttattcaaacctcttggatcttgcttctggtaacttccattcgttttctcgagaaaagaagaggtttccaagagtagcaactgtcactggtgtcttatctgagctagatgatgataacaacagcaacagtgtctgctctgatgctccttcttccgtcacacaagatcgaatcatcatcgttggaaaccagcttcctattaaatcacatcggaactctgctggtaaattgagttttagttgggacaatgactcgcttctcttgcagcttaaagatggtatgcgtgaagatatggaagttgtctacattggttgccttaaggaacagattgatacagttgagcaagatgatgtttctcaaaggttgcttgagaatttcaaatgtgttcctgcttatatcccacctgagctattcactaagtactatcatggattctgtaagcaacatctatggcctttgtttcactacatgcttcccttaactcctgatcttggtggtagatttgatcgttctttatggcaagcttatctttcggttaacaagatctttgctgataaagtgatggaagtgattagtcctgatgatgattttgtttgggttcatgactatcacttaatggttttgcctacatttctaaggaagaggtttaatagagtaaagcttggttttttccttcatagcccgttcccttcctctgagatttaccgtactcttccagtgagaaatgagctcttacgtgcactcctcaacgctgatttgattggctttcatacctttgactatgcaagacacttcctttcttgttgtagcaggatgcttggtttatcctatcagtccaaacgtggaaccatagggcttgagtattatggtcgaacggttagtatcaagattcttcctgtggggattcatatcagccagcttcagtcaattttaaacctcccagagactcagaccaaagttgctgagctaagagatcagttcttggatcagaaagttcttctcggtgttgatgacatggacatcttcaaaggaatcagcctcaaactcttggcaatggaacaacttctcacacagcatcccgagaagagaggtcgagttgtacttgtccagattgcaaaccctgcaagaggtcgtgggaaagacgttcaggaggttcagtctgaaactgaagccacggttaaaaggatcaatgaaatgtttggaaggccgggctaccaacccgtggttctgattgatacaccgcttcaattctttgagaggattgcttactatgtcattgcagagtgttgtcttgttacagcggtaagagatggtatgaatcttataccttatgagtacattatctgcaggcaaggtaatccgaaactcaacgagactataggccttgacccttctgctgcaaagaagagtatgcttgttgtctctgagtttattggttgttctccttctttaagcggcgccattagagtaaatccgtggaacattgatgctgtgactgaagcaatggactatgcattgatagtttcagaagcagagaagcaaatgcgtcacgagaagcatcacaaatatgttagcacacatgatgttgcttattgggcgcgtagctttatacaagatcttgaaagggcttgcggggatcatgtgaggaagaggtgttgggggattggattcgggttaggctttagagttgtggcgcttgatccgagttttaaaaagctttcgattgagcacattgtctcagcttataagagaaccaagaaccgagccattttgttggattatgatggcacaatggtgcagccaggttccattaggacaacaccaacccgcgaaacaatcgaaatcttgaacaacctgtctagtgatcccaagaatatcgtgtacctcgtcagtgggaaagacagaaggacactaactgaatggttttcttcatgtgacgatctcggtttgggtgcagagcacgggtattttataaggccaaatgatggaacagactgggaaacgtcgagtttggtatcaggttttgagtggaaacaaatagcagagccagtgatgagactttacactgagactacagatggatcaacaatagagactaaagagactgctctcgtttggaattaccaattcgcagatcctgattttggatcttgtcaagccaaagagcttatggaacacctcgaaagcgtgcttaccaatgatccagtctctgtcaagactggacaacaactcgttgaagttaaaccacagggtgtgaacaaaggtcttgtggcagagaggcttctaacaacgatgcaagaaaaagggaaacttttggatttcattctctgcgtcggtgatgatcggtctgatgaggatatgtttgaggtgataatgagtgctaaagatggtccagctttgtctcctgtggctgagatattcgcttgcaccgttggacaaaagccaagcaaagcaaaatactatttagacgatactgcggagataatcagaatgctggacggtctagccgctaccaacacaactatctctgatcaaactgattcaaccgccactgttccaactaaagatctgttttaaggatttgtgaacgaaagttttagtgggtttgttgttgtgatttgtgaatgctttttcaaatataatggattaaggtaatcaaat

SEQ ID NO: 38304 - protein, 862 aa, Arabidopsis thaliana
  peptide (1)..(862): Ceres Seq. ID no. 13580312
  misc_feature (60)..(546): Pfam Name: Glycosyltransferase family 20 Pfam Description: Glycosyltransferase family 20
  misc_feature (149)..(492): Homolog of NCBI NO: 34391866 NR Description: trehalose-6-phosphate phosphatase [Emericella
  misc_feature (32)..(853): Homolog of NCBI NO: 7488401 NR Description: trehalose-6-phosphate synthase homolog F17O7.18 -
  misc_feature (14)..(861): Homolog of NCBI NO: 34909526 NR Description: putative trehalose-6-phosphate synthase homolog
  misc_feature (1)..(853): Homolog of NCBI NO: 30698024 NR Description: alpha,alpha-trehalose-phosphate synthase, (trehalose-6-phosphate synthase/UDP-glucose-glucosephosphate
  misc_feature (25)..(852): Homolog of NCBI NO: 34910846 NR Description: putative trehalose-6-phosphate synthase
  misc_feature (1)..(844): Homolog of NCBI NO: 15219002 NR Description: trehalose phosphatase family [Arabidopsis
  misc_feature (1)..(862): Homolog of NCBI NO: 15220891 NR Description: trehalose phosphatase family [Arabidopsis
  misc_feature (1)..(851): Homolog of NCBI NO: 19568935 NR Description: putative trehalose synthase [Solanum tuberosum]
  misc_feature (1)..(840): Homolog of NCBI NO: 15221478 NR Description: trehalose phosphatase family [Arabidopsis
  misc_feature (1)..(860): Homolog of NCBI NO: 34902280 NR Description: Putative trehalose-6-phosphate synthase
MVSRSYSNLLDLASGNFHSFSREKKRFPRVATVTGVLSELDDDNNSNSVCSDAPSSVTQDRIIIVGNQLPIKSHRNSAGKLSFSWDNDSLLLQLKDGMREDMEVVYIGCLKEQIDTVEQDDVSQRLLENFKCVPAYIPPELFTKYYHGFCKQHLWPLFHYMLPLTPDLGGRFDRSLWQAYLSVNKIFADKVMEVISPDDDFVWVHDYHLMVLPTFLRKRFNRVKLGFFLHSPFPSSEIYRTLPVRNELLRALLNADLIGFHTFDYARHFLSCCSRMLGLSYQSKRGTIGLEYYGRTVSIKILPVGIHISQLQSILNLPETQTKVAELRDQFLDQKVLLGVDDMDIFKGISLKLLAMEQLLTQHPEKRGRVVLVQIANPARGRGKDVQEVQSETEATVKRINEMFGRPGYQPVVLIDTPLQFFERIAYYVIAECCLVTAVRDGMNLIPYEYIICRQGNPKLNETIGLDPSAAKKSMLVVSEFIGCSPSLSGAIRVNPWNIDAVTEAMDYALIVSEAEKQMRHEKHHKYVSTHDVAYWARSFIQDLERACGDHVRKRCWGIGFGLGFRVVALDPSFKKLSIEHIVSAYKRTKNRAILLDYDGTMVQPGSIRTTPTRETIEILNNLSSDPKNIVYLVSGKDRRTLTEWFSSCDDLGLGAEHGYFIRPNDGTDWETSSLVSGFEWKQIAEPVMRLYTETTDGSTIETKETALVWNYQFADPDFGSCQAKELMEHLESVLTNDPVSVKTGQQLVEVKPQGVNKGLVAERLLTTMQEKGKLLDFILCVGDDRSDEDMFEVIMSAKDGPALSPVAEIFACTVGQKPSKAKYYLDDTAEIIRMLDGLAATNTTISDQTDSTATVPTKDLF

SEQ ID NO: 38305 - protein, 765 aa, Arabidopsis thaliana
  peptide (1)..(765): Ceres Seq. ID no. 13580313
  misc_feature (1)..(449): Pfam Name: Glycosyltransferase family 20 Pfam Description: Glycosyltransferase family 20
  misc_feature (52)..(395): Homolog of NCBI NO: 34391866 NR Description: trehalose-6-phosphate phosphatase [Emericella
  misc_feature (1)..(756): Homolog of NCBI NO: 7488401 NR Description: trehalose-6-phosphate synthase homolog F17O7.18 -
  misc_feature (1)..(764): Homolog of NCBI NO: 34909526 NR Description: putative trehalose-6-phosphate synthase homolog
  misc_feature (1)..(756): Homolog of NCBI NO: 30698024 NR Description: alpha,alpha-trehalose-phosphate synthase, (trehalose-6-phosphate synthase/UDP-glucose-glucosephosphate
  misc_feature (1)..(755): Homolog of NCBI NO: 34910846 NR Description: putative trehalose-6-phosphate synthase
  misc_feature (1)..(747): Homolog of NCBI NO: 15219002 NR Description: trehalose phosphatase family [Arabidopsis
  misc_feature (1)..(765): Homolog of NCBI NO: 15220891 NR Description: trehalose phosphatase family [Arabidopsis
  misc_feature (1)..(754): Homolog of NCBI NO: 19568935 NR Description: putative trehalose synthase [Solanum tuberosum]
  misc_feature (1)..(743): Homolog of NCBI NO: 15221478 NR Description: trehalose phosphatase family [Arabidopsis
  misc_feature (1)..(763): Homolog of NCBI NO: 34902280 NR Description: Putative trehalose-6-phosphate synthase
MREDMEVVYIGCLKEQIDTVEQDDVSQRLLENFKCVPAYIPPELFTKYYHGFCKQHLWPLFHYMLPLTPDLGGRFDRSLWQAYLSVNKIFADKVMEVISPDDDFVWVHDYHLMVLPTFLRKRFNRVKLGFFLHSPFPSSEIYRTLPVRNELLRALLNADLIGFHTFDYARHFLSCCSRMLGLSYQSKRGTIGLEYYGRTVSIKILPVGIHISQLQSILNLPETQTKVAELRDQFLDQKVLLGVDDMDIFKGISLKLLAMEQLLTQHPEKRGRVVLVQIANPARGRGKDVQEVQSETEATVKRINEMFGRPGYQPVVLIDTPLQFFERIAYYVIAECCLVTAVRDGMNLIPYEYIICRQGNPKLNETIGLDPSAAKKSMLVVSEFIGCSPSLSGAIRVNPWNIDAVTEAMDYALIVSEAEKQMRHEKHHKYVSTHDVAYWARSFIQDLERACGDHVRKRCWGIGFGLGFRVVALDPSFKKLSIEHIVSAYKRTKNRAILLDYDGTMVQPGSIRTTPTRETIEILNNLSSDPKNIVYLVSGKDRRTLTEWFSSCDDLGLGAEHGYFIRPNDGTDWETSSLVSGFEWKQIAEPVMRLYTETTDGSTIETKETALVWNYQFADPDFGSCQAKELMEHLESVLTNDPVSVKTGQQLVEVKPQGVNKGLVAERLLTTMQEKGKLLDFILCVGDDRSDEDMFEVIMSAKDGPALSPVAEIFACTVGQKPSKAKYYLDDTAEIIRMLDGLAATNTTISDQTDSTATVPTKDLF

SEQ ID NO: 38306 - protein, 761 aa, Arabidopsis thaliana
  peptide (1)..(761): Ceres Seq. ID no. 13580314
  misc_feature (1)..(445): Pfam Name: Glycosyltransferase family 20 Pfam Description: Glycosyltransferase family 20
  misc_feature (48)..(391): Homolog of NCBI NO: 34391866 NR Description: trehalose-6-phosphate phosphatase [Emericella
  misc_feature (1)..(752): Homolog of NCBI NO: 7488401 NR Description: trehalose-6-phosphate synthase homolog F17O7.18 -
  misc_feature (1)..(760): Homolog of NCBI NO: 34909526 NR Description: putative trehalose-6-phosphate synthase homolog
  misc_feature (1)..(752): Homolog of NCBI NO: 30698024 NR Description: alpha,alpha-trehalose-phosphate synthase, (trehalose-6-phosphate synthase/UDP-glucose-glucosephosphate
  misc_feature (1)..(751): Homolog of NCBI NO: 34910846 NR Description: putative trehalose-6-phosphate synthase
  misc_feature (1)..(743): Homolog of NCBI NO: 15219002 NR Description: trehalose phosphatase family [Arabidopsis
  misc_feature (1)..(761): Homolog of NCBI NO: 15220891 NR Description: trehalose phosphatase family [Arabidopsis
  misc_feature (1)..(750): Homolog of NCBI NO: 19568935 NR Description: putative trehalose synthase [Solanum tuberosum]
  misc_feature (1)..(739): Homolog of NCBI NO: 15221478 NR Description: trehalose phosphatase family [Arabidopsis
  misc_feature (1)..(759): Homolog of NCBI NO: 34902280 NR Description: Putative trehalose-6-phosphate synthase
MEVVYIGCLKEQIDTVEQDDVSQRLLENFKCVPAYIPPELFTKYYHGFCKQHLWPLFHYMLPLTPDLGGRFDRSLWQAYLSVNKIFADKVMEVISPDDDFVWVHDYHLMVLPTFLRKRFNRVKLGFFLHSPFPSSEIYRTLPVRNELLRALLNADLIGFHTFDYARHFLSCCSRMLGLSYQSKRGTIGLEYYGRTVSIKILPVGIHISQLQSILNLPETQTKVAELRDQFLDQKVLLGVDDMDIFKGISLKLLAMEQLLTQHPEKRGRVVLVQIANPARGRGKDVQEVQSETEATVKRINEMFGRPGYQPVVLIDTPLQFFERIAYYVIAECCLVTAVRDGMNLIPYEYIICRQGNPKLNETIGLDPSAAKKSMLVVSEFIGCSPSLSGAIRVNPWNIDAVTEAMDYALIVSEAEKQMRHEKHHKYVSTHDVAYWARSFIQDLERACGDHVRKRCWGIGFGLGFRVVALDPSFKKLSIEHIVSAYKRTKNRAILLDYDGTMVQPGSIRTTPTRETIEILNNLSSDPKNIVYLVSGKDRRTLTEWFSSCDDLGLGAEHGYFIRPNDGTDWETSSLVSGFEWKQIAEPVMRLYTETTDGSTIETKETALVWNYQFADPDFGSCQAKELMEHLESVLTNDPVSVKTGQQLVEVKPQGVNKGLVAERLLTTMQEKGKLLDFILCVGDDRSDEDMFEVIMSAKDGPALSPVAEIFACTVGQKPSKAKYYLDDTAEIIRMLDGLAATNTTISDQTDSTATVPTKDLF

SEQ ID NO: 38307 - DNA, 764 bp, Arabidopsis thaliana
  misc_feature (1)..(764): Ceres Seq. ID no. 12325589
  misc_feature: MA Experiment ID: 108488 Result: Down-regulated in Transcription
  misc_feature: MA Experiment ID: 108561 Result: Down-regulated in Transcription
  misc_feature: MA Experiment 108561 PARAMETER Experiment Name: At_100uM_ABA_cDNA_P Parameter: Timepoint (hr) Value: 6
  misc_feature: MA Experiment 108561 PARAMETER Experiment Name: At_100uM_ABA_cDNA_P Parameter: Tissue Value: Aerial
  misc_feature: MA Experiment 108561 PARAMETER Experiment Name: At_100uM_ABA_cDNA_P Parameter: Treatment Value: 100uM ABA vs. No Treatment
  misc_feature: MA Experiment ID: 20000089 Result: Down-regulated in Transcription
  misc_feature: MA Experiment ID: 20000112 Result: Up-regulated in Transcription
  misc_feature: MA Experiment 20000112 PARAMETER Experiment Name: At_42deg_Heat_cDNA_P Parameter: Temperature (deg C) Value: 42 vs. 22
  misc_feature: MA Experiment 20000112 PARAMETER Experiment Name: At_42deg_Heat_cDNA_P Parameter: Timepoint (hr) Value: 2
  misc_feature: MA Experiment 20000112 PARAMETER Experiment Name: At_42deg_Heat_cDNA_P Parameter: Tissue Value: Aerial
  misc_feature: MA Experiment ID: 20001905 Result: Up-regulated in Transcription
  misc_feature: MA Experiment 20001905 PARAMETER Experiment Name: At_Drought_Reproduction_P Parameter: Age (day) Value: 40
  misc_feature: MA Experiment 20001905 PARAMETER Experiment Name: At_Drought_Reproduction_P Parameter: Organism Value: A. thaliana
  misc_feature: MA Experiment 20001905 PARAMETER Experiment Name: At_Drought_Reproduction_P Parameter: Plant Line Value: WS
  misc_feature: MA Experiment 20001905 PARAMETER Experiment Name: At_Drought_Reproduction_P Parameter: Timepoint (day) Value: 10
  misc_feature: MA Experiment 20001905 PARAMETER Experiment Name: At_Drought_Reproduction_P Parameter: Tissue Value: Rosettes
  misc_feature: MA Experiment 20001905 PARAMETER Experiment Name: At_Drought_Reproduction_P Parameter: Treatment Value: Drought vs. No Drought
aaaatttctcctatttccaaaatcttctatttctctctaaaaaaatgtcgaagaacgtttcgagaaactgcttaggatcaatggaagacatcaagaaagtattccaacgattcgacaaaaacaacgatgggaaaatctctatcgatgagcttaaagacgtgataggagctctctctccaaacgcttcacaagaagaaaccaaagcaatgatgaaagagtttgatcttgacggtaatggtttcattgatttggatgagtttgttgctttgtttcaaatcagtgatcaaagtagcaacaatagtgcgattagagatttgaaagaagcttttgatttgtatgatttggatcgtaatggaaggatctcggctaatgagttacactcggttatgaagaatcttggtgagaagtgttcgattcaagattgtcaaaggatgattaataaagttgattctgatggtgatggttgtgttgattttgaagagtttaagaagatgatgatgattaatggtagtgcttgatagaatcgatttagaatttggaaaagtgatatccttttttttgtttgtaaatattttgttttatgatttcgttaatctaatcttttttaggatttaggttaattaggagtttttaattttttaggttttatcgattaatctagaagaatctctatgttgcttctttaatggctctctgacctaatgttagggaatattgttgatgacctaattaatcgattaataatacaaaaaaccttttttttt

SEQ ID NO: 38308 - protein, 171 aa, Arabidopsis thaliana
  peptide (1)..(171): Ceres Seq. ID no. 12325590
  misc_feature (140)..(168): Pfam Name: EF hand Pfam Description: EF hand
  misc_feature (29)..(165): Homolog of NCBI NO: 21618025 NR Description: putative calmodulin [Arabidopsis thaliana]
  misc_feature (16)..(165): Homolog of NCBI NO: 15219514 NR Description: putative calmodulin
  misc_feature (15)..(165): Homolog of NCBI NO: 6901654 NR Description: calcium-binding protein [Olea europaea]
  misc_feature (15)..(165): Homolog of NCBI NO: 14423648 NR Description: Calcium-binding allergen Ole e 8 (PCA18/PCA23)
  misc_feature (32)..(165): Homolog of NCBI NO: 13397927 NR Description: putative calmodulin-related protein [Medicago
  misc_feature (24)..(165): Homolog of NCBI NO: 15221030 NR Description: calcium-binding protein, putative
  misc_feature (27)..(170): Homolog of NCBI NO: 14589311 NR Description: calcium binding protein [Sesbania rostrata]
  misc_feature (16)..(171): Homolog of NCBI NO: 15240340 NR Description: CALMODULIN-RELATED PROTEIN 2, TOUCH-INDUCED (TCH2)
  misc_feature (15)..(171): Homolog of NCBI NO: 21618074 NR Description: calmodulin-related protein [Arabidopsis thaliana]
  misc_feature (15)..(171): Homolog of NCBI NO: 18408502 NR Description: calmodulin-related protein
NFSYFQNLLFLSKKMSKNVSRNCLGSMEDIKKVFQRFDKNNDGKISIDELKDVIGALSPNASQEETKAMMKEFDLDGNGFIDLDEFVALFQISDQSSNNSAIRDLKEAFDLYDLDRNGRISANELHSVMKNLGEKCSIQDCQRMINKVDSDGDGCVDFEEFKKMMMINGSA

SEQ ID NO: 38309 - protein, 157 aa, Arabidopsis thaliana
  peptide (1)..(157): Ceres Seq. ID no. 12325591
  misc_feature (126)..(154): Pfam Name: EF hand Pfam Description: EF hand
  misc_feature (15)..(151): Homolog of NCBI NO: 21618025 NR Description: putative calmodulin [Arabidopsis thaliana]
  misc_feature (2)..(151): Homolog of NCBI NO: 15219514 NR Description: putative calmodulin
  misc_feature (1)..(151): Homolog of NCBI NO: 6901654 NR Description: calcium-binding protein [Olea europaea]
  misc_feature (1)..(151): Homolog of NCBI NO: 14423648 NR Description: Calcium-binding allergen Ole e 8 (PCA18/PCA23)
  misc_feature (18)..(151): Homolog of NCBI NO: 13397927 NR Description: putative calmodulin-related protein [Medicago
  misc_feature (10)..(151): Homolog of NCBI NO: 15221030 NR Description: calcium-binding protein, putative
  misc_feature (13)..(156): Homolog of NCBI NO: 14589311 NR Description: calcium binding protein [Sesbania rostrata]
  misc_feature (2)..(157): Homolog of NCBI NO: 15240340 NR Description: CALMODULIN-RELATED PROTEIN 2, TOUCH-INDUCED (TCH2)
  misc_feature (1)..(157): Homolog of NCBI NO: 21618074 NR Description: calmodulin-related protein [Arabidopsis thaliana]
  misc_feature (1)..(157): Homolog of NCBI NO: 18408502 NR Description: calmodulin-related protein
MSKNVSRNCLGSMEDIKKVFQRFDKNNDGKISIDELKDVIGALSPNASQEETKAMMKEFDLDGNGFIDLDEFVALFQISDQSSNNSAIRDLKEAFDLYDLDRNGRISANELHSVMKNLGEKCSIQDCQRMINKVDSDGDGCVDFEEFKKMMMINGSA

SEQ ID NO: 38310 - protein, 145 aa, Arabidopsis thaliana
  peptide (1)..(145): Ceres Seq. ID no. 12325592
  misc_feature (114)..(142): Pfam Name: EF hand Pfam Description: EF hand
  misc_feature (3)..(139): Homolog of NCBI NO: 21618025 NR Description: putative calmodulin [Arabidopsis thaliana]
  misc_feature (1)..(139): Homolog of NCBI NO: 15219514 NR Description: putative calmodulin
  misc_feature (1)..(139): Homolog of NCBI NO: 6901654 NR Description: calcium-binding protein [Olea europaea]
  misc_feature (1)..(139): Homolog of NCBI NO: 14423648 NR Description: Calcium-binding allergen Ole e 8 (PCA18/PCA23)
  misc_feature (6)..(139): Homolog of NCBI NO: 13397927 NR Description: putative calmodulin-related protein [Medicago
  misc_feature (1)..(139): Homolog of NCBI NO: 15221030 NR Description: calcium-binding protein, putative
  misc_feature (1)..(144): Homolog of NCBI NO: 14589311 NR Description: calcium binding protein [Sesbania rostrata]
  misc_feature (1)..(145): Homolog of NCBI NO: 15240340 NR Description: CALMODULIN-RELATED PROTEIN 2, TOUCH-INDUCED (TCH2)
  misc_feature (1)..(145): Homolog of NCBI NO: 21618074 NR Description: calmodulin-related protein [Arabidopsis thaliana]
  misc_feature (1)..(145): Homolog of NCBI NO: 18408502 NR Description: calmodulin-related protein
MEDIKKVFQRFDKNNDGKISIDELKDVIGALSPNASQEETKAMMKEFDLDGNGFIDLDEFVALFQISDQSSNNSAIRDLKEAFDLYDLDRNGRISANELHSVMKNLGEKCSIQDCQRMINKVDSDGDGCVDFEEFKKMMMINGSA

SEQ ID NO: 38311 - DNA, 581 bp, Arabidopsis thaliana
  misc_feature (1)..(581): Ceres Seq. ID no. 12423084
  misc_feature: MA Experiment ID: 108579 Result: Down-regulated in Transcription
  misc_feature: MA Experiment 108579 PARAMETER Experiment Name: At_4deg_Cold_cDNA_P Parameter: Temperature (deg C) Value: 4 vs. 22
  misc_feature: MA Experiment 108579 PARAMETER Experiment Name: At_4deg_Cold_cDNA_P Parameter: Timepoint (hr) Value: 6
  misc_feature: MA Experiment 108579 PARAMETER Experiment Name: At_4deg_Cold_cDNA_P Parameter: Tissue Value: Aerial
  misc_feature: MA Experiment ID: 20000224 Result: Down-regulated in Transcription
  misc_feature: MA Experiment ID: 20000227 Result: Down-regulated in Transcription
  misc_feature: MA Experiment 20000227 PARAMETER Experiment Name: At_Root-Tips-vs-Tops_P Parameter: Tissue Value: Root Tips vs. Root Tops
actgcgatcggagaagaaaaagctcgagagacgccatggaaatttcccaagctcgttcaagcttcgtttgtcttcttcttctgttactctccatgtttttcgttccctgcgtcttttccaaatctcctcgtcctatctccgatgtggagatcaggcagaagaagagcgaatgctacggtgatatagagagtgggttatggggttggcaatgcaaatcttctgcaatagcgaaagagaattgtgcgctgcgatgcctttctccggtttgctatcaactcatttatgagagtgatccgcttgaagaaggtgaaaaagatttgattaggagccaagagtacaagtattgtatgtacaagtcatcactcggggaaagcttagagggtgttcgaggcatcttttgatggtatcaaataagactttctcagtgaagacatttgccaaaatctgagctaagctcttgaatttctgatcagtagtattctgctctgtcgcgtttgaagccatgtaaggcttcttttattataaacctcaatttttgggttaatggttgtttatatgaaacgtttacgtttatgattggc

SEQ ID NO: 38312 - protein, 132 aa, Arabidopsis thaliana
  peptide (1)..(132): Ceres Seq. ID no. 12423085
  misc_feature (47)..(132): Homolog of NCBI NO: 34902472 NR Description: Putative DNAJ protein [Oryza sativa (japonica
  misc_feature (109)..(132): Homolog of NCBI NO: 11346183 NR Description: hypothetical protein K10A8_90 - Arabidopsis
  misc_feature (12)..(119): Homolog of NCBI NO: 11346183 NR Description: hypothetical protein K10A8_90 - Arabidopsis
  misc_feature (12)..(132): Homolog of NCBI NO: 18418364 NR Description: expressed protein
  misc_feature (12)..(132): Homolog of NCBI NO: 21618076 NR Description: unknown [Arabidopsis thaliana]
CDRRRKSSRDAMEISQARSSFVCLLLLLLSMFFVPCVFSKSPRPISDVEIRQKKSECYGDIESGLWGWQCKSSAIAKENCALRCLSPVCYQLIYESDPLEEGEKDLIRSQEYKYCMYKSSLGESLEGVRGIF

SEQ ID NO: 38313 - protein, 121 aa, Arabidopsis thaliana
  peptide (1)..(121): Ceres Seq. ID no. 12423086
  misc_feature (36)..(121): Homolog of NCBI NO: 34902472 NR Description: Putative DNAJ protein [Oryza sativa (japonica
  misc_feature (98)..(121): Homolog of NCBI NO: 11346183 NR Description: hypothetical protein K10A8_90 - Arabidopsis
  misc_feature (1)..(108): Homolog of NCBI NO: 11346183 NR Description: hypothetical protein K10A8_90 - Arabidopsis
  misc_feature (1)..(121): Homolog of NCBI NO: 18418364 NR Description: expressed protein
  misc_feature (1)..(121): Homolog of NCBI NO: 21618076 NR Description: unknown [Arabidopsis thaliana]
MEISQARSSFVCLLLLLLSMFFVPCVFSKSPRPISDVEIRQKKSECYGDIESGLWGWQCKSSAIAKENCALRCLSPVCYQLIYESDPLEEGEKDLIRSQEYKYCMYKSSLGESLEGVRGIF

SEQ ID NO: 38314 - protein, 102 aa, Arabidopsis thaliana
  peptide (1)..(102): Ceres Seq. ID no. 12423087
  misc_feature (17)..(102): Homolog of NCBI NO: 34902472 NR Description: Putative DNAJ protein [Oryza sativa (japonica
  misc_feature (79)..(102): Homolog of NCBI NO: 11346183 NR Description: hypothetical protein K10A8_90 - Arabidopsis
  misc_feature (1)..(89): Homolog of NCBI NO: 11346183 NR Description: hypothetical protein K10A8_90 - Arabidopsis
  misc_feature (1)..(102): Homolog of NCBI NO: 18418364 NR Description: expressed protein
  misc_feature (1)..(102): Homolog of NCBI NO: 21618076 NR Description: unknown [Arabidopsis thaliana]
MFFVPCVFSKSPRPISDVEIRQKKSECYGDIESGLWGWQCKSSAIAKENCALRCLSPVCYQLIYESDPLEEGEKDLIRSQEYKYCMYKSSLGESLEGVRGIF

SEQ ID NO: 38315 - DNA, 2365 bp, Arabidopsis thaliana
  misc_feature (1)..(2365): Ceres Seq. ID no. 13489353
  misc_feature: MA Experiment ID: 108434 Result: Down-regulated in Transcription
  misc_feature: MA Experiment 108434 PARAMETER Experiment Name: At_Root_Tips_cDNA_P Parameter: Tissue Value: Root Tips
  misc_feature: MA Experiment ID: 108462 Result: Up-regulated in Transcription
  misc_feature: MA Experiment 108462 PARAMETER Experiment Name: At_Germinating_Seeds_cDNA_P Parameter: Age (day) Value: 2 vs. 0
  misc_feature: MA Experiment 108462 PARAMETER Experiment Name: At_Germinating_Seeds_cDNA_P Parameter: Tissue Value: Germinating Seeds
  misc_feature: MA Experiment ID: 20000111 Result: Down-regulated in Transcription
  misc_feature: MA Experiment 20000111 PARAMETER Experiment Name: At_42deg_Heat_cDNA_P Parameter: Temperature (deg C) Value: 42 vs. 22
  misc_feature: MA Experiment 20000111 PARAMETER Experiment Name: At_42deg_Heat_cDNA_P Parameter: Timepoint (hr) Value: 6
  misc_feature: MA Experiment 20000111 PARAMETER Experiment Name: At_42deg_Heat_cDNA_P Parameter: Tissue Value: Aerial
  misc_feature: MA Experiment ID: 20000113 Result: Down-regulated in Transcription
  misc_feature: MA Experiment 20000113 PARAMETER Experiment Name: At_42deg_Heat_cDNA_P Parameter: Temperature (deg C) Value: 42 vs. 22
  misc_feature: MA Experiment 20000113 PARAMETER Experiment Name: At_42deg_Heat_cDNA_P Parameter: Timepoint (hr) Value: 8
  misc_feature: MA Experiment 20000113 PARAMETER Experiment Name: At_42deg_Heat_cDNA_P Parameter: Tissue Value: Aerial
  misc_feature: MA Experiment ID: 20000173 Result: Down-regulated in Transcription
  misc_feature: MA Experiment 20000173 PARAMETER Experiment Name: At_42deg_Heat_P Parameter: Age (day) Value: 14
  misc_feature: MA Experiment 20000173 PARAMETER Experiment Name: At_42deg_Heat_P Parameter: Organism Value: A. thaliana
  misc_feature: MA Experiment 20000173 PARAMETER Experiment Name: At_42deg_Heat_P Parameter: Plant Line Value: WS
  misc_feature: MA Experiment 20000173 PARAMETER Experiment Name: At_42deg_Heat_P Parameter: Temperature (deg C) Value: 42 vs. 22
  misc_feature: MA Experiment 20000173 PARAMETER Experiment Name: At_42deg_Heat_P Parameter: Timepoint (hr) Value: 6
  misc_feature: MA Experiment 20000173 PARAMETER Experiment Name: At_42deg_Heat_P Parameter: Tissue Value: Aerial
  misc_feature: MA Experiment ID: 20000184 Result: Down-regulated in Transcription
  misc_feature: MA Experiment 20000184 PARAMETER Experiment Name: At_Shoots__P Parameter: Age (day) Value: 7
  misc_feature: MA Experiment 20000184 PARAMETER Experiment Name: At_Shoots__P Parameter: Tissue Value: Shoots vs. Whole Plant
  misc_feature: MA Experiment ID: 20000265 Result: Down-regulated in Transcription
  misc_feature: MA Experiment 20000265 PARAMETER Experiment Name: At_Open_Flower_P Parameter: Age (day) Value: 21
  misc_feature: MA Experiment 20000265 PARAMETER Experiment Name: At_Open_Flower_P Parameter: Plant Line Value: WS
  misc_feature: MA Experiment 20000265 PARAMETER Experiment Name: At_Open_Flower_P Parameter: Tissue Value: Closed Flower vs. Whole Plant
  misc_feature: MA Experiment ID: 20000451 Result: Down-regulated in Transcription
  misc_feature: MA Experiment 20000451 PARAMETER Experiment Name: At_CS6879_Shoots-Roots_P Parameter: Age (day) Value: 14
  misc_feature: MA Experiment 20000451 PARAMETER Experiment Name: At_CS6879_Shoots-Roots_P Parameter: Organism Value: A. thaliana
  misc_feature: MA Experiment 20000451 PARAMETER Experiment Name: At_CS6879_Shoots-Roots_P Parameter: Plant Line Value: CS6879 vs. WS
  misc_feature: MA Experiment 20000451 PARAMETER Experiment Name: At_CS6879_Shoots-Roots_P Parameter: Tissue Value: Roots
  misc_feature: MA Experiment ID: 20001905 Result: Down-regulated in Transcription
  misc_feature: MA Experiment 20001905 PARAMETER Experiment Name: At_Drought_Reproduction_P Parameter: Age (day) Value: 40
  misc_feature: MA Experiment 20001905 PARAMETER Experiment Name: At_Drought_Reproduction_P Parameter: Organism Value: A. thaliana
  misc_feature: MA Experiment 20001905 PARAMETER Experiment Name: At_Drought_Reproduction_P Parameter: Plant Line Value: WS
  misc_feature: MA Experiment 20001905 PARAMETER Experiment Name: At_Drought_Reproduction_P Parameter: Timepoint (day) Value: 10
  misc_feature: MA Experiment 20001905 PARAMETER Experiment Name: At_Drought_Reproduction_P Parameter: Tissue Value: Rosettes
  misc_feature: MA Experiment 20001905 PARAMETER Experiment Name: At_Drought_Reproduction_P Parameter: Treatment Value: Drought vs. No Drought
agagagaaaaaaaaaatgaagagaaggagactttttttctctgttctactctctatcctaactctgttcatcaatggtcctttgataacgacagctcaatctccaccttcttcttcaacttcatgtaaccgtatctgtggaggaatcgagattccttttccttttggaatcggacgaagagactgttttctcaacgactggtacgaggttgtctgtaacagcaccacctccggtaaatccttagctccgttcctctataagatcaacagagaattagttagcatcactcttcgaagcagcatcgacagttcctacggagttgttcacattaaatctccggtgacttcctccggctgttctcaacgacccgtaaagcctcttcctttaaacctcaccggtaaaggaagtccctttttcatcaccgactcgaatcgtctcgtctcagttggttgtgacaacagagcattgattacagacatcgaatctcagatcacaggatgcgaatcgagctgcgacggagataagagtcgtttagacaagatctgcggtggttacacatgttgtcaggcgaagattccggcggatagaccgcaagtaatcggcgttgaccttgaaagctccggtggtaacacaactcaaggaggaaactgtaaagttgctttcttgacgaatgagacttactctccggcgaatgttacagagccggaacaattttatactaatgggtttacggtgattgagcttggttggtactttgatacatcagattctcggttaacgaatcctgtgggttgtgtgaatttgacggaaacagggatttacacgagcgcaccgagctgtgtttgtgagtatggtaacttctctggctttggttacagtaactgttactgcaatcagattggttacagagggaatccttatcttcctggtggatgcattgacattgacgaatgtgaggaaggaaaaggactaagcagctgtggagaactaacttgtgtgaatgttcctggatcgtggaggtgcgagctgaatggagtagggaagatcaagcctctgtttccaggtcttgttctaggttttccactgttgttcttggtacttgggatatggggattgatcaagttcgttaagaagagaaggaagattatccgaaagagaatgttctttaaacgtaatggaggcttgttgttgaaacaacagttaactacaagaggaggtaatgtgcagtcatcgaagatattcagttcgaaagagctggagaaagcgacggataacttcaatatgaacagggttcttgggcaaggaggtcaaggcactgtctacaaaggaatgttggtagatgggcgaattgttgctgtgaaaagatctaaagttttagatgaagataaagttgaggagtttatcaatgaagttggtgttctctcgcagattaaccatagaaatattgtcaaactcatggggtgttgtctcgagacagaggttcctatcttggtttatgaacatattccaaatggagacctattcaagcggcttcaccatgattctgatgattacactatgacttgggatgtgcgattgcgcatctctgttgagattgcaggagcacttgcttacttgcactcggctgcatcaactccggtctatcatagagatgtcaagaccacaaacatacttttggatgagaagtatagagccaaggtatcggatttcgggacctcgagatccataaacgtagatcaaactcacttgactactctagttgcaggtacttttggatacttggatccagagtactttcaaactagccagtttacggataaaagtgatgtttatagttttggggtcgtcttggttgagctcataactggagaaaagccgttttctgtaatgcggcccgaagaaaacagaggacttgtgtctcatttcaatgaggctatgaaacagaacagagttcttgatattgttgattctcggatcaaagaaggttgcacgttggaacaagtgttggctgtggcgaaacttgccagaaggtgtttaagtctaaaagggaagaaacgaccaaatatgagagaggtttcagttgagcttgagaggatccgttcatcacccgaagatttggagttacatattgaagaggaggacgaagaagaatgcgccatggaaatcaacatggatgattcttggagcgtcgacatgactgctccagcttccctctttgatttatcgcccaagttagacgttgaaccgctggttcctcaacgaacatggtgatgatggaacctaaaacactgcaaatgtacaaagtgctgtgataacaaattctctcaatgttccattctttattaataaaaaatttgatgatgtc

SEQ ID NO: 38316 - protein, 756 aa, Arabidopsis thaliana
  peptide (1)..(756): Ceres Seq. ID no. 13489354
  misc_feature (4)..(268): Homolog of NCBI NO: 25287658 NR Description: hypothetical protein T24D18.21 - Arabidopsis
  misc_feature (339)..(756): Homolog of NCBI NO: 25287658 NR Description: hypothetical protein T24D18.21 - Arabidopsis
  misc_feature (4)..(289): Homolog of NCBI NO: 25287660 NR Description: hypothetical protein T24D18.23 [imported] -
  misc_feature (317)..(756): Homolog of NCBI NO: 25287660 NR Description: hypothetical protein T24D18.23 [imported] -
  misc_feature (39)..(171): Homolog of NCBI NO: 25405037 NR Description: protein F20B17.10 [imported] - Arabidopsis
  misc_feature (6)..(723): Homolog of NCBI NO: 15219132 NR Description: WAK-like kinase (WLK) [Arabidopsis thaliana]
  misc_feature (24)..(725): Homolog of NCBI NO: 15219143 NR Description: WAK-like kinase (WLK) [Arabidopsis thaliana]
  misc_feature (4)..(355): Homolog of NCBI NO: 15219140 NR Description: WAK-like kinase (WLK) [Arabidopsis thaliana]
  misc_feature (343)..(756): Homolog of NCBI NO: 15219140 NR Description: WAK-like kinase (WLK) [Arabidopsis thaliana]
  misc_feature (4)..(756): Homolog of NCBI NO: 15219134 NR Description: WAK-like kinase (WLK) [Arabidopsis thaliana]
REKKKMKRRRLFFSVLLSILTLFINGPLITTAQSPPSSSTSCNRICGGIEIPFPFGIGRRDCFLNDWYEVVCNSTTSGKSLAPFLYKINRELVSITLRSSIDSSYGVVHIKSPVTSSGCSQRPVKPLPLNLTGKGSPFFITDSNRLVSVGCDNRALITDIESQITGCESSCDGDKSRLDKICGGYTCCQAKIPADRPQVIGVDLESSGGNTTQGGNCKVAFLTNETYSPANVTEPEQFYTNGFTVIELGWYFDTSDSRLTNPVGCVNLTETGIYTSAPSCVCEYGNFSGFGYSNCYCNQIGYRGNPYLPGGCIDIDECEEGKGLSSCGELTCVNVPGSWRCELNGVGKIKPLFPGLVLGFPLLFLVLGIWGLIKFVKKRRKIIRKRMFFKRNGGLLLKQQLTTRGGNVQSSKIFSSKELEKATDNFNMNRVLGQGGQGTVYKGMLVDGRIVAVKRSKVLDEDKVEEFINEVGVLSQINHRNIVKLMGCCLETEVPILVYEHIPNGDLFKRLHHDSDDYTMTWDVRLRISVEIAGALAYLHSAASTPVYHRDVKTTNILLDEKYRAKVSDFGTSRSINVDQTHLTTLVAGTFGYLDPEYFQTSQFTDKSDVYSFGVVLVELITGEKPFSVMRPEENRGLVSHFNEAMKQNRVLDIVDSRIKEGCTLEQVLAVAKLARRCLSLKGKKRPNMREVSVELERIRSSPEDLELHIEEEDEEECAMEINMDDSWSVDMTAPASLFDLSPKLDVEPLVPQRTW

SEQ ID NO: 38317 - protein, 751 aa, Arabidopsis thaliana
  peptide (1)..(751): Ceres Seq. ID no. 13489355
  misc_feature (1)..(263): Homolog of NCBI NO: 25287658 NR Description: hypothetical protein T24D18.21 - Arabidopsis
  misc_feature (334)..(751): Homolog of NCBI NO: 25287658 NR Description: hypothetical protein T24D18.21 - Arabidopsis
  misc_feature (1)..(284): Homolog of NCBI NO: 25287660 NR Description: hypothetical protein T24D18.23 [imported] -
  misc_feature (312)..(751): Homolog of NCBI NO: 25287660 NR Description: hypothetical protein T24D18.23 [imported] -
  misc_feature (34)..(166): Homolog of NCBI NO: 25405037 NR Description: protein F20B17.10 [imported] - Arabidopsis
  misc_feature (1)..(718): Homolog of NCBI NO: 15219132 NR Description: WAK-like kinase (WLK) [Arabidopsis thaliana]
  misc_feature (19)..(720): Homolog of NCBI NO: 15219143 NR Description: WAK-like kinase (WLK) [Arabidopsis thaliana]
  misc_feature (1)..(350): Homolog of NCBI NO: 15219140 NR Description: WAK-like kinase (WLK) [Arabidopsis thaliana]
  misc_feature (338)..(751): Homolog of NCBI NO: 15219140 NR Description: WAK-like kinase (WLK) [Arabidopsis thaliana]
  misc_feature (1)..(751): Homolog of NCBI NO: 15219134 NR Description: WAK-like kinase (WLK) [Arabidopsis thaliana]
MKRRRLFFSVLLSILTLFINGPLITTAQSPPSSSTSCNRICGGIEIPFPFGIGRRDCFLNDWYEVVCNSTTSGKSLAPFLYKINRELVSITLRSSIDSSYGVVHIKSPVTSSGCSQRPVKPLPLNLTGKGSPFFITDSNRLVSVGCDNRALITDIESQITGCESSCDGDKSRLDKICGGYTCCQAKIPADRPQVIGVDLESSGGNTTQGGNCKVAFLTNETYSPANVTEPEQFYTNGFTVIELGWYFDTSDSRLTNPVGCVNLTETGIYTSAPSCVCEYGNFSGFGYSNCYCNQIGYRGNPYLPGGCIDIDECEEGKGLSSCGELTCVNVPGSWRCELNGVGKIKPLFPGLVLGFPLLFLVLGIWGLIKFVKKRRKIIRKRMFFKRNGGLLLKQQLTTRGGNVQSSKIFSSKELEKATDNFNMNRVLGQGGQGTVYKGMLVDGRIVAVKRSKVLDEDKVEEFINEVGVLSQINHRNIVKLMGCCLETEVPILVYEHIPNGDLFKRLHHDSDDYTMTWDVRLRISVEIAGALAYLHSAASTPVYHRDVKTTNILLDEKYRAKVSDFGTSRSINVDQTHLTTLVAGTFGYLDPEYFQTSQFTDKSDVYSFGVVLVELITGEKPFSVMRPEENRGLVSHFNEAMKQNRVLDIVDSRIKEGCTLEQVLAVAKLARRCLSLKGKKRPNMREVSVELERIRSSPEDLELHIEEEDEEECAMEINMDDSWSVDMTAPASLFDLSPKLDVEPLVPQRTW

SEQ ID NO: 38318 - DNA, 1966 bp, Arabidopsis thaliana
  misc_feature (1)..(1966): Ceres Seq. ID no. 13648305
  misc_feature: MA Experiment ID: 20000185 Result: Up-regulated in Transcription
  misc_feature: MA Experiment 20000185 PARAMETER Experiment Name: At_Roots__P Parameter: Age (day) Value: 7 vs. 21
  misc_feature: MA Experiment 20000185 PARAMETER Experiment Name: At_Roots__P Parameter: Organism Value: A. thaliana
  misc_feature: MA Experiment 20000185 PARAMETER Experiment Name: At_Roots__P Parameter: Tissue Value: Roots vs. Whole Plant
  misc_feature: MA Experiment ID: 20000234 Result: Up-regulated in Transcription
  misc_feature: MA Experiment 20000234 PARAMETER Experiment Name: At_Siliques_P Parameter: Age (day) Value: 21
  misc_feature: MA Experiment 20000234 PARAMETER Experiment Name: At_Siliques_P Parameter: Organism Value: A. thaliana
  misc_feature: MA Experiment 20000234 PARAMETER Experiment Name: At_Siliques_P Parameter: Plant Line Value: WS
  misc_feature: MA Experiment 20000234 PARAMETER Experiment Name: At_Siliques_P Parameter: Tissue Value: Less Than 5mm Siliques vs. Whole Plant
  misc_feature: MA Experiment ID: 20000264 Result: Up-regulated in Transcription
  misc_feature: MA Experiment 20000264 PARAMETER Experiment Name: At_Open_Flower_P Parameter: Age (day) Value: 21
  misc_feature: MA Experiment 20000264 PARAMETER Experiment Name: At_Open_Flower_P Parameter: Plant Line Value: WS
  misc_feature: MA Experiment 20000264 PARAMETER Experiment Name: At_Open_Flower_P Parameter: Tissue Value: Open Flower vs. Whole Plant
  misc_feature: MA Experiment ID: 20000286 Result: Up-regulated in Transcription
  misc_feature: MA Experiment 20000286 PARAMETER Experiment Name: At_Open_Flower_P Parameter: Age (day) Value: 21
  misc_feature: MA Experiment 20000286 PARAMETER Experiment Name: At_Open_Flower_P Parameter: Plant Line Value: WS
  misc_feature: MA Experiment 20000286 PARAMETER Experiment Name: At_Open_Flower_P Parameter: Tissue Value: Half Open vs. Whole Plant
  misc_feature: MA Experiment ID: 20000437 Result: Down-regulated in Transcription
  misc_feature: MA Experiment 20000437 PARAMETER Experiment Name: At_Drought_P Parameter: Age (day) Value: 8
  misc_feature: MA Experiment 20000437 PARAMETER Experiment Name: At_Drought_P Parameter: Organism Value: A. thaliana
  misc_feature: MA Experiment 20000437 PARAMETER Experiment Name: At_Drought_P Parameter: Plant Line Value: WS
  misc_feature: MA Experiment 20000437 PARAMETER Experiment Name: At_Drought_P Parameter: Timepoint (hr) Value: 24
  misc_feature: MA Experiment 20000437 PARAMETER Experiment Name: At_Drought_P Parameter: Tissue Value: Whole Plant
  misc_feature: MA Experiment 20000437 PARAMETER Experiment Name: At_Drought_P Parameter: Treatment Value: Drought vs. No Drought
  misc_feature: MA Experiment ID: 20000439 Result: Up-regulated in Transcription
  misc_feature: MA Experiment 20000439 PARAMETER Experiment Name: At_Roots__P Parameter: Age (day) Value: 14 vs. 21
  misc_feature: MA Experiment 20000439 PARAMETER Experiment Name: At_Roots__P Parameter: Organism Value: A. thaliana
  misc_feature: MA Experiment 20000439 PARAMETER Experiment Name: At_Roots__P Parameter: Tissue Value: Roots vs. Whole Plant
  misc_feature: MA Experiment ID: 20000495 Result: Down-regulated in Transcription
  misc_feature: MA Experiment 20000495 PARAMETER Experiment Name: At_Guard_Cells_P Parameter: Harvest Date Value: 8/2/2002
  misc_feature: MA Experiment 20000495 PARAMETER Experiment Name: At_Guard_Cells_P Parameter: Organism Value: A. thaliana
  misc_feature: MA Experiment 20000495 PARAMETER Experiment Name: At_Guard_Cells_P Parameter: Tissue Value: Guard Cells vs. Leaves
  misc_feature: MA Experiment ID: 20001451 Result: Down-regulated in Transcription
  misc_feature: MA Experiment 20001451 PARAMETER Experiment Name: At_Far-red-induction_P Parameter: Age (day) Value: 7
  misc_feature: MA Experiment 20001451 PARAMETER Experiment Name: At_Far-red-induction_P Parameter: Light Value: Far-red vs. White
  misc_feature: MA Experiment 20001451 PARAMETER Experiment Name: At_Far-red-induction_P Parameter: Organism Value: A. thaliana
  misc_feature: MA Experiment 20001451 PARAMETER Experiment Name: At_Far-red-induction_P Parameter: Plant Line Value: Columbia
  misc_feature: MA Experiment 20001451 PARAMETER Experiment Name: At_Far-red-induction_P Parameter: Timepoint (hr) Value: 24
  misc_feature: MA Experiment 20001451 PARAMETER Experiment Name: At_Far-red-induction_P Parameter: Tissue Value: Whole Plant
  misc_feature: MA Experiment ID: 20001558 Result: Up-regulated in Transcription
  misc_feature: MA Experiment 20001558 PARAMETER Experiment Name: At_Drought_Soil_Dry_P Parameter: Age (day) Value: 27
  misc_feature: MA Experiment 20001558 PARAMETER Experiment Name: At_Drought_Soil_Dry_P Parameter: Organism Value: A. thaliana
  misc_feature: MA Experiment 20001558 PARAMETER Experiment Name: At_Drought_Soil_Dry_P Parameter: Plant Line Value: WS
  misc_feature: MA Experiment 20001558 PARAMETER Experiment Name: At_Drought_Soil_Dry_P Parameter: Post Timepoint (hr) Value: 6
  misc_feature: MA Experiment 20001558 PARAMETER Experiment Name: At_Drought_Soil_Dry_P Parameter: Post-Treatment Value: Re-Water vs. No Drought
  misc_feature: MA Experiment 20001558 PARAMETER Experiment Name: At_Drought_Soil_Dry_P Parameter: Timepoint (day) Value: 13
  misc_feature: MA Experiment 20001558 PARAMETER Experiment Name: At_Drought_Soil_Dry_P Parameter: Treatment Value: Drought vs. No Drought
  misc_feature: MA Experiment ID: 20001757 Result: Up-regulated in Transcription
  misc_feature: MA Experiment 20001757 PARAMETER Experiment Name: At_50mM_NH4NO3_L-to-H_P Parameter: Timepoint (hr) Value: 6
  misc_feature: MA Experiment 20001757 PARAMETER Experiment Name: At_50mM_NH4NO3_L-to-H_P Parameter: Tissue Value: Leaf
  misc_feature: MA Experiment 20001757 PARAMETER Experiment Name: At_50mM_NH4NO3_L-to-H_P Parameter: Treatment Value: 50mM NH4NO3 vs 100mM Mannitol
  misc_feature: MA Experiment ID: 20001911 Result: Down-regulated in Transcription
  misc_feature: MA Experiment 20001911 PARAMETER Experiment Name: At_Drought_Reproduction_P Parameter: Age (day) Value: 40
  misc_feature: MA Experiment 20001911 PARAMETER Experiment Name: At_Drought_Reproduction_P Parameter: Organism Value: A. thaliana
  misc_feature: MA Experiment 20001911 PARAMETER Experiment Name: At_Drought_Reproduction_P Parameter: Plant Line Value: WS
  misc_feature: MA Experiment 20001911 PARAMETER Experiment Name: At_Drought_Reproduction_P Parameter: Timepoint (day) Value: 10
  misc_feature: MA Experiment 20001911 PARAMETER Experiment Name: At_Drought_Reproduction_P Parameter: Tissue Value: Flowers
  misc_feature: MA Experiment 20001911 PARAMETER Experiment Name: At_Drought_Reproduction_P Parameter: Treatment Value: Drought vs. No Drought
ggaagtgaactccattgacgacgagtgaacgaaaggagggaagaaaaaagttaggttcgaaacgaaagtaaactagttaggtgaaaagcgaaacaacacccacagagcaatggcccctgctctcgccgttacacgagatctcaccgccgtcggatctccagagaatgctcctgcgaaaggacgtgcttcggtttacagtgaagttcaatcaagccgtattaacaacactcttcctttgccttctgttctcaaaggagctttcaaaatcgtcgaaggtcccgctagttccgccgccgggaatccagatgagatagcgaagttgtttccgggtctatatggccagccatcagtagcagtggttccagatcaggatgcaccttcgtcggcaccgaaattgaagattggtgttgttttgtctggaggtcaggcacctggtgggcacaatgttatttctggactgtttgattacctgcaagagcgtgcgaaaggtagcacattttatgggttcaagggtggtccagctggtatcatgaaatgcaaatatgttgagttgaatgctgaatatattcagccttacagaaaccagggtggttttgacatgatctgcagtggaagagacaagattgaaacacctgaccagtttaaacaagctgaagaaacagcaaagaagcttgatttggatgggttggtggttatcggtggagatgattccaacaccaatgcttgccttcttgctgaaaacttcaggagtaagaacttgaaaacccgagtcattgggtgccccaagaccattgatggtgatttgaaatgcaaagaggttcctactagttttgggtttgatacagcttgcaagatttactctgaaatgatcggaaacgtcatgattgatgcaaggtcgactggaaagtactatcattttgtaagacttatgggtcgtgctgcttcccacattacgcttgagtgtgctttacaaactcacccaaacataaccattattggagaagaggtttctgcccagaagcagactttgaagaatgtcacagactacatggtggatgttatctgcaaacgtgctgaacttggttacaactacggtgtcatactgattccagaaggtctgatcgactttattcctgaggtccaagagctcattgctgaactgaatgaaattctggcaaatgaggttgtcgatgaaaatggtttgtggaagaagaagctcaccgagcaatccctgaagctgtttgatcttctgcctgaagcaattcaggaacagctgatgcttgagagagacccacacggaaatgtccaggttgctaagattgagactgagaagatgcttattcaaatggttgaaactgaattggagaaaagaaagcaagctggtgcatacaagggacaattcatgggacagtcacatttcttcgggtatgaaggaagatgcggcttgcccacaaattttgatgccacatactgttatgcacttggttatggcgctggagtactcctcaacagtgggaagaccggactaatttcttcggttgggaacttggctgctcctgtggaagaatggactgtaggtgggactgctctcacagccttgatggatgtcgagaggagacacggtaagttcaagcctgtgatcaagaaagcaatggtggaacttgaaggtgcaccatttaagaaattcgcatcactgcgtgaagaatgggcattgaagaaccgatacatcagcccaggtccgatccaattcactggacctggttcagactctctcagccacactctacttcttgaactcggggctcaatagtctctcgactaaccaccattcctttgcttttctgccttccttggaatttcgcatcagtcttgttttatcttgaatattacgtgtccgtaacatttcgattaagttgattcctctcgtgtttcttcaacatataagataattataatattatttctt

SEQ ID NO: 38319 - protein, 566 aa, Arabidopsis thaliana
  peptide (1)..(566): Ceres Seq. ID no. 13648306
  misc_feature (97)..(383): Pfam Name: Phosphofructokinase Pfam Description: Phosphofructokinase
  misc_feature (97)..(383): Pfam Name: Phosphofructokinase Pfam Description: Phosphofructokinase
  misc_feature (30)..(566): Homolog of NCBI NO: 11528427 NR Description: pyrophosphate-dependent phosphofructokinase
  misc_feature (76)..(564): Homolog of NCBI NO: 100462 NR Description: diphosphate-fructose-6-phosphate
  misc_feature (19)..(566): Homolog of NCBI NO: 7447689 NR Description: diphosphate-fructose-6-phosphate
  misc_feature (26)..(564): Homolog of NCBI NO: 2507174 NR Description: PYROPHOSPHATE--FRUCTOSE 6-PHOSPHATE BETA SUBUNIT (PFP) (6-PHOSPHOFRUCTOKINASE (PYROPHOSPHATE))
  misc_feature (19)..(120): Homolog of NCBI NO: 30679628 NR Description: phosphofructokinase beta subunit -related
  misc_feature (30)..(566): Homolog of NCBI NO: 11528427 NR Description: pyrophosphate-dependent phosphofructokinase
  misc_feature (19)..(566): Homolog of NCBI NO: 7447689 NR Description: diphosphate-fructose-6-phosphate
  misc_feature (19)..(120): Homolog of NCBI NO: 30679628 NR Description: phosphofructokinase beta subunit -related
  misc_feature (1)..(566): Homolog of NCBI NO: 15221156 NR Description: pyrophosphate-fructose-6-phosphate
  misc_feature (1)..(566): Homolog of NCBI NO: 25314952 NR Description: hypothetical protein [imported] - Arabidopsis
  misc_feature (1)..(566): Homolog of NCBI NO: 3790100 NR Description: pyrophosphate-dependent phosphofructokinase beta
  misc_feature (21)..(565): Homolog of NCBI NO: 2499489 NR Description: Pyrophosphate--fructose 6-phosphate beta subunit (PFP) (6-phosphofructokinase,
  misc_feature (91)..(566): Homolog of NCBI NO: 30679628 NR Description: phosphofructokinase beta subunit -related
  misc_feature (26)..(564): Homolog of NCBI NO: 2507174 NR Description: PYROPHOSPHATE--FRUCTOSE 6-PHOSPHATE BETA SUBUNIT (PFP) (6-PHOSPHOFRUCTOKINASE (PYROPHOSPHATE))
  misc_feature (76)..(564): Homolog of NCBI NO: 100462 NR Description: diphosphate-fructose-6-phosphate
  misc_feature (91)..(566): Homolog of NCBI NO: 30679628 NR Description: phosphofructokinase beta subunit -related
  misc_feature (21)..(565): Homolog of NCBI NO: 2499489 NR Description: Pyrophosphate--fructose 6-phosphate beta subunit (PFP) (6-phosphofructokinase,
  misc_feature (1)..(566): Homolog of NCBI NO: 3790100 NR Description: pyrophosphate-dependent phosphofructokinase beta
  misc_feature (1)..(566): Homolog of NCBI NO: 25314952 NR Description: hypothetical protein [imported] - Arabidopsis
  misc_feature (1)..(566): Homolog of NCBI NO: 15221156 NR Description: pyrophosphate-fructose-6-phosphate
MAPALAVTRDLTAVGSPENAPAKGRASVYSEVQSSRINNTLPLPSVLKGAFKIVEGPASSAAGNPDEIAKLFPGLYGQPSVAVVPDQDAPSSAPKLKIGVVLSGGQAPGGHNVISGLFDYLQERAKGSTFYGFKGGPAGIMKCKYVELNAEYIQPYRNQGGFDMICSGRDKIETPDQFKQAEETAKKLDLDGLVVIGGDDSNTNACLLAENFRSKNLKTRVIGCPKTIDGDLKCKEVPTSFGFDTACKIYSEMIGNVMIDARSTGKYYHFVRLMGRAASHITLECALQTHPNITIIGEEVSAQKQTLKNVTDYMVDVICKRAELGYNYGVILIPEGLIDFIPEVQELIAELNEILANEVVDENGLWKKKLTEQSLKLFDLLPEAIQEQLMLERDPHGNVQVAKIETEKMLIQMVETELEKRKQAGAYKGQFMGQSHFFGYEGRCGLPTNFDATYCYALGYGAGVLLNSGKTGLISSVGNLAAPVEEWTVGGTALTALMDVERRHGKFKPVIKKAMVELEGAPFKKFASLREEWALKNRYISPGPIQFTGPGSDSLSHTLLLELGAQ

SEQ ID NO: 38320 - protein, 426 aa, Arabidopsis thaliana
  peptide (1)..(426): Ceres Seq. ID no. 13648307
  misc_feature (1)..(243): Pfam Name: Phosphofructokinase Pfam Description: Phosphofructokinase
  misc_feature (1)..(243): Pfam Name: Phosphofructokinase Pfam Description: Phosphofructokinase
  misc_feature (1)..(422): Homolog of NCBI NO: 34540025 NR Description: phosphofructokinase [Porphyromonas gingivalis
  misc_feature (1)..(426): Homolog of NCBI NO: 11528427 NR Description: pyrophosphate-dependent phosphofructokinase
  misc_feature (1)..(424): Homolog of NCBI NO: 100462 NR Description: diphosphate-fructose-6-phosphate
  misc_feature (1)..(426): Homolog of NCBI NO: 7447689 NR Description: diphosphate-fructose-6-phosphate
  misc_feature (1)..(424): Homolog of NCBI NO: 2507174 NR Description: PYROPHOSPHATE--FRUCTOSE 6-PHOSPHATE BETA SUBUNIT (PFP) (6-PHOSPHOFRUCTOKINASE (PYROPHOSPHATE))
  misc_feature (1)..(422): Homolog of NCBI NO: 34540025 NR Description: phosphofructokinase [Porphyromonas gingivalis
  misc_feature (1)..(424): Homolog of NCBI NO: 100462 NR Description: diphosphate-fructose-6-phosphate
  misc_feature (1)..(424): Homolog of NCBI NO: 2507174 NR Description: PYROPHOSPHATE--FRUCTOSE 6-PHOSPHATE BETA SUBUNIT (PFP) (6-PHOSPHOFRUCTOKINASE (PYROPHOSPHATE))
  misc_feature (1)..(426): Homolog of NCBI NO: 15221156 NR Description: pyrophosphate-fructose-6-phosphate
  misc_feature (1)..(426): Homolog of NCBI NO: 25314952 NR Description: hypothetical protein [imported] - Arabidopsis
  misc_feature (1)..(426): Homolog of NCBI NO: 3790100 NR Description: pyrophosphate-dependent phosphofructokinase beta
  misc_feature (1)..(425): Homolog of NCBI NO: 2499489 NR Description: Pyrophosphate--fructose 6-phosphate beta subunit (PFP) (6-phosphofructokinase,
  misc_feature (1)..(426): Homolog of NCBI NO: 30679628 NR Description: phosphofructokinase beta subunit -related
  misc_feature (1)..(426): Homolog of NCBI NO: 7447689 NR Description: diphosphate-fructose-6-phosphate
  misc_feature (1)..(426): Homolog of NCBI NO: 11528427 NR Description: pyrophosphate-dependent phosphofructokinase
  misc_feature (1)..(426): Homolog of NCBI NO: 30679628 NR Description: phosphofructokinase beta subunit -related
  misc_feature (1)..(425): Homolog of NCBI NO: 2499489 NR Description: Pyrophosphate--fructose 6-phosphate beta subunit (PFP) (6-phosphofructokinase,
  misc_feature (1)..(426): Homolog of NCBI NO: 3790100 NR Description: pyrophosphate-dependent phosphofructokinase beta
  misc_feature (1)..(426): Homolog of NCBI NO: 25314952 NR Description: hypothetical protein [imported] - Arabidopsis
  misc_feature (1)..(426): Homolog of NCBI NO: 15221156 NR Description: pyrophosphate-fructose-6-phosphate
MKCKYVELNAEYIQPYRNQGGFDMICSGRDKIETPDQFKQAEETAKKLDLDGLVVIGGDDSNTNACLLAENFRSKNLKTRVIGCPKTIDGDLKCKEVPTSFGFDTACKIYSEMIGNVMIDARSTGKYYHFVRLMGRAASHITLECALQTHPNITIIGEEVSAQKQTLKNVTDYMVDVICKRAELGYNYGVILIPEGLIDFIPEVQELIAELNEILANEVVDENGLWKKKLTEQSLKLFDLLPEAIQEQLMLERDPHGNVQVAKIETEKMLIQMVETELEKRKQAGAYKGQFMGQSHFFGYEGRCGLPTNFDATYCYALGYGAGVLLNSGKTGLISSVGNLAAPVEEWTVGGTALTALMDVERRHGKFKPVIKKAMVELEGAPFKKFASLREEWALKNRYISPGPIQFTGPGSDSLSHTLLLELGAQ

SEQ ID NO: 38321 - protein, 403 aa, Arabidopsis thaliana
  peptide (1)..(403): Ceres Seq. ID no. 13648308
  misc_feature (1)..(220): Pfam Name: Phosphofructokinase Pfam Description: Phosphofructokinase
  misc_feature (1)..(220): Pfam Name: Phosphofructokinase Pfam Description: Phosphofructokinase
  misc_feature (1)..(399): Homolog of NCBI NO: 34540025 NR Description: phosphofructokinase [Porphyromonas gingivalis
  misc_feature (1)..(403): Homolog of NCBI NO: 11528427 NR Description: pyrophosphate-dependent phosphofructokinase
  misc_feature (1)..(401): Homolog of NCBI NO: 100462 NR Description: diphosphate-fructose-6-phosphate
  misc_feature (1)..(403): Homolog of NCBI NO: 7447689 NR Description: diphosphate-fructose-6-phosphate
  misc_feature (1)..(401): Homolog of NCBI NO: 2507174 NR Description: PYROPHOSPHATE--FRUCTOSE 6-PHOSPHATE BETA SUBUNIT (PFP) (6-PHOSPHOFRUCTOKINASE (PYROPHOSPHATE))
  misc_feature (1)..(399): Homolog of NCBI NO: 34540025 NR Description: phosphofructokinase [Porphyromonas gingivalis
  misc_feature (1)..(401): Homolog of NCBI NO: 100462 NR Description: diphosphate-fructose-6-phosphate
  misc_feature (1)..(401): Homolog of NCBI NO: 2507174 NR Description: PYROPHOSPHATE--FRUCTOSE 6-PHOSPHATE BETA SUBUNIT (PFP) (6-PHOSPHOFRUCTOKINASE (PYROPHOSPHATE))
  misc_feature (1)..(403): Homolog of NCBI NO: 15221156 NR Description: pyrophosphate-fructose-6-phosphate
  misc_feature (1)..(403): Homolog of NCBI NO: 25314952 NR Description: hypothetical protein [imported] - Arabidopsis
  misc_feature (1)..(403): Homolog of NCBI NO: 3790100 NR Description: pyrophosphate-dependent phosphofructokinase beta
  misc_feature (1)..(402): Homolog of NCBI NO: 2499489 NR Description: Pyrophosphate--fructose 6-phosphate beta subunit (PFP) (6-phosphofructokinase,
  misc_feature (1)..(403): Homolog of NCBI NO: 30679628 NR Description: phosphofructokinase beta subunit -related
  misc_feature (1)..(403): Homolog of NCBI NO: 7447689 NR Description: diphosphate-fructose-6-phosphate
  misc_feature (1)..(403): Homolog of NCBI NO: 11528427 NR Description: pyrophosphate-dependent phosphofructokinase
  misc_feature (1)..(403): Homolog of NCBI NO: 30679628 NR Description: phosphofructokinase beta subunit -related
  misc_feature (1)..(402): Homolog of NCBI NO: 2499489 NR Description: Pyrophosphate--fructose 6-phosphate beta subunit (PFP) (6-phosphofructokinase,
  misc_feature (1)..(403): Homolog of NCBI NO: 3790100 NR Description: pyrophosphate-dependent phosphofructokinase beta
  misc_feature (1)..(403): Homolog of NCBI NO: 25314952 NR Description: hypothetical protein [imported] - Arabidopsis
  misc_feature (1)..(403): Homolog of NCBI NO: 15221156 NR Description: pyrophosphate-fructose-6-phosphate
MICSGRDKIETPDQFKQAEETAKKLDLDGLVVIGGDDSNTNACLLAENFRSKNLKTRVIGCPKTIDGDLKCKEVPTSFGFDTACKIYSEMIGNVMIDARSTGKYYHFVRLMGRAASHITLECALQTHPNITIIGEEVSAQKQTLKNVTDYMVDVICKRAELGYNYGVILIPEGLIDFIPEVQELIAELNEILANEVVDENGLWKKKLTEQSLKLFDLLPEAIQEQLMLERDPHGNVQVAKIETEKMLIQMVETELEKRKQAGAYKGQFMGQSHFFGYEGRCGLPTNFDATYCYALGYGAGVLLNSGKTGLISSVGNLAAPVEEWTVGGTALTALMDVERRHGKFKPVIKKAMVELEGAPFKKFASLREEWALKNRYISPGPIQFTGPGSDSLSHTLLLELGAQ

SEQ ID NO: 38322 - DNA, 1110 bp, Arabidopsis thaliana
  misc_feature (1)..(1110): Ceres Seq. ID no. 13488521
  misc_feature: MA Experiment ID: 108434 Result: Down-regulated in Transcription
  misc_feature: MA Experiment 108434 PARAMETER Experiment Name: At_Root_Tips_cDNA_P Parameter: Tissue Value: Root Tips
  misc_feature: MA Experiment ID: 108573 Result: Up-regulated in Transcription
  misc_feature: MA Experiment 108573 PARAMETER Experiment Name: At_Drought_cDNA_P Parameter: Timepoint (hr) Value: 6
  misc_feature: MA Experiment 108573 PARAMETER Experiment Name: At_Drought_cDNA_P Parameter: Tissue Value: Aerial
  misc_feature: MA Experiment 108573 PARAMETER Experiment Name: At_Drought_cDNA_P Parameter: Treatment Value: Drought vs. No Drought
  misc_feature: MA Experiment ID: 108585 Result: Up-regulated in Transcription
  misc_feature: MA Experiment 108585 PARAMETER Experiment Name: At_5mM_NaNP_cDNA_P Parameter: Timepoint (hr) Value: 6
  misc_feature: MA Experiment 108585 PARAMETER Experiment Name: At_5mM_NaNP_cDNA_P Parameter: Tissue Value: Aerial
  misc_feature: MA Experiment 108585 PARAMETER Experiment Name: At_5mM_NaNP_cDNA_P Parameter: Treatment Value: null
  misc_feature: MA Experiment ID: 20000173 Result: Down-regulated in Transcription
  misc_feature: MA Experiment 20000173 PARAMETER Experiment Name: At_42deg_Heat_P Parameter: Age (day) Value: 14
  misc_feature: MA Experiment 20000173 PARAMETER Experiment Name: At_42deg_Heat_P Parameter: Organism Value: A. thaliana
  misc_feature: MA Experiment 20000173 PARAMETER Experiment Name: At_42deg_Heat_P Parameter: Plant Line Value: WS
  misc_feature: MA Experiment 20000173 PARAMETER Experiment Name: At_42deg_Heat_P Parameter: Temperature (deg C) Value: 42 vs. 22
  misc_feature: MA Experiment 20000173 PARAMETER Experiment Name: At_42deg_Heat_P Parameter: Timepoint (hr) Value: 6
  misc_feature: MA Experiment 20000173 PARAMETER Experiment Name: At_42deg_Heat_P Parameter: Tissue Value: Aerial
  misc_feature: MA Experiment ID: 20000182 Result: Up-regulated in Transcription
  misc_feature: MA Experiment 20000182 PARAMETER Experiment Name: At_2mM_SA_P Parameter: Age (day) Value: 14
  misc_feature: MA Experiment 20000182 PARAMETER Experiment Name: At_2mM_SA_P Parameter: Organism Value: A. thaliana
  misc_feature: MA Experiment 20000182 PARAMETER Experiment Name: At_2mM_SA_P Parameter: Plant Line Value: WS
  misc_feature: MA Experiment 20000182 PARAMETER Experiment Name: At_2mM_SA_P Parameter: Timepoint (hr) Value: 6
  misc_feature: MA Experiment 20000182 PARAMETER Experiment Name: At_2mM_SA_P Parameter: Tissue Value: Aerial
  misc_feature: MA Experiment 20000182 PARAMETER Experiment Name: At_2mM_SA_P Parameter: Treatment Value: 2mM SA vs. No Treatment
  misc_feature: MA Experiment ID: 20000184 Result: Down-regulated in Transcription
  misc_feature: MA Experiment 20000184 PARAMETER Experiment Name: At_Shoots__P Parameter: Age (day) Value: 7
  misc_feature: MA Experiment 20000184 PARAMETER Experiment Name: At_Shoots__P Parameter: Tissue Value: Shoots vs. Whole Plant
  misc_feature: MA Experiment ID: 20000227 Result: Down-regulated in Transcription
  misc_feature: MA Experiment 20000227 PARAMETER Experiment Name: At_Root-Tips-vs-Tops_P Parameter: Tissue Value: Root Tips vs. Root Tops
  misc_feature: MA Experiment ID: 20000234 Result: Down-regulated in Transcription
  misc_feature: MA Experiment 20000234 PARAMETER Experiment Name: At_Siliques_P Parameter: Age (day) Value: 21
  misc_feature: MA Experiment 20000234 PARAMETER Experiment Name: At_Siliques_P Parameter: Organism Value: A. thaliana
  misc_feature: MA Experiment 20000234 PARAMETER Experiment Name: At_Siliques_P Parameter: Plant Line Value: WS
  misc_feature: MA Experiment 20000234 PARAMETER Experiment Name: At_Siliques_P Parameter: Tissue Value: Less Than 5mm Siliques vs. Whole Plant
  misc_feature: MA Experiment ID: 20000438 Result: Down-regulated in Transcription
  misc_feature: MA Experiment 20000438 PARAMETER Experiment Name: At_Shoots__P Parameter: Age (day) Value: 14
  misc_feature: MA Experiment 20000438 PARAMETER Experiment Name: At_Shoots__P Parameter: Tissue Value: Shoots vs. Whole Plant
acttcacttttgttctttgtcgcttcaattcaacgcttattcctaaattcgattttgcgttgtcaaattccttaaatttcgttacaaaggtttgatatttccgatgagatctccagcaaagacgatgccgtcgatgtcaccttcttcagtttccacggagaaatctccacctccgtcagatacttcaatggctatagtagctttcgataactccactactcacttctcttcttctccatcgccgccacattctcttgatcattccagtgaatcggagaaggaagatgcgaaaagtaaacccgagagtagaagaaacaagaatcctggaaaggttgaggaaactccatctccgattgtggtggttcataatcacaatcgctctgtgaaagaagtggttccgacgagaaagagtgcgagagttggttctgggagaagtagtggccaacgatctggagctgtttcggctattttgagaaggtctaggagagaagaggtggtaaagttttcagctttagggtttcggttgagtgaggttgtgttggctttgatatctttctcaattatggctgctgataaaactaaaggttggagtggtgattctttcgatcgttacaaggagtacaggttttgcctgtctgtgaacgtggttgcttttgtatattctagttttcaagcatgtgacttagcgtaccatcttgtcaaagagaagcatttgatcagccaccaccttcgacctctgtttgagttcattatagatcaggtacttgcatatctgcttatgtctgcctcaacagcagcagtcactcgcgttgatgattgggtttcaaactggggaaaagacgagttcacagagatggcaagtgcctcgattgctatgtccttcctggccttccttgcctttgctttcagttccctcatttcaggctataacctatttaaccaaggctctctctgatcctcccacctttttgtataggtccacactccttgtgtgatgtataataaaaatgatcaatatatcttagcattgtaattattatactatttttgtagcctatataaaggtttccaaaaactatgaggttaataagagaggcatatcctgttgtc

SEQ ID NO: 38323 - protein, 283 aa, Arabidopsis thaliana
  peptide (1)..(283): Ceres Seq. ID no. 13488522
  misc_feature (131)..(265): Pfam Name: Domain of unknown function (DUF588) Pfam Description: Domain of unknown function (DUF588)
  misc_feature (189)..(282): Homolog of NCBI NO: 10177460 NR Description: gene_id:MQB2.14~unknown protein [Arabidopsis
  misc_feature (220)..(279): Homolog of NCBI NO: 34911616 NR Description: P0039G05.10 [Oryza sativa (japonica
  misc_feature (24)..(191): Homolog of NCBI NO: 34911616 NR Description: P0039G05.10 [Oryza sativa (japonica
  misc_feature (169)..(274): Homolog of NCBI NO: 2598569 NR Description: putative start codon [Medicago truncatula]
  misc_feature (1)..(222): Homolog of NCBI NO: 10177460 NR Description: gene_id:MQB2.14~unknown protein [Arabidopsis
  misc_feature (188)..(283): Homolog of NCBI NO: 15227628 NR Description: expressed protein [Arabidopsis thaliana]
  misc_feature (36)..(277): Homolog of NCBI NO: 15242642 NR Description: expressed protein [Arabidopsis thaliana]
  misc_feature (1)..(282): Homolog of NCBI NO: 15241975 NR Description: hypothetical protein [Arabidopsis thaliana]
  misc_feature (1)..(222): Homolog of NCBI NO: 15227628 NR Description: expressed protein [Arabidopsis thaliana]
  misc_feature (1)..(283): Homolog of NCBI NO: 27754604 NR Description: unknown protein [Arabidopsis thaliana]
MRSPAKTMPSMSPSSVSTEKSPPPSDTSMAIVAFDNSTTHFSSSPSPPHSLDHSSESEKEDAKSKPESRRNKNPGKVEETPSPIVVVHNHNRSVKEVVPTRKSARVGSGRSSGQRSGAVSAILRRSRREEVVKFSALGFRLSEVVLALISFSIMAADKTKGWSGDSFDRYKEYRFCLSVNVVAFVYSSFQACDLAYHLVKEKHLISHHLRPLFEFIIDQVLAYLLMSASTAAVTRVDDWVSNWGKDEFTEMASASIAMSFLAFLAFAFSSLISGYNLFNQGSL

SEQ ID NO: 38324 - protein, 276 aa, Arabidopsis thaliana
  peptide (1)..(276): Ceres Seq. ID no. 13488523
  misc_feature (124)..(258): Pfam Name: Domain of unknown function (DUF588) Pfam Description: Domain of unknown function (DUF588)
  misc_feature (182)..(275): Homolog of NCBI NO: 10177460 NR Description: gene_id:MQB2.14~unknown protein [Arabidopsis
  misc_feature (213)..(272): Homolog of NCBI NO: 34911616 NR Description: P0039G05.10 [Oryza sativa (japonica
  misc_feature (17)..(184): Homolog of NCBI NO: 34911616 NR Description: P0039G05.10 [Oryza sativa (japonica
  misc_feature (162)..(267): Homolog of NCBI NO: 2598569 NR Description: putative start codon [Medicago truncatula]
  misc_feature (1)..(215): Homolog of NCBI NO: 10177460 NR Description: gene_id:MQB2.14~unknown protein [Arabidopsis
  misc_feature (181)..(276): Homolog of NCBI NO: 15227628 NR Description: expressed protein [Arabidopsis thaliana]
  misc_feature (29)..(270): Homolog of NCBI NO: 15242642 NR Description: expressed protein [Arabidopsis thaliana]
  misc_feature (1)..(275): Homolog of NCBI NO: 15241975 NR Description: hypothetical protein [Arabidopsis thaliana]
  misc_feature (1)..(215): Homolog of NCBI NO: 15227628 NR Description: expressed protein [Arabidopsis thaliana]
  misc_feature (1)..(276): Homolog of NCBI NO: 27754604 NR Description: unknown protein [Arabidopsis thaliana]
MPSMSPSSVSTEKSPPPSDTSMAIVAFDNSTTHFSSSPSPPHSLDHSSESEKEDAKSKPESRRNKNPGKVEETPSPIVVVHNHNRSVKEVVPTRKSARVGSGRSSGQRSGAVSAILRRSRREEVVKFSALGFRLSEVVLALISFSIMAADKTKGWSGDSFDRYKEYRFCLSVNVVAFVYSSFQACDLAYHLVKEKHLISHHLRPLFEFIIDQVLAYLLMSASTAAVTRVDDWVSNWGKDEFTEMASASIAMSFLAFLAFAFSSLISGYNLFNQGSL

SEQ ID NO: 38325 - protein, 273 aa, Arabidopsis thaliana
  peptide (1)..(273): Ceres Seq. ID no. 13488524
  misc_feature (121)..(255): Pfam Name: Domain of unknown function (DUF588) Pfam Description: Domain of unknown function (DUF588)
  misc_feature (179)..(272): Homolog of NCBI NO: 10177460 NR Description: gene_id:MQB2.14~unknown protein [Arabidopsis
  misc_feature (210)..(269): Homolog of NCBI NO: 34911616 NR Description: P0039G05.10 [Oryza sativa (japonica
  misc_feature (14)..(181): Homolog of NCBI NO: 34911616 NR Description: P0039G05.10 [Oryza sativa (japonica
  misc_feature (159)..(264): Homolog of NCBI NO: 2598569 NR Description: putative start codon [Medicago truncatula]
  misc_feature (1)..(212): Homolog of NCBI NO: 10177460 NR Description: gene_id:MQB2.14~unknown protein [Arabidopsis
  misc_feature (178)..(273): Homolog of NCBI NO: 15227628 NR Description: expressed protein [Arabidopsis thaliana]
  misc_feature (26)..(267): Homolog of NCBI NO: 15242642 NR Description: expressed protein [Arabidopsis thaliana]
  misc_feature (1)..(272): Homolog of NCBI NO: 15241975 NR Description: hypothetical protein [Arabidopsis thaliana]
  misc_feature (1)..(212): Homolog of NCBI NO: 15227628 NR Description: expressed protein [Arabidopsis thaliana]
  misc_feature (1)..(273): Homolog of NCBI NO: 27754604 NR Description: unknown protein [Arabidopsis thaliana]
MSPSSVSTEKSPPPSDTSMAIVAFDNSTTHFSSSPSPPHSLDHSSESEKEDAKSKPESRRNKNPGKVEETPSPIVVVHNHNRSVKEVVPTRKSARVGSGRSSGQRSGAVSAILRRSRREEVVKFSALGFRLSEVVLALISFSIMAADKTKGWSGDSFDRYKEYRFCLSVNVVAFVYSSFQACDLAYHLVKEKHLISHHLRPLFEFIIDQVLAYLLMSASTAAVTRVDDWVSNWGKDEFTEMASASIAMSFLAFLAFAFSSLISGYNLFNQGSL

SEQ ID NO: 38326 - DNA, 1329 bp, Arabidopsis thaliana
  misc_feature (1)..(1329): Ceres Seq. ID no. 13619167
  misc_feature: MA Experiment ID: 108433 Result: Up-regulated in Transcription
  misc_feature: MA Experiment 108433 PARAMETER Experiment Name: At_rhl_Mutant2_cDNA_P Parameter: Age (day) Value: 7
  misc_feature: MA Experiment 108433 PARAMETER Experiment Name: At_rhl_Mutant2_cDNA_P Parameter: Organism Value: A. thaliana
  misc_feature: MA Experiment 108433 PARAMETER Experiment Name: At_rhl_Mutant2_cDNA_P Parameter: Plant Line Value: rhl Mutant vs. wt landsburg
  misc_feature: MA Experiment 108433 PARAMETER Experiment Name: At_rhl_Mutant2_cDNA_P Parameter: Tissue Value: Roots
  misc_feature: MA Experiment ID: 108434 Result: Down-regulated in Transcription
  misc_feature: MA Experiment 108434 PARAMETER Experiment Name: At_Root_Tips_cDNA_P Parameter: Tissue Value: Root Tips
  misc_feature: MA Experiment ID: 108435 Result: Down-regulated in Transcription
  misc_feature: MA Experiment 108435 PARAMETER Experiment Name: At_stm_Mutants_cDNA_P Parameter: Plant Line Value: wt Landsburg vs stm
  misc_feature: MA Experiment 108435 PARAMETER Experiment Name: At_stm_Mutants_cDNA_P Parameter: Tissue Value: Shoot Apical Meristem Region
  misc_feature: MA Experiment ID: 108462 Result: Up-regulated in Transcription
  misc_feature: MA Experiment 108462 PARAMETER Experiment Name: At_Germinating_Seeds_cDNA_P Parameter: Age (day) Value: 2 vs. 0
  misc_feature: MA Experiment 108462 PARAMETER Experiment Name: At_Germinating_Seeds_cDNA_P Parameter: Tissue Value: Germinating Seeds
  misc_feature: MA Experiment ID: 108464 Result: Up-regulated in Transcription
  misc_feature: MA Experiment 108464 PARAMETER Experiment Name: At_Germinating_Seeds_cDNA_P Parameter: Age (day) Value: 4 vs. 0
  misc_feature: MA Experiment 108464 PARAMETER Experiment Name: At_Germinating_Seeds_cDNA_P Parameter: Tissue Value: Germinating Seeds
  misc_feature: MA Experiment ID: 108488 Result: Down-regulated in Transcription
  misc_feature: MA Experiment ID: 108574 Result: Down-regulated in Transcription
  misc_feature: MA Experiment 108574 PARAMETER Experiment Name: At_Wounding__cDNA_P Parameter: Timepoint (hr) Value: 1
  misc_feature: MA Experiment 108574 PARAMETER Experiment Name: At_Wounding__cDNA_P Parameter: Tissue Value: Aerial
  misc_feature: MA Experiment 108574 PARAMETER Experiment Name: At_Wounding__cDNA_P Parameter: Treatment Value: Wounding vs. No Wounding
  misc_feature: MA Experiment ID: 108577 Result: Down-regulated in Transcription
  misc_feature: MA Experiment 108577 PARAMETER Experiment Name: At_42deg_Heat_cDNA_P Parameter: Temperature (deg C) Value: 42 vs. 22
  misc_feature: MA Experiment 108577 PARAMETER Experiment Name: At_42deg_Heat_cDNA_P Parameter: Timepoint (hr) Value: 6
  misc_feature: MA Experiment 108577 PARAMETER Experiment Name: At_42deg_Heat_cDNA_P Parameter: Tissue Value: Aerial
  misc_feature: MA Experiment ID: 108579 Result: Down-regulated in Transcription
  misc_feature: MA Experiment 108579 PARAMETER Experiment Name: At_4deg_Cold_cDNA_P Parameter: Temperature (deg C) Value: 4 vs. 22
  misc_feature: MA Experiment 108579 PARAMETER Experiment Name: At_4deg_Cold_cDNA_P Parameter: Timepoint (hr) Value: 6
  misc_feature: MA Experiment 108579 PARAMETER Experiment Name: At_4deg_Cold_cDNA_P Parameter: Tissue Value: Aerial
  misc_feature: MA Experiment ID: 108585 Result: Down-regulated in Transcription
  misc_feature: MA Experiment 108585 PARAMETER Experiment Name: At_5mM_NaNP_cDNA_P Parameter: Timepoint (hr) Value: 6
  misc_feature: MA Experiment 108585 PARAMETER Experiment Name: At_5mM_NaNP_cDNA_P Parameter: Tissue Value: Aerial
  misc_feature: MA Experiment 108585 PARAMETER Experiment Name: At_5mM_NaNP_cDNA_P Parameter: Treatment Value: null
  misc_feature: MA Experiment ID: 108595 Result: Down-regulated in Transcription
  misc_feature: MA Experiment 108595 PARAMETER Experiment Name: At_Ler-pi_Ovule_cDNA_P Parameter: Plant Line Value: null
  misc_feature: MA Experiment ID: 20000069 Result: Up-regulated in Transcription
  misc_feature: MA Experiment 20000069 PARAMETER Experiment Name: At_100uM_ABA_Mutants_cDNA_P Parameter: Plant Line Value: CS23
  misc_feature: MA Experiment 20000069 PARAMETER Experiment Name: At_100uM_ABA_Mutants_cDNA_P Parameter: Timepoint (hr) Value: 6
  misc_feature: MA Experiment 20000069 PARAMETER Experiment Name: At_100uM_ABA_Mutants_cDNA_P Parameter: Tissue Value: Aerial
  misc_feature: MA Experiment 20000069 PARAMETER Experiment Name: At_100uM_ABA_Mutants_cDNA_P Parameter: Treatment Value: 100uM ABA vs. No Treatment
  misc_feature: MA Experiment ID: 20000070 Result: Up-regulated in Transcription
  misc_feature: MA Experiment 20000070 PARAMETER Experiment Name: At_100uM_ABA_Mutants_cDNA_P Parameter: Plant Line Value: CS24
  misc_feature: MA Experiment 20000070 PARAMETER Experiment Name: At_100uM_ABA_Mutants_cDNA_P Parameter: Timepoint (hr) Value: 6
  misc_feature: MA Experiment 20000070 PARAMETER Experiment Name: At_100uM_ABA_Mutants_cDNA_P Parameter: Tissue Value: Aerial
  misc_feature: MA Experiment 20000070 PARAMETER Experiment Name: At_100uM_ABA_Mutants_cDNA_P Parameter: Treatment Value: 100uM ABA vs. No Treatment
  misc_feature: MA Experiment ID: 20000071 Result: Up-regulated in Transcription
  misc_feature: MA Experiment 20000071 PARAMETER Experiment Name: At_100uM_ABA_Mutants_cDNA_P Parameter: Plant Line Value: CS8104
  misc_feature: MA Experiment 20000071 PARAMETER Experiment Name: At_100uM_ABA_Mutants_cDNA_P Parameter: Timepoint (hr) Value: 6
  misc_feature: MA Experiment 20000071 PARAMETER Experiment Name: At_100uM_ABA_Mutants_cDNA_P Parameter: Tissue Value: Aerial
  misc_feature: MA Experiment 20000071 PARAMETER Experiment Name: At_100uM_ABA_Mutants_cDNA_P Parameter: Treatment Value: 100uM ABA vs. No Treatment
  misc_feature: MA Experiment ID: 20000072 Result: Up-regulated in Transcription
  misc_feature: MA Experiment 20000072 PARAMETER Experiment Name: At_100uM_ABA_Mutants_cDNA_P Parameter: Plant Line Value: CS8105
  misc_feature: MA Experiment 20000072 PARAMETER Experiment Name: At_100uM_ABA_Mutants_cDNA_P Parameter: Timepoint (hr) Value: 6
  misc_feature: MA Experiment 20000072 PARAMETER Experiment Name: At_100uM_ABA_Mutants_cDNA_P Parameter: Tissue Value: Aerial
  misc_feature: MA Experiment 20000072 PARAMETER Experiment Name: At_100uM_ABA_Mutants_cDNA_P Parameter: Treatment Value: 100uM ABA vs. No Treatment
  misc_feature: MA Experiment ID: 20000086 Result: Up-regulated in Transcription
  misc_feature: MA Experiment 20000086 PARAMETER Experiment Name: At_100uM_ABA_Mutants_cDNA_P Parameter: Plant Line Value: CS22
  misc_feature: MA Experiment 20000086 PARAMETER Experiment Name: At_100uM_ABA_Mutants_cDNA_P Parameter: Timepoint (hr) Value: 6
  misc_feature: MA Experiment 20000086 PARAMETER Experiment Name: At_100uM_ABA_Mutants_cDNA_P Parameter: Tissue Value: Aerial
  misc_feature: MA Experiment 20000086 PARAMETER Experiment Name: At_100uM_ABA_Mutants_cDNA_P Parameter: Treatment Value: 100uM ABA vs. No Treatment
  misc_feature: MA Experiment ID: 20000087 Result: Up-regulated in Transcription
  misc_feature: MA Experiment 20000087 PARAMETER Experiment Name: At_100uM_ABA_Mutants_cDNA_P Parameter: Plant Line Value: WS
  misc_feature: MA Experiment 20000087 PARAMETER Experiment Name: At_100uM_ABA_Mutants_cDNA_P Parameter: Timepoint (hr) Value: 6
  misc_feature: MA Experiment 20000087 PARAMETER Experiment Name: At_100uM_ABA_Mutants_cDNA_P Parameter: Tissue Value: Aerial
  misc_feature: MA Experiment 20000087 PARAMETER Experiment Name: At_100uM_ABA_Mutants_cDNA_P Parameter: Treatment Value: 100uM ABA vs. No Treatment
  misc_feature: MA Experiment ID: 20000088 Result: Up-regulated in Transcription
  misc_feature: MA Experiment 20000088 PARAMETER Experiment Name: At_100uM_ABA_Mutants_cDNA_P Parameter: Plant Line Value: Landsberg
  misc_feature: MA Experiment 20000088 PARAMETER Experiment Name: At_100uM_ABA_Mutants_cDNA_P Parameter: Timepoint (hr) Value: 6
  misc_feature: MA Experiment 20000088 PARAMETER Experiment Name: At_100uM_ABA_Mutants_cDNA_P Parameter: Tissue Value: Aerial
  misc_feature: MA Experiment 20000088 PARAMETER Experiment Name: At_100uM_ABA_Mutants_cDNA_P Parameter: Treatment Value: 100uM ABA vs. No Treatment
  misc_feature: MA Experiment ID: 20000089 Result: Up-regulated in Transcription
  misc_feature: MA Experiment ID: 20000111 Result: Down-regulated in Transcription
  misc_feature: MA Experiment 20000111 PARAMETER Experiment Name: At_42deg_Heat_cDNA_P Parameter: Temperature (deg C) Value: 42 vs. 22
  misc_feature: MA Experiment 20000111 PARAMETER Experiment Name: At_42deg_Heat_cDNA_P Parameter: Timepoint (hr) Value: 6
  misc_feature: MA Experiment 20000111 PARAMETER Experiment Name: At_42deg_Heat_cDNA_P Parameter: Tissue Value: Aerial
  misc_feature: MA Experiment ID: 20000112 Result: Down-regulated in Transcription
  misc_feature: MA Experiment 20000112 PARAMETER Experiment Name: At_42deg_Heat_cDNA_P Parameter: Temperature (deg C) Value: 42 vs. 22
  misc_feature: MA Experiment 20000112 PARAMETER Experiment Name: At_42deg_Heat_cDNA_P Parameter: Timepoint (hr) Value: 2
  misc_feature: MA Experiment 20000112 PARAMETER Experiment Name: At_42deg_Heat_cDNA_P Parameter: Tissue Value: Aerial
  misc_feature: MA Experiment ID: 20000113 Result: Down-regulated in Transcription
  misc_feature: MA Experiment 20000113 PARAMETER Experiment Name: At_42deg_Heat_cDNA_P Parameter: Temperature (deg C) Value: 42 vs. 22
  misc_feature: MA Experiment 20000113 PARAMETER Experiment Name: At_42deg_Heat_cDNA_P Parameter: Timepoint (hr) Value: 8
  misc_feature: MA Experiment 20000113 PARAMETER Experiment Name: At_42deg_Heat_cDNA_P Parameter: Tissue Value: Aerial
  misc_feature: MA Experiment ID: 20000117 Result: Up-regulated in Transcription
  misc_feature: MA Experiment 20000117 PARAMETER Experiment Name: At_100uM_ABA_Mutants_cDNA_P Parameter: Plant Line Value: Columbia
  misc_feature: MA Experiment 20000117 PARAMETER Experiment Name: At_100uM_ABA_Mutants_cDNA_P Parameter: Timepoint (hr) Value: 6
  misc_feature: MA Experiment 20000117 PARAMETER Experiment Name: At_100uM_ABA_Mutants_cDNA_P Parameter: Tissue Value: Aerial
  misc_feature: MA Experiment 20000117 PARAMETER Experiment Name: At_100uM_ABA_Mutants_cDNA_P Parameter: Treatment Value: 100uM ABA vs. No Treatment
  misc_feature: MA Experiment ID: 20000224 Result: Down-regulated in Transcription
  misc_feature: MA Experiment ID: 20000264 Result: Up-regulated in Transcription
  misc_feature: MA Experiment 20000264 PARAMETER Experiment Name: At_Open_Flower_P Parameter: Age (day) Value: 21
  misc_feature: MA Experiment 20000264 PARAMETER Experiment Name: At_Open_Flower_P Parameter: Plant Line Value: WS
  misc_feature: MA Experiment 20000264 PARAMETER Experiment Name: At_Open_Flower_P Parameter: Tissue Value: Open Flower vs. Whole Plant
  misc_feature: MA Experiment ID: 20000328 Result: Down-regulated in Transcription
  misc_feature: MA Experiment 20000328 PARAMETER Experiment Name: At_42deg_Heat_Sub_P Parameter: Age (day) Value: 14
  misc_feature: MA Experiment 20000328 PARAMETER Experiment Name: At_42deg_Heat_Sub_P Parameter: Organism Value: A. thaliana
  misc_feature: MA Experiment 20000328 PARAMETER Experiment Name: At_42deg_Heat_Sub_P Parameter: Plant Line Value: WS
  misc_feature: MA Experiment 20000328 PARAMETER Experiment Name: At_42deg_Heat_Sub_P Parameter: Temperature (deg C) Value: 42 vs. 22
  misc_feature: MA Experiment 20000328 PARAMETER Experiment Name: At_42deg_Heat_Sub_P Parameter: Timepoint (hr) Value: 6
  misc_feature: MA Experiment 20000328 PARAMETER Experiment Name: At_42deg_Heat_Sub_P Parameter: Tissue Value: Aerial
  misc_feature: MA Experiment ID: 20000355 Result: Up-regulated in Transcription
  misc_feature: MA Experiment 20000355 PARAMETER Experiment Name: At_Siliques_Sub_P Parameter: Age (day) Value: 21
  misc_feature: MA Experiment 20000355 PARAMETER Experiment Name: At_Siliques_Sub_P Parameter: Organism Value: A. thaliana
  misc_feature: MA Experiment 20000355 PARAMETER Experiment Name: At_Siliques_Sub_P Parameter: Plant Line Value: WS
  misc_feature: MA Experiment 20000355 PARAMETER Experiment Name: At_Siliques_Sub_P Parameter: Tissue Value: Less Than 5mm Siliques vs. Whole Plant
  misc_feature: MA Experiment ID: 20000794 Result: Up-regulated in Transcription
  misc_feature: MA Experiment 20000794 PARAMETER Experiment Name: At_Petals_P Parameter: Age (day) Value: 23-25 days
  misc_feature: MA Experiment 20000794 PARAMETER Experiment Name: At_Petals_P Parameter: Plant Line Value: WS
  misc_feature: MA Experiment 20000794 PARAMETER Experiment Name: At_Petals_P Parameter: Tissue Value: Petals vs. Whole plant
  misc_feature: MA Experiment ID: 20001557 Result: Down-regulated in Transcription
  misc_feature: MA Experiment 20001557 PARAMETER Experiment Name: At_Drought_Soil_Dry_P Parameter: Age (day) Value: 27
  misc_feature: MA Experiment 20001557 PARAMETER Experiment Name: At_Drought_Soil_Dry_P Parameter: Organism Value: A. thaliana
  misc_feature: MA Experiment 20001557 PARAMETER Experiment Name: At_Drought_Soil_Dry_P Parameter: Plant Line Value: WS
  misc_feature: MA Experiment 20001557 PARAMETER Experiment Name: At_Drought_Soil_Dry_P Parameter: Post Timepoint (hr) Value: 3
  misc_feature: MA Experiment 20001557 PARAMETER Experiment Name: At_Drought_Soil_Dry_P Parameter: Post-Treatment Value: Re-Water vs. No Drought
  misc_feature: MA Experiment 20001557 PARAMETER Experiment Name: At_Drought_Soil_Dry_P Parameter: Timepoint (day) Value: 13
  misc_feature: MA Experiment 20001557 PARAMETER Experiment Name: At_Drought_Soil_Dry_P Parameter: Treatment Value: Drought vs. No Drought
  misc_feature: MA Experiment ID: 20001558 Result: Down-regulated in Transcription
  misc_feature: MA Experiment 20001558 PARAMETER Experiment Name: At_Drought_Soil_Dry_P Parameter: Age (day) Value: 27
  misc_feature: MA Experiment 20001558 PARAMETER Experiment Name: At_Drought_Soil_Dry_P Parameter: Organism Value: A. thaliana
  misc_feature: MA Experiment 20001558 PARAMETER Experiment Name: At_Drought_Soil_Dry_P Parameter: Plant Line Value: WS
  misc_feature: MA Experiment 20001558 PARAMETER Experiment Name: At_Drought_Soil_Dry_P Parameter: Post Timepoint (hr) Value: 6
  misc_feature: MA Experiment 20001558 PARAMETER Experiment Name: At_Drought_Soil_Dry_P Parameter: Post-Treatment Value: Re-Water vs. No Drought
  misc_feature: MA Experiment 20001558 PARAMETER Experiment Name: At_Drought_Soil_Dry_P Parameter: Timepoint (day) Value: 13
  misc_feature: MA Experiment 20001558 PARAMETER Experiment Name: At_Drought_Soil_Dry_P Parameter: Treatment Value: Drought vs. No Drought
  misc_feature: MA Experiment ID: 20001757 Result: Down-regulated in Transcription
  misc_feature: MA Experiment 20001757 PARAMETER Experiment Name: At_50mM_NH4NO3_L-to-H_P Parameter: Timepoint (hr) Value: 6
  misc_feature: MA Experiment 20001757 PARAMETER Experiment Name: At_50mM_NH4NO3_L-to-H_P Parameter: Tissue Value: Leaf
  misc_feature: MA Experiment 20001757 PARAMETER Experiment Name: At_50mM_NH4NO3_L-to-H_P Parameter: Treatment Value: 50mM NH4NO3 vs 100mM Mannitol
  misc_feature: MA Experiment ID: 20001807 Result: Down-regulated in Transcription
  misc_feature: MA Experiment 20001807 PARAMETER Experiment Name: At_50mM_NH4NO3_L-to-H_Sub_P Parameter: Timepoint (hr) Value: 6
  misc_feature: MA Experiment 20001807 PARAMETER Experiment Name: At_50mM_NH4NO3_L-to-H_Sub_P Parameter: Tissue Value: Leaf
  misc_feature: MA Experiment 20001807 PARAMETER Experiment Name: At_50mM_NH4NO3_L-to-H_Sub_P Parameter: Treatment Value: 50mM NH4NO3 vs 100mM Mannitol
atggctgatagttgttgtatcagacttcacttattagcctctgttttcttgctcttattttcatccttcaacttgcagggtattgcagcggaaaatctttccaagcagaaactgacctcactgattcttcagaatgagattgtaaaggaagtcaatgagaatccaaacgctggttggaaagctgctttcaatgatcggtttgcaaatgccaccgttgcagagtttaagcgactcctcggtgttatacaaacaccaaagacggcatacttaggtgtacctattgtaagacatgatttatcgttgaagcttcctaaagaatttgatgctagaaccgcttggtcacattgcaccagtattcgaaggatcttagtgggttatatattgaacaatgtgttactctggtcgacgataactttatggttttggtttcttttgggtcattgtggttcttgctgggcatttggtgctgttgaatcactgtccgacaggttctgcatcaaatataacttgaatgtttccttatctgccaatgatgtcatagcatgttgtggattactttgcggttttggttgtaatggtggtttcccaatgggtgcatggttgtactttaagtaccacggtgtagtaacccaagagtgtgatccatactttgacaatactggttgctctcacccgggatgtgaacccacttaccctacaccaaaatgtgagaggaaatgtgtaagcagaaaccagctatggggtgaatcaaaacactatggtgtcggcgcatacagaatcaatcctgaccctcaagacattatggctgaggtttacaagaatggacctgtcgaggttgcttttaccgtttacgaggactttgcacattacaaatcaggagtatacaagtacataacgggtactaagattggaggtcatgcagttaagctcattggctggggaacttctgatgacggcgaagattattggttgcttgcaaatcaatggaaccgaagctggggtgatgatggttacttcaagatcaggagaggaacgaacgaatgtggcattgaacagagtgttgtagctggtttaccttcagagaagaacgtatttaaaggtattaccacttcagatgatcttctggtttcctcagtctaaacaagacgatgtgtccctacttctgtaatatatcatttgcaactgtgttgtaagtttaatataccattgaaagaatcaccttcaatcaaaacaaaagtatgtatagcttctgttaatattcaattttacatgttaccatgcaagaggactgttacagtgtttatttggttttggtaaattatagccacc

SEQ ID NO: 38327 - protein, 379 aa, Arabidopsis thaliana
  peptide (1)..(379): Ceres Seq. ID no. 13619168
  misc_feature (144)..(358): Pfam Name: Papain family cysteine protease Pfam Description: Papain family cysteine protease
  misc_feature (146)..(375): Homolog of NCBI NO: 609175 NR Description: cathepsin B-like cysteine proteinase [Nicotiana
  misc_feature (12)..(123): Homolog of NCBI NO: 18411686 NR Description: cathepsin B-like cysteine protease, putative
  misc_feature (146)..(379): Homolog of NCBI NO: 18411686 NR Description: cathepsin B-like cysteine protease, putative
  misc_feature (12)..(123): Homolog of NCBI NO: 30678927 NR Description: cathepsin B-like cysteine protease, putative
  misc_feature (145)..(379): Homolog of NCBI NO: 30678927 NR Description: cathepsin B-like cysteine protease, putative
  misc_feature (1)..(123): Homolog of NCBI NO: 18378947 NR Description: expressed protein [Arabidopsis thaliana]
  misc_feature (146)..(378): Homolog of NCBI NO: 18378947 NR Description: expressed protein [Arabidopsis thaliana]
  misc_feature (1)..(123): Homolog of NCBI NO: 2317912 NR Description: cathepsin B-like cysteine proteinase [Arabidopsis
  misc_feature (144)..(379): Homolog of NCBI NO: 2317912 NR Description: cathepsin B-like cysteine proteinase [Arabidopsis
  misc_feature (1)..(379): Homolog of NCBI NO: 18378945 NR Description: cathepsin B-like cysteine protease, putative
MADSCCIRLHLLASVFLLLFSSFNLQGIAAENLSKQKLTSLILQNEIVKEVNENPNAGWKAAFNDRFANATVAEFKRLLGVIQTPKTAYLGVPIVRHDLSLKLPKEFDARTAWSHCTSIRRILVGYILNNVLLWSTITLWFWFLLGHCGSCWAFGAVESLSDRFCIKYNLNVSLSANDVIACCGLLCGFGCNGGFPMGAWLYFKYHGVVTQECDPYFDNTGCSHPGCEPTYPTPKCERKCVSRNQLWGESKHYGVGAYRINPDPQDIMAEVYKNGPVEVAFTVYEDFAHYKSGVYKYITGTKIGGHAVKLIGWGTSDDGEDYWLLANQWNRSWGDDGYFKIRRGTNECGIEQSVVAGLPSEKNVFKGITTSDDLLVSSV

SEQ ID NO: 38328 - DNA, 1349 bp, Arabidopsis thaliana
  misc_feature (1)..(1349): Ceres Seq. ID no. 13592504
  misc_feature: MA Experiment ID: 108434 Result: Up-regulated in Transcription
  misc_feature: MA Experiment 108434 PARAMETER Experiment Name: At_Root_Tips_cDNA_P Parameter: Tissue Value: Root Tips
  misc_feature: MA Experiment ID: 20001247 Result: Up-regulated in Transcription
  misc_feature: MA Experiment 20001247 PARAMETER Experiment Name: At_Far-red-induction_P Parameter: Age (day) Value: 7
  misc_feature: MA Experiment 20001247 PARAMETER Experiment Name: At_Far-red-induction_P Parameter: Light Value: Far-red vs. White
  misc_feature: MA Experiment 20001247 PARAMETER Experiment Name: At_Far-red-induction_P Parameter: Organism Value: A. thaliana
  misc_feature: MA Experiment 20001247 PARAMETER Experiment Name: At_Far-red-induction_P Parameter: Plant Line Value: Columbia
  misc_feature: MA Experiment 20001247 PARAMETER Experiment Name: At_Far-red-induction_P Parameter: Timepoint (hr) Value: 1
  misc_feature: MA Experiment 20001247 PARAMETER Experiment Name: At_Far-red-induction_P Parameter: Tissue Value: Whole Plant
ggacggagcttcacatcgccgagagcttcgtcacgagatccatggcggccatttctcctctcttccttctcttcctcattcccattatcccactatcgcttctcgctatcttagccctaattgtacgtcctcgtcccattaagatccctatcaagtcccgtcacgtcttcatcaccggtggatctagcggcatcggtcttgctctcgcccaccgcgccgcttccgagggcgctcgtgtctcaatcctcgcccgatccggatcaaagctcgaggaggctaagaaatcgatccagctcgccactggtgtcgaagtcgccacattctctgcagacgttcgcgattacgatgcagtctcgaaggcgatagatgaatcgggaccgatcgatgtgttgattgttaaccaaggtgtgtttacggcgcaggagctggtgaaacatagtcctgaagatgtcaaattcacgattgacgtaaatctttttgggagcttcaatgtgattaaagccgctttgcctgccatgaaagcaaggaaagatcgtggacctgcttccatcagtctcgtctcctctcaagctggtcaggttggtgtctatggttatgctgcatattcagcaagcaagtttggtcttcagggtttagcgcaagcattgcaacaggaagttatatctgatgatattcatgtcactcttatttttcctcctgacactaatacacccggctttgaagaagaacagaagagcagacctgaagtcactgccataatagctgcatcctctggttcaatggaaacagaagaagtagcaaaaaaggctatggatggcataaaagcaggaaacttcaccgtctcatgcaactttgagggattcttactgtctctcgcgacaaccggcatgtcccctcaaagatcattttggcttgcttttcttgaagtttataaccgcagggcctataagattaatcgctctcttctttcaatgggattggtataaagccattgaaaaatggagcaaaaccaaaaccaaatgacagcccgacaatgtatcttgaagtgcttttggcagaagcttaaacattgatgggtattctcaaaccttcttctcagtccggtaccacgccagctagtcgactataccaattcagaatatcgacattgctgatagttttgtagaaactcgtcaagattcatgtttccggtctttgaacaagctctgttttttcttttttttatagagaaatcaaagaactcatttgaatgtattttttacttggtcaagaagtgaatgtttttcacaagatgaaatgtaaatgatgtatttgaaagaagtaaaaacttcaaaaccaaaatttgagtg

SEQ ID NO: 38329 - protein, 327 aa, Arabidopsis thaliana
  peptide (1)..(327): Ceres Seq. ID no. 13592505
  misc_feature (54)..(303): Homolog of NCBI NO: 15964328 NR Description: RIBITOL TYPE DEHYDROGENASE PROTEIN [Sinorhizobium
  misc_feature (23)..(308): Homolog of NCBI NO: 39583655 NR Description: Hypothetical protein CBG08294 [Caenorhabditis
  misc_feature (22)..(307): Homolog of NCBI NO: 21356301 NR Description: CG10425-PA [Drosophila melanogaster]
  misc_feature (33)..(301): Homolog of NCBI NO: 34878781 NR Description: similar to 6330410P18Rik protein [Rattus
  misc_feature (24)..(301): Homolog of NCBI NO: 30585239 NR Description: Homo sapiens follicular lymphoma variant
  misc_feature (24)..(301): Homolog of NCBI NO: 4503817 NR Description: follicular lymphoma variant translocation 1 [Homo
  misc_feature (33)..(301): Homolog of NCBI NO: 27882572 NR Description: Similar to follicular lymphoma variant
  misc_feature (14)..(309): Homolog of NCBI NO: 15239681 NR Description: short-chain dehydrogenase/reductase family
  misc_feature (14)..(309): Homolog of NCBI NO: 30679701 NR Description: short-chain dehydrogenase/reductase family
  misc_feature (14)..(309): Homolog of NCBI NO: 7658344 NR Description: unknown protein; 15741-13972 [Arabidopsis
  misc_feature (54)..(303): Homolog of NCBI NO: 15964328 NR Description: RIBITOL TYPE DEHYDROGENASE PROTEIN [Sinorhizobium
  misc_feature (23)..(308): Homolog of NCBI NO: 39583655 NR Description: Hypothetical protein CBG08294 [Caenorhabditis
  misc_feature (22)..(307): Homolog of NCBI NO: 21356301 NR Description: CG10425-PA [Drosophila melanogaster]
  misc_feature (33)..(301): Homolog of NCBI NO: 34878781 NR Description: similar to 6330410P18Rik protein [Rattus
  misc_feature (24)..(301): Homolog of NCBI NO: 30585239 NR Description: Homo sapiens follicular lymphoma variant
  misc_feature (24)..(301): Homolog of NCBI NO: 4503817 NR Description: follicular lymphoma variant translocation 1 [Homo
  misc_feature (33)..(301): Homolog of NCBI NO: 27882572 NR Description: Similar to follicular lymphoma variant
  misc_feature (14)..(309): Homolog of NCBI NO: 15239681 NR Description: short-chain dehydrogenase/reductase family
  misc_feature (14)..(309): Homolog of NCBI NO: 30679701 NR Description: short-chain dehydrogenase/reductase family
  misc_feature (14)..(309): Homolog of NCBI NO: 7658344 NR Description: unknown protein; 15741-13972 [Arabidopsis
TELHIAESFVTRSMAAISPLFLLFLIPIIPLSLLAILALIVRPRPIKIPIKSRHVFITGGSSGIGLALAHRAASEGARVSILARSGSKLEEAKKSIQLATGVEVATFSADVRDYDAVSKAIDESGPIDVLIVNQGVFTAQELVKHSPEDVKFTIDVNLFGSFNVIKAALPAMKARKDRGPASISLVSSQAGQVGVYGYAAYSASKFGLQGLAQALQQEVISDDIHVTLIFPPDTNTPGFEEEQKSRPEVTAIIAASSGSMETEEVAKKAMDGIKAGNFTVSCNFEGFLLSLATTGMSPQRSFWLAFLEVYNRRAYKINRSLLSMGLV

SEQ ID NO: 38330 - protein, 314 aa, Arabidopsis thaliana
  peptide (1)..(314): Ceres Seq. ID no. 13592506
  misc_feature (41)..(290): Homolog of NCBI NO: 15964328 NR Description: RIBITOL TYPE DEHYDROGENASE PROTEIN [Sinorhizobium
  misc_feature (10)..(295): Homolog of NCBI NO: 39583655 NR Description: Hypothetical protein CBG08294 [Caenorhabditis
  misc_feature (9)..(294): Homolog of NCBI NO: 21356301 NR Description: CG10425-PA [Drosophila melanogaster]
  misc_feature (20)..(288): Homolog of NCBI NO: 34878781 NR Description: similar to 6330410P18Rik protein [Rattus
  misc_feature (11)..(288): Homolog of NCBI NO: 30585239 NR Description: Homo sapiens follicular lymphoma variant
  misc_feature (11)..(288): Homolog of NCBI NO: 4503817 NR Description: follicular lymphoma variant translocation 1 [Homo
  misc_feature (20)..(288): Homolog of NCBI NO: 27882572 NR Description: Similar to follicular lymphoma variant
  misc_feature (1)..(296): Homolog of NCBI NO: 15239681 NR Description: short-chain dehydrogenase/reductase family
  misc_feature (1)..(296): Homolog of NCBI NO: 30679701 NR Description: short-chain dehydrogenase/reductase family
  misc_feature (1)..(296): Homolog of NCBI NO: 7658344 NR Description: unknown protein; 15741-13972 [Arabidopsis
  misc_feature (41)..(290): Homolog of NCBI NO: 15964328 NR Description: RIBITOL TYPE DEHYDROGENASE PROTEIN [Sinorhizobium
  misc_feature (10)..(295): Homolog of NCBI NO: 39583655 NR Description: Hypothetical protein CBG08294 [Caenorhabditis
  misc_feature (9)..(294): Homolog of NCBI NO: 21356301 NR Description: CG10425-PA [Drosophila melanogaster]
  misc_feature (20)..(288): Homolog of NCBI NO: 34878781 NR Description: similar to 6330410P18Rik protein [Rattus
  misc_feature (11)..(288): Homolog of NCBI NO: 30585239 NR Description: Homo sapiens follicular lymphoma variant
  misc_feature (11)..(288): Homolog of NCBI NO: 4503817 NR Description: follicular lymphoma variant translocation 1 [Homo
  misc_feature (20)..(288): Homolog of NCBI NO: 27882572 NR Description: Similar to follicular lymphoma variant
  misc_feature (1)..(296): Homolog of NCBI NO: 15239681 NR Description: short-chain dehydrogenase/reductase family
  misc_feature (1)..(296): Homolog of NCBI NO: 30679701 NR Description: short-chain dehydrogenase/reductase family
  misc_feature (1)..(296): Homolog of NCBI NO: 7658344 NR Description: unknown protein; 15741-13972 [Arabidopsis
MAAISPLFLLFLIPIIPLSLLAILALIVRPRPIKIPIKSRHVFITGGSSGIGLALAHRAASEGARVSILARSGSKLEEAKKSIQLATGVEVATFSADVRDYDAVSKAIDESGPIDVLIVNQGVFTAQELVKHSPEDVKFTIDVNLFGSFNVIKAALPAMKARKDRGPASISLVSSQAGQVGVYGYAAYSASKFGLQGLAQALQQEVISDDIHVTLIFPPDTNTPGFEEEQKSRPEVTAIIAASSGSMETEEVAKKAMDGIKAGNFTVSCNFEGFLLSLATTGMSPQRSFWLAFLEVYNRRAYKINRSLLSMGLV

SEQ ID NO: 38331 - DNA, 610 bp, Arabidopsis thaliana
  misc_feature (1)..(610): Ceres Seq. ID no. 12326739
  misc_feature: MA Experiment ID: 108595 Result: Up-regulated in Transcription
  misc_feature: MA Experiment 108595 PARAMETER Experiment Name: At_Ler-pi_Ovule_cDNA_P Parameter: Plant Line Value: null
aaccgactcttctaatctctgcgatcgtacatcagaaacctctatctcatcgccgaggaaaacagatcttacaatggctattaacaccatcacgaacgaagaagatgatgcatcaaacaactttggatgcaatatctgtcttgaattggcaagagaaccgatcgtgactctatgtggtcatttgttctgttggccttgtctctacaagtggctccattaccattctaaatcaaatcattgtcctgtttgtaaagctttggttaaggaagatactttggttcctttgtatggaatgggtaagccatcttctgatccgagatcgaaactcaatagtggtgttactgtccctaatcgaccagctgcgactaggactgaaacagctcgacctcgtcttgaacaaagacatcatgggtctagtttctttggtgggcattcaagttttgctgccatgccaactggtttacggttttcaaacttcttgttgtaatggaaagtatcttttgatgaatctgagtctgtttttttgacaatgtttttgaaactattattatacattgtctacgatttttgttattttgacaattaatgtttagagctacatttacattcc

SEQ ID NO: 38332 - protein, 161 aa, Arabidopsis thaliana
  peptide (1)..(161): Ceres Seq. ID no. 12326740
  misc_feature (43)..(83): Pfam Name: Zinc finger, C3HC4 type (RING finger) Pfam Description: Zinc finger, C3HC4 type (RING finger)
  misc_feature (31)..(145): Homolog of NCBI NO: 21912604 NR Description: putative ubiquitin ligase [Taenia solium]
  misc_feature (26)..(121): Homolog of NCBI NO: 22795037 NR Description: putative RING protein [Populus x canescens]
  misc_feature (24)..(161): Homolog of NCBI NO: 31215747 NR Description: ENSANGP00000012621 [Anopheles gambiae]
  misc_feature (11)..(133): Homolog of NCBI NO: 34905296 NR Description: P0577B11.19 [Oryza sativa (japonica
  misc_feature (35)..(158): Homolog of NCBI NO: 29150403 NR Description: unknown protein [Oryza sativa (japonica
  misc_feature (38)..(159): Homolog of NCBI NO: 34909840 NR Description: P0403C05.28 [Oryza sativa (japonica
  misc_feature (32)..(159): Homolog of NCBI NO: 21553849 NR Description: putative RING zinc finger protein [Arabidopsis
  misc_feature (32)..(159): Homolog of NCBI NO: 15224062 NR Description: putative RING zinc finger protein
  misc_feature (31)..(161): Homolog of NCBI NO: 18394721 NR Description: expressed protein
  misc_feature (25)..(161): Homolog of NCBI NO: 15222064 NR Description: putative RING zinc finger protein
TDSSNLCDRTSETSISSPRKTDLTMAINTITNEEDDASNNFGCNICLELAREPIVTLCGHLFCWPCLYKWLHYHSKSNHCPVCKALVKEDTLVPLYGMGKPSSDPRSKLNSGVTVPNRPAATRTETARPRLEQRHHGSSFFGGHSSFAAMPTGLRFSNFLL

SEQ ID NO: 38333 - protein, 137 aa, Arabidopsis thaliana
  peptide (1)..(137): Ceres Seq. ID no. 12326741
  misc_feature (19)..(59): Pfam Name: Zinc finger, C3HC4 type (RING finger) Pfam Description: Zinc finger, C3HC4 type (RING finger)
  misc_feature (7)..(121): Homolog of NCBI NO: 21912604 NR Description: putative ubiquitin ligase [Taenia solium]
  misc_feature (2)..(97): Homolog of NCBI NO: 22795037 NR Description: putative RING protein [Populus x canescens]
  misc_feature (1)..(137): Homolog of NCBI NO: 31215747 NR Description: ENSANGP00000012621 [Anopheles gambiae]
  misc_feature (1)..(109): Homolog of NCBI NO: 34905296 NR Description: P0577B11.19 [Oryza sativa (japonica
  misc_feature (11)..(134): Homolog of NCBI NO: 29150403 NR Description: unknown protein [Oryza sativa (japonica
  misc_feature (14)..(135): Homolog of NCBI NO: 34909840 NR Description: P0403C05.28 [Oryza sativa (japonica
  misc_feature (8)..(135): Homolog of NCBI NO: 21553849 NR Description: putative RING zinc finger protein [Arabidopsis
  misc_feature (8)..(135): Homolog of NCBI NO: 15224062 NR Description: putative RING zinc finger protein
  misc_feature (7)..(137): Homolog of NCBI NO: 18394721 NR Description: expressed protein
  misc_feature (1)..(137): Homolog of NCBI NO: 15222064 NR Description: putative RING zinc finger protein
MAINTITNEEDDASNNFGCNICLELAREPIVTLCGHLFCWPCLYKWLHYHSKSNHCPVCKALVKEDTLVPLYGMGKPSSDPRSKLNSGVTVPNRPAATRTETARPRLEQRHHGSSFFGGHSSFAAMPTGLRFSNFLL

SEQ ID NO: 38334 - DNA, 1669 bp, Arabidopsis thaliana
  misc_feature (1)..(1669): Ceres Seq. ID no. 13488602
  misc_feature: MA Experiment ID: 108434 Result: Up-regulated in Transcription
  misc_feature: MA Experiment 108434 PARAMETER Experiment Name: At_Root_Tips_cDNA_P Parameter: Tissue Value: Root Tips
  misc_feature: MA Experiment ID: 108462 Result: Down-regulated in Transcription
  misc_feature: MA Experiment 108462 PARAMETER Experiment Name: At_Germinating_Seeds_cDNA_P Parameter: Age (day) Value: 2 vs. 0
  misc_feature: MA Experiment 108462 PARAMETER Experiment Name: At_Germinating_Seeds_cDNA_P Parameter: Tissue Value: Germinating Seeds
  misc_feature: MA Experiment ID: 108463 Result: Down-regulated in Transcription
  misc_feature: MA Experiment 108463 PARAMETER Experiment Name: At_Germinating_Seeds_cDNA_P Parameter: Age (day) Value: 3 vs. 0
  misc_feature: MA Experiment 108463 PARAMETER Experiment Name: At_Germinating_Seeds_cDNA_P Parameter: Tissue Value: Germinating Seeds
  misc_feature: MA Experiment ID: 108464 Result: Down-regulated in Transcription
  misc_feature: MA Experiment 108464 PARAMETER Experiment Name: At_Germinating_Seeds_cDNA_P Parameter: Age (day) Value: 4 vs. 0
  misc_feature: MA Experiment 108464 PARAMETER Experiment Name: At_Germinating_Seeds_cDNA_P Parameter: Tissue Value: Germinating Seeds
  misc_feature: MA Experiment ID: 20000184 Result: Down-regulated in Transcription
  misc_feature: MA Experiment 20000184 PARAMETER Experiment Name: At_Shoots__P Parameter: Age (day) Value: 7
  misc_feature: MA Experiment 20000184 PARAMETER Experiment Name: At_Shoots__P Parameter: Tissue Value: Shoots vs. Whole Plant
cgatctcataacttagccattctaaaacccattcaccgtctctgtttcgttcgccgtgattcatagtcgtctcgtctcaccgtcaccatcaccgtcttcttcttccattgacaggatcttgtttagattctgcaatggctttcaggcaaactttatctataaggtccaggcttttcgctcgtcgtaaccaaccagtttatcatattatccctcgtgagagtgatcatgaaagggattcattctgtcaagaaacatctcagagaagttaccatagctttcttcaccaaagatccgttaacaattctgatttctccaaagtttctggaggaagcttacatttgcctcttgctcccacgtctggttttgctttctatcgttatatgtcaagtgcacctggtgttggttcagagaagattggtgtgatgtctgacattgcagaagtcataaccgactcaacattgcaagatgtgccagctcaggctgctgctgctgtcagtgaagttacacttgcagctgctgactctttcttccctatcgcggcccttcagcagtgcattgatatggtgcatacattcacaggctttgagtggtgggcatccattgttgtagcaaccattttgatccgatcatcaacagttcctctcttgatcaaacaaatgaaagacacaaccaagttagcgctgatgaggccacggttggagtccatccgggaggaaatgcaaaacaagggaatggactcggttacgatggcagaaggtcaaaaaaagatgaagaatttgtttaaagaatatggtgtcactccattcaccccaatgaaagggatgtttattcagggaccgctgttcatctgctttttccttgctattcgaaatatggcagagaaggtaccttcattccaaacaggaggtgcattatggtttaccgatctaacaactcccgacagcttatacatcttgccggttataacaggattgacattcttgataaccgttgagtgtaatgcacaagaaggcatggaagggaatccgatggctggcactgtaaaaactgtttgtcgggtttttgctctcctcacagtcccgatgacaatgagttttccacaggccatattttgttactggatcacatccaacctgttctctctcatgtatggacttgtgataaagcgtcctcaagtgaagaagatgttacgcatacctgatctgcctccacctcctccaggtcaacaaccttcatttgacctgttttcagctctcaagaaaatgaaagccatgacacaggaccatacacagaaccagatagaaccaccttcgccagtaaacccgaggctttcctcaacatcgctgagtcctgttagtaagaggctcaaggctttggagagccaagtaaagggaaggaagaagaatagcagcaagaagaagtgatttaaaacggtgcatactatttttgttaagagggccaaacgaaaaaaataataaagcttttgagtcgaaagtgaacacagaattttctcactgatgaaactactctgtgagctaaaaagctggaggcagctattgtaagtttgttttgaccaattatagaatagaagattgtttttatagaaacattttggataacatatacttttttatcttgttaagtaacagaacttgaacaacattggatc

SEQ ID NO: 38335 - protein, 429 aa, Arabidopsis thaliana
  peptide (1)..(429): Ceres Seq. ID no. 13488603
  misc_feature (151)..(348): Pfam Name: 60Kd inner membrane protein Pfam Description: 60Kd inner membrane protein
  misc_feature (74)..(390): Homolog of NCBI NO: 38372882 NR Description: Inner membrane protein OXA1L, mitochondrial (Oxidase assembly 1-like protein) (OXA1-like protein) (OXA1Hs)
  misc_feature (74)..(390): Homolog of NCBI NO: 37589026 NR Description: Oxidase (cytochrome c) assembly 1-like [Homo
  misc_feature (124)..(368): Homolog of NCBI NO: 19112969 NR Description: oxa1sp2 protein [Schizosaccharomyces pombe]
  misc_feature (124)..(368): Homolog of NCBI NO: 11359300 NR Description: respiratory protein oxa1-2 - fission yeast
  misc_feature (74)..(390): Homolog of NCBI NO: 28193182 NR Description: unnamed protein product [Homo sapiens]
  misc_feature (74)..(390): Homolog of NCBI NO: 4826880 NR Description: oxidase (cytochrome c) assembly 1-like [Homo
  misc_feature (1)..(428): Homolog of NCBI NO: 22122905 NR Description: putative cytochrome oxidase assembly protein
  misc_feature (1)..(429): Homolog of NCBI NO: 37536158 NR Description: putative Oxa1 protein [Oryza sativa (japonica
  misc_feature (10)..(422): Homolog of NCBI NO: 15225991 NR Description: OXA1 protein (OXA1p), putative [Arabidopsis
  misc_feature (1)..(429): Homolog of NCBI NO: 15241690 NR Description: OXA1 protein (OXA1p) [Arabidopsis thaliana]
MAFRQTLSIRSRLFARRNQPVYHIIPRESDHERDSFCQETSQRSYHSFLHQRSVNNSDFSKVSGGSLHLPLAPTSGFAFYRYMSSAPGVGSEKIGVMSDIAEVITDSTLQDVPAQAAAAVSEVTLAAADSFFPIAALQQCIDMVHTFTGFEWWASIVVATILIRSSTVPLLIKQMKDTTKLALMRPRLESIREEMQNKGMDSVTMAEGQKKMKNLFKEYGVTPFTPMKGMFIQGPLFICFFLAIRNMAEKVPSFQTGGALWFTDLTTPDSLYILPVITGLTFLITVECNAQEGMEGNPMAGTVKTVCRVFALLTVPMTMSFPQAIFCYWITSNLFSLMYGLVIKRPQVKKMLRIPDLPPPPPGQQPSFDLFSALKKMKAMTQDHTQNQIEPPSPVNPRLSSTSLSPVSKRLKALESQVKGRKKNSSKKK

SEQ ID NO: 38336 - protein, 347 aa, Arabidopsis thaliana
  peptide (1)..(347): Ceres Seq. ID no. 13488604
  misc_feature (69)..(266): Pfam Name: 60Kd inner membrane protein Pfam Description: 60Kd inner membrane protein
  misc_feature (1)..(308): Homolog of NCBI NO: 38372882 NR Description: Inner membrane protein OXA1L, mitochondrial (Oxidase assembly 1-like protein) (OXA1-like protein) (OXA1Hs)
  misc_feature (1)..(308): Homolog of NCBI NO: 37589026 NR Description: Oxidase (cytochrome c) assembly 1-like [Homo
  misc_feature (42)..(286): Homolog of NCBI NO: 19112969 NR Description: oxa1sp2 protein [Schizosaccharomyces pombe]
  misc_feature (42)..(286): Homolog of NCBI NO: 11359300 NR Description: respiratory protein oxa1-2 - fission yeast
  misc_feature (1)..(308): Homolog of NCBI NO: 28193182 NR Description: unnamed protein product [Homo sapiens]
  misc_feature (1)..(308): Homolog of NCBI NO: 4826880 NR Description: oxidase (cytochrome c) assembly 1-like [Homo
  misc_feature (1)..(346): Homolog of NCBI NO: 22122905 NR Description: putative cytochrome oxidase assembly protein
  misc_feature (1)..(347): Homolog of NCBI NO: 37536158 NR Description: putative Oxa1 protein [Oryza sativa (japonica
  misc_feature (1)..(340): Homolog of NCBI NO: 15225991 NR Description: OXA1 protein (OXA1p), putative [Arabidopsis
  misc_feature (1)..(347): Homolog of NCBI NO: 15241690 NR Description: OXA1 protein (OXA1p) [Arabidopsis thaliana]
MSSAPGVGSEKIGVMSDIAEVITDSTLQDVPAQAAAAVSEVTLAAADSFFPIAALQQCIDMVHTFTGFEWWASIVVATILIRSSTVPLLIKQMKDTTKLALMRPRLESIREEMQNKGMDSVTMAEGQKKMKNLFKEYGVTPFTPMKGMFIQGPLFICFFLAIRNMAEKVPSFQTGGALWFTDLTTPDSLYILPVITGLTFLITVECNAQEGMEGNPMAGTVKTVCRVFALLTVPMTMSFPQAIFCYWITSNLFSLMYGLVIKRPQVKKMLRIPDLPPPPPGQQPSFDLFSALKKMKAMTQDHTQNQIEPPSPVNPRLSSTSLSPVSKRLKALESQVKGRKKNSSKKK

SEQ ID NO: 38337 - protein, 333 aa, Arabidopsis thaliana
  peptide (1)..(333): Ceres Seq. ID no. 13488605
  misc_feature (55)..(252): Pfam Name: 60Kd inner membrane protein Pfam Description: 60Kd inner membrane protein
  misc_feature (1)..(294): Homolog of NCBI NO: 38372882 NR Description: Inner membrane protein OXA1L, mitochondrial (Oxidase assembly 1-like protein) (OXA1-like protein) (OXA1Hs)
  misc_feature (1)..(294): Homolog of NCBI NO: 37589026 NR Description: Oxidase (cytochrome c) assembly 1-like [Homo
  misc_feature (28)..(272): Homolog of NCBI NO: 19112969 NR Description: oxa1sp2 protein [Schizosaccharomyces pombe]
  misc_feature (28)..(272): Homolog of NCBI NO: 11359300 NR Description: respiratory protein oxa1-2 - fission yeast
  misc_feature (1)..(294): Homolog of NCBI NO: 28193182 NR Description: unnamed protein product [Homo sapiens]
  misc_feature (1)..(294): Homolog of NCBI NO: 4826880 NR Description: oxidase (cytochrome c) assembly 1-like [Homo
  misc_feature (1)..(332): Homolog of NCBI NO: 22122905 NR Description: putative cytochrome oxidase assembly protein
  misc_feature (1)..(333): Homolog of NCBI NO: 37536158 NR Description: putative Oxa1 protein [Oryza sativa (japonica
  misc_feature (1)..(326): Homolog of NCBI NO: 15225991 NR Description: OXA1 protein (OXA1p), putative [Arabidopsis
  misc_feature (1)..(333): Homolog of NCBI NO: 15241690 NR Description: OXA1 protein (OXA1p) [Arabidopsis thaliana]
MSDIAEVITDSTLQDVPAQAAAAVSEVTLAAADSFFPIAALQQCIDMVHTFTGFEWWASIVVATILIRSSTVPLLIKQMKDTTKLALMRPRLESIREEMQNKGMDSVTMAEGQKKMKNLFKEYGVTPFTPMKGMFIQGPLFICFFLAIRNMAEKVPSFQTGGALWFTDLTTPDSLYILPVITGLTFLITVECNAQEGMEGNPMAGTVKTVCRVFALLTVPMTMSFPQAIFCYWITSNLFSLMYGLVIKRPQVKKMLRIPDLPPPPPGQQPSFDLFSALKKMKAMTQDHTQNQIEPPSPVNPRLSSTSLSPVSKRLKALESQVKGRKKNSSKKK

SEQ ID NO: 38338 - DNA, 1540 bp, Arabidopsis thaliana
  misc_feature (1)..(1540): Ceres Seq. ID no. 13574941
  misc_feature: MA Experiment ID: 20000184 Result: Up-regulated in Transcription
  misc_feature: MA Experiment 20000184 PARAMETER Experiment Name: At_Shoots__P Parameter: Age (day) Value: 7
  misc_feature: MA Experiment 20000184 PARAMETER Experiment Name: At_Shoots__P Parameter: Tissue Value: Shoots vs. Whole Plant
  misc_feature: MA Experiment ID: 20000268 Result: Down-regulated in Transcription
  misc_feature: MA Experiment 20000268 PARAMETER Experiment Name: At_100mM_NaCl__P Parameter: Age (day) Value: 14
  misc_feature: MA Experiment 20000268 PARAMETER Experiment Name: At_100mM_NaCl__P Parameter: Organism Value: A. thaliana
  misc_feature: MA Experiment 20000268 PARAMETER Experiment Name: At_100mM_NaCl__P Parameter: Plant Line Value: WS
  misc_feature: MA Experiment 20000268 PARAMETER Experiment Name: At_100mM_NaCl__P Parameter: Timepoint (hr) Value: 6
  misc_feature: MA Experiment 20000268 PARAMETER Experiment Name: At_100mM_NaCl__P Parameter: Tissue Value: Whole Plant
  misc_feature: MA Experiment 20000268 PARAMETER Experiment Name: At_100mM_NaCl__P Parameter: Treatment Value: 100mM NaCl vs. No Treatment
  misc_feature: MA Experiment ID: 20000436 Result: Down-regulated in Transcription
  misc_feature: MA Experiment 20000436 PARAMETER Experiment Name: At_Drought_P Parameter: Age (day) Value: 7
  misc_feature: MA Experiment 20000436 PARAMETER Experiment Name: At_Drought_P Parameter: Organism Value: A. thaliana
  misc_feature: MA Experiment 20000436 PARAMETER Experiment Name: At_Drought_P Parameter: Plant Line Value: WS
  misc_feature: MA Experiment 20000436 PARAMETER Experiment Name: At_Drought_P Parameter: Timepoint (hr) Value: 12
  misc_feature: MA Experiment 20000436 PARAMETER Experiment Name: At_Drought_P Parameter: Tissue Value: Whole Plant
  misc_feature: MA Experiment 20000436 PARAMETER Experiment Name: At_Drought_P Parameter: Treatment Value: Drought vs. No Drought
  misc_feature: MA Experiment ID: 20000437 Result: Down-regulated in Transcription
  misc_feature: MA Experiment 20000437 PARAMETER Experiment Name: At_Drought_P Parameter: Age (day) Value: 8
  misc_feature: MA Experiment 20000437 PARAMETER Experiment Name: At_Drought_P Parameter: Organism Value: A. thaliana
  misc_feature: MA Experiment 20000437 PARAMETER Experiment Name: At_Drought_P Parameter: Plant Line Value: WS
  misc_feature: MA Experiment 20000437 PARAMETER Experiment Name: At_Drought_P Parameter: Timepoint (hr) Value: 24
  misc_feature: MA Experiment 20000437 PARAMETER Experiment Name: At_Drought_P Parameter: Tissue Value: Whole Plant
  misc_feature: MA Experiment 20000437 PARAMETER Experiment Name: At_Drought_P Parameter: Treatment Value: Drought vs. No Drought
  misc_feature: MA Experiment ID: 20000439 Result: Down-regulated in Transcription
  misc_feature: MA Experiment 20000439 PARAMETER Experiment Name: At_Roots__P Parameter: Age (day) Value: 14 vs. 21
  misc_feature: MA Experiment 20000439 PARAMETER Experiment Name: At_Roots__P Parameter: Organism Value: A. thaliana
  misc_feature: MA Experiment 20000439 PARAMETER Experiment Name: At_Roots__P Parameter: Tissue Value: Roots vs. Whole Plant
  misc_feature: MA Experiment ID: 20001247 Result: Up-regulated in Transcription
  misc_feature: MA Experiment 20001247 PARAMETER Experiment Name: At_Far-red-induction_P Parameter: Age (day) Value: 7
  misc_feature: MA Experiment 20001247 PARAMETER Experiment Name: At_Far-red-induction_P Parameter: Light Value: Far-red vs. White
  misc_feature: MA Experiment 20001247 PARAMETER Experiment Name: At_Far-red-induction_P Parameter: Organism Value: A. thaliana
  misc_feature: MA Experiment 20001247 PARAMETER Experiment Name: At_Far-red-induction_P Parameter: Plant Line Value: Columbia
  misc_feature: MA Experiment 20001247 PARAMETER Experiment Name: At_Far-red-induction_P Parameter: Timepoint (hr) Value: 1
  misc_feature: MA Experiment 20001247 PARAMETER Experiment Name: At_Far-red-induction_P Parameter: Tissue Value: Whole Plant
  misc_feature: MA Experiment ID: 20001450 Result: Up-regulated in Transcription
  misc_feature: MA Experiment 20001450 PARAMETER Experiment Name: At_Far-red-induction_P Parameter: Age (day) Value: 7
  misc_feature: MA Experiment 20001450 PARAMETER Experiment Name: At_Far-red-induction_P Parameter: Light Value: Far-red vs. White
  misc_feature: MA Experiment 20001450 PARAMETER Experiment Name: At_Far-red-induction_P Parameter: Organism Value: A. thaliana
  misc_feature: MA Experiment 20001450 PARAMETER Experiment Name: At_Far-red-induction_P Parameter: Plant Line Value: Columbia
  misc_feature: MA Experiment 20001450 PARAMETER Experiment Name: At_Far-red-induction_P Parameter: Timepoint (hr) Value: 8
  misc_feature: MA Experiment 20001450 PARAMETER Experiment Name: At_Far-red-induction_P Parameter: Tissue Value: Whole Plant
  misc_feature: MA Experiment ID: 20001451 Result: Up-regulated in Transcription
  misc_feature: MA Experiment 20001451 PARAMETER Experiment Name: At_Far-red-induction_P Parameter: Age (day) Value: 7
  misc_feature: MA Experiment 20001451 PARAMETER Experiment Name: At_Far-red-induction_P Parameter: Light Value: Far-red vs. White
  misc_feature: MA Experiment 20001451 PARAMETER Experiment Name: At_Far-red-induction_P Parameter: Organism Value: A. thaliana
  misc_feature: MA Experiment 20001451 PARAMETER Experiment Name: At_Far-red-induction_P Parameter: Plant Line Value: Columbia
  misc_feature: MA Experiment 20001451 PARAMETER Experiment Name: At_Far-red-induction_P Parameter: Timepoint (hr) Value: 24
  misc_feature: MA Experiment 20001451 PARAMETER Experiment Name: At_Far-red-induction_P Parameter: Tissue Value: Whole Plant
  misc_feature: MA Experiment ID: 20001554 Result: Down-regulated in Transcription
  misc_feature: MA Experiment 20001554 PARAMETER Experiment Name: At_Drought_Soil_Dry_P Parameter: Age (day) Value: 21
  misc_feature: MA Experiment 20001554 PARAMETER Experiment Name: At_Drought_Soil_Dry_P Parameter: Organism Value: A. thaliana
  misc_feature: MA Experiment 20001554 PARAMETER Experiment Name: At_Drought_Soil_Dry_P Parameter: Plant Line Value: WS
  misc_feature: MA Experiment 20001554 PARAMETER Experiment Name: At_Drought_Soil_Dry_P Parameter: Post Timepoint (hr) Value: None
  misc_feature: MA Experiment 20001554 PARAMETER Experiment Name: At_Drought_Soil_Dry_P Parameter: Post-Treatment Value: None
  misc_feature: MA Experiment 20001554 PARAMETER Experiment Name: At_Drought_Soil_Dry_P Parameter: Timepoint (day) Value: 7
  misc_feature: MA Experiment 20001554 PARAMETER Experiment Name: At_Drought_Soil_Dry_P Parameter: Treatment Value: Drought vs. No Drought
  misc_feature: MA Experiment ID: 20001555 Result: Down-regulated in Transcription
  misc_feature: MA Experiment 20001555 PARAMETER Experiment Name: At_Drought_Soil_Dry_P Parameter: Age (day) Value: 24
  misc_feature: MA Experiment 20001555 PARAMETER Experiment Name: At_Drought_Soil_Dry_P Parameter: Organism Value: A. thaliana
  misc_feature: MA Experiment 20001555 PARAMETER Experiment Name: At_Drought_Soil_Dry_P Parameter: Plant Line Value: WS
  misc_feature: MA Experiment 20001555 PARAMETER Experiment Name: At_Drought_Soil_Dry_P Parameter: Post Timepoint (hr) Value: None
  misc_feature: MA Experiment 20001555 PARAMETER Experiment Name: At_Drought_Soil_Dry_P Parameter: Post-Treatment Value: None
  misc_feature: MA Experiment 20001555 PARAMETER Experiment Name: At_Drought_Soil_Dry_P Parameter: Timepoint (day) Value: 10
  misc_feature: MA Experiment 20001555 PARAMETER Experiment Name: At_Drought_Soil_Dry_P Parameter: Treatment Value: Drought vs. No Drought
  misc_feature: MA Experiment ID: 20001556 Result: Down-regulated in Transcription
  misc_feature: MA Experiment 20001556 PARAMETER Experiment Name: At_Drought_Soil_Dry_P Parameter: Age (day) Value: 26
  misc_feature: MA Experiment 20001556 PARAMETER Experiment Name: At_Drought_Soil_Dry_P Parameter: Organism Value: A. thaliana
  misc_feature: MA Experiment 20001556 PARAMETER Experiment Name: At_Drought_Soil_Dry_P Parameter: Plant Line Value: WS
  misc_feature: MA Experiment 20001556 PARAMETER Experiment Name: At_Drought_Soil_Dry_P Parameter: Post Timepoint (hr) Value: None
  misc_feature: MA Experiment 20001556 PARAMETER Experiment Name: At_Drought_Soil_Dry_P Parameter: Post-Treatment Value: None
  misc_feature: MA Experiment 20001556 PARAMETER Experiment Name: At_Drought_Soil_Dry_P Parameter: Timepoint (day) Value: 12
  misc_feature: MA Experiment 20001556 PARAMETER Experiment Name: At_Drought_Soil_Dry_P Parameter: Treatment Value: Drought vs. No Drought
  misc_feature: MA Experiment ID: 20001558 Result: Up-regulated in Transcription
  misc_feature: MA Experiment 20001558 PARAMETER Experiment Name: At_Drought_Soil_Dry_P Parameter: Age (day) Value: 27
  misc_feature: MA Experiment 20001558 PARAMETER Experiment Name: At_Drought_Soil_Dry_P Parameter: Organism Value: A. thaliana
  misc_feature: MA Experiment 20001558 PARAMETER Experiment Name: At_Drought_Soil_Dry_P Parameter: Plant Line Value: WS
  misc_feature: MA Experiment 20001558 PARAMETER Experiment Name: At_Drought_Soil_Dry_P Parameter: Post Timepoint (hr) Value: 6
  misc_feature: MA Experiment 20001558 PARAMETER Experiment Name: At_Drought_Soil_Dry_P Parameter: Post-Treatment Value: Re-Water vs. No Drought
  misc_feature: MA Experiment 20001558 PARAMETER Experiment Name: At_Drought_Soil_Dry_P Parameter: Timepoint (day) Value: 13
  misc_feature: MA Experiment 20001558 PARAMETER Experiment Name: At_Drought_Soil_Dry_P Parameter: Treatment Value: Drought vs. No Drought
  misc_feature: MA Experiment ID: 20001559 Result: Down-regulated in Transcription
  misc_feature: MA Experiment 20001559 PARAMETER Experiment Name: At_Drought_Soil_Dry_P Parameter: Age (day) Value: 28
  misc_feature: MA Experiment 20001559 PARAMETER Experiment Name: At_Drought_Soil_Dry_P Parameter: Organism Value: A. thaliana
  misc_feature: MA Experiment 20001559 PARAMETER Experiment Name: At_Drought_Soil_Dry_P Parameter: Plant Line Value: WS
  misc_feature: MA Experiment 20001559 PARAMETER Experiment Name: At_Drought_Soil_Dry_P Parameter: Post Timepoint (hr) Value: 29
  misc_feature: MA Experiment 20001559 PARAMETER Experiment Name: At_Drought_Soil_Dry_P Parameter: Post-Treatment Value: Re-Water vs. No Drought
  misc_feature: MA Experiment 20001559 PARAMETER Experiment Name: At_Drought_Soil_Dry_P Parameter: Timepoint (day) Value: 14
  misc_feature: MA Experiment 20001559 PARAMETER Experiment Name: At_Drought_Soil_Dry_P Parameter: Treatment Value: Drought vs. No Drought
  misc_feature: MA Experiment ID: 20001560 Result: Up-regulated in Transcription
  misc_feature: MA Experiment 20001560 PARAMETER Experiment Name: At_Drought_Soil_Dry_P Parameter: Age (day) Value: 28
  misc_feature: MA Experiment 20001560 PARAMETER Experiment Name: At_Drought_Soil_Dry_P Parameter: Organism Value: A. thaliana
  misc_feature: MA Experiment 20001560 PARAMETER Experiment Name: At_Drought_Soil_Dry_P Parameter: Plant Line Value: WS
  misc_feature: MA Experiment 20001560 PARAMETER Experiment Name: At_Drought_Soil_Dry_P Parameter: Post Timepoint (hr) Value: None
  misc_feature: MA Experiment 20001560 PARAMETER Experiment Name: At_Drought_Soil_Dry_P Parameter: Post-Treatment Value: None
  misc_feature: MA Experiment 20001560 PARAMETER Experiment Name: At_Drought_Soil_Dry_P Parameter: Timepoint (day) Value: 14
  misc_feature: MA Experiment 20001560 PARAMETER Experiment Name: At_Drought_Soil_Dry_P Parameter: Treatment Value: Drought vs. No Drought
  misc_feature: MA Experiment ID: 20001755 Result: Down-regulated in Transcription
  misc_feature: MA Experiment 20001755 PARAMETER Experiment Name: At_50mM_NH4NO3_L-to-H_P Parameter: Timepoint (hr) Value: 2
  misc_feature: MA Experiment 20001755 PARAMETER Experiment Name: At_50mM_NH4NO3_L-to-H_P Parameter: Tissue Value: Leaf
  misc_feature: MA Experiment 20001755 PARAMETER Experiment Name: At_50mM_NH4NO3_L-to-H_P Parameter: Treatment Value: 50mM NH4NO3 vs 100mM Mannitol
  misc_feature: MA Experiment ID: 20001904 Result: Down-regulated in Transcription
  misc_feature: MA Experiment 20001904 PARAMETER Experiment Name: At_Drought_Reproduction_P Parameter: Age (day) Value: 37
  misc_feature: MA Experiment 20001904 PARAMETER Experiment Name: At_Drought_Reproduction_P Parameter: Organism Value: A. thaliana
  misc_feature: MA Experiment 20001904 PARAMETER Experiment Name: At_Drought_Reproduction_P Parameter: Plant Line Value: WS
  misc_feature: MA Experiment 20001904 PARAMETER Experiment Name: At_Drought_Reproduction_P Parameter: Timepoint (day) Value: 7
  misc_feature: MA Experiment 20001904 PARAMETER Experiment Name: At_Drought_Reproduction_P Parameter: Tissue Value: Rosettes
  misc_feature: MA Experiment 20001904 PARAMETER Experiment Name: At_Drought_Reproduction_P Parameter: Treatment Value: Drought vs. No Drought
  misc_feature: MA Experiment ID: 20001906 Result: Down-regulated in Transcription
  misc_feature: MA Experiment 20001906 PARAMETER Experiment Name: At_Drought_Reproduction_P Parameter: Age (day) Value: 35
  misc_feature: MA Experiment 20001906 PARAMETER Experiment Name: At_Drought_Reproduction_P Parameter: Organism Value: A. thaliana
  misc_feature: MA Experiment 20001906 PARAMETER Experiment Name: At_Drought_Reproduction_P Parameter: Plant Line Value: WS
  misc_feature: MA Experiment 20001906 PARAMETER Experiment Name: At_Drought_Reproduction_P Parameter: Timepoint (day) Value: 5
  misc_feature: MA Experiment 20001906 PARAMETER Experiment Name: At_Drought_Reproduction_P Parameter: Tissue Value: Siliques
  misc_feature: MA Experiment 20001906 PARAMETER Experiment Name: At_Drought_Reproduction_P Parameter: Treatment Value: Drought vs. No Drought
  misc_feature: MA Experiment ID: 20001911 Result: Down-regulated in Transcription
  misc_feature: MA Experiment 20001911 PARAMETER Experiment Name: At_Drought_Reproduction_P Parameter: Age (day) Value: 40
  misc_feature: MA Experiment 20001911 PARAMETER Experiment Name: At_Drought_Reproduction_P Parameter: Organism Value: A. thaliana
  misc_feature: MA Experiment 20001911 PARAMETER Experiment Name: At_Drought_Reproduction_P Parameter: Plant Line Value: WS
  misc_feature: MA Experiment 20001911 PARAMETER Experiment Name: At_Drought_Reproduction_P Parameter: Timepoint (day) Value: 10
  misc_feature: MA Experiment 20001911 PARAMETER Experiment Name: At_Drought_Reproduction_P Parameter: Tissue Value: Flowers
  misc_feature: MA Experiment 20001911 PARAMETER Experiment Name: At_Drought_Reproduction_P Parameter: Treatment Value: Drought vs. No Drought
cttttcctttgcctaattcccctaagtcatcgtctcttgaacggttcctgccattaatgtcgaactcttcctaaaccctttttgttcacatttccttctctttctcttcctccgtctctctctgaaaaaccctaattgactcgttgcgattgaaatggatccttgtccattcatccgtcttacaatcgggaacctagctttgaaagttccgttagcggcgaagacaacgagctccgtcgtgcatccgtcgtcttctccttgtttttgtaaaatcaaactcaaaaacttcccgccgcaaaccgccgcaatcccgtacattcctttggagacgactcagtttccggagatccaaaccctagccgccacgtttcatctcagcagctccgatattcaacgcttagcttccagatctatatttacttctaagccttgtcttaaaattttgatctacactggaagagccggcgctgcttgcggcgtacactccggtcgtcttctggcgaaagtctccgtaccgttggatctatctggtacgcaatcgaaaccgtgcgtcttccacaacggatggatatcagtcggaaaaggagctggaaaatcgtcgtcgtctgctcagtttcacctgaatgtgaaggcggagcctgatcctagattcgtttttcagtttgacggcgagcctgaatgtagtcctcaagtcgttcagattcaaggcaatatccggcaaccagttttcacatgcaaattcagttgccggcacaccggtgatcgtactcagagatcaagatcattgccgactgagacaagtgtttcacggagctggctaaactcgttcgggagtgagagagaacgtcctgggaaagagcgtaaaggatggtccataacagtccatgacttgtccggttcaccagtggccatggcgtcaatcgtcactccattcgtggcatctcctggaaccgatcgtgtgagccggtcaaaccctgggtcatggcttatactgcgtcccggagactgtacctggagaccgtggggaagacttgaagcatggcgggaacgcggtggagccactgatggtctaggttacagattcgaactcatcccagacggatcaagcggtgcaggaatcgtgcttgcggaatcaaccataagttctcacagaggtgggaaattctcaatcgagttgggatcgtcgccttcttcatcgtcgccaacaagtgtggtgaaccgatcgagaagccgtagaggtgggagtagtggaagcggtggaggagcatcgccggcgaatagtccgagaggagggagcggagattacggttacggattgtggccgtggaacgtgtacaaagggtttgtgatgtcagcaagtgtggaaggtgaagggaaatgtagtaagccttgtgtagaggtgagtgtgcagcacgttagctgtatggaagatgcggctgcttacgtggcgctttctgcagccattgatcttagtatggatgcttgcaggctgtttaatcaacggatgaggaaagagctttgccatgagtcactgagctga

SEQ ID NO: 38339 - protein, 461 aa, Arabidopsis thaliana
  peptide (1)..(461): Ceres Seq. ID no. 13574942
  misc_feature (256)..(460): Pfam Name: Protein of unknown function (DUF1005) Pfam Description: Protein of unknown function (DUF1005)
  misc_feature (1)..(455): Homolog of NCBI NO: 15222861 NR Description: expressed protein [Arabidopsis thaliana]
  misc_feature (370)..(457): Homolog of NCBI NO: 34896878 NR Description: unknown protein [Oryza sativa (japonica
  misc_feature (68)..(351): Homolog of NCBI NO: 34896878 NR Description: unknown protein [Oryza sativa (japonica
  misc_feature (1)..(89): Homolog of NCBI NO: 15230917 NR Description: expressed protein [Arabidopsis thaliana]
  misc_feature (65)..(459): Homolog of NCBI NO: 15230917 NR Description: expressed protein [Arabidopsis thaliana]
  misc_feature (1)..(89): Homolog of NCBI NO: 18176372 NR Description: unknown protein [Arabidopsis thaliana]
  misc_feature (65)..(459): Homolog of NCBI NO: 18176372 NR Description: unknown protein [Arabidopsis thaliana]
  misc_feature (370)..(457): Homolog of NCBI NO: 36104436 NR Description: unknown protein [Oryza sativa (japonica
  misc_feature (1)..(351): Homolog of NCBI NO: 36104436 NR Description: unknown protein [Oryza sativa (japonica
  misc_feature (1)..(461): Homolog of NCBI NO: 15218372 NR Description: expressed protein [Arabidopsis thaliana]
MDPCPFIRLTIGNLALKVPLAAKTTSSVVHPSSSPCFCKIKLKNFPPQTAAIPYIPLETTQFPEIQTLAATFHLSSSDIQRLASRSIFTSKPCLKILIYTGRAGAACGVHSGRLLAKVSVPLDLSGTQSKPCVFHNGWISVGKGAGKSSSSAQFHLNVKAEPDPRFVFQFDGEPECSPQVVQIQGNIRQPVFTCKFSCRHTGDRTQRSRSLPTETSVSRSWLNSFGSERERPGKERKGWSITVHDLSGSPVAMASIVTPFVASPGTDRVSRSNPGSWLILRPGDCTWRPWGRLEAWRERGGATDGLGYRFELIPDGSSGAGIVLAESTISSHRGGKFSIELGSSPSSSSPTSVVNRSRSRRGGSSGSGGGASPANSPRGGSGDYGYGLWPWNVYKGFVMSASVEGEGKCSKPCVEVSVQHVSCMEDAAAYVALSAAIDLSMDACRLFNQRMRKELCHESLS

SEQ ID NO: 38340 - DNA, 1523 bp, Arabidopsis thaliana
  misc_feature (1)..(1523): Ceres Seq. ID no. 12488230
  misc_feature: MA Experiment ID: 108434 Result: Up-regulated in Transcription
  misc_feature: MA Experiment 108434 PARAMETER Experiment Name: At_Root_Tips_cDNA_P Parameter: Tissue Value: Root Tips
  misc_feature: MA Experiment ID: 108462 Result: Down-regulated in Transcription
  misc_feature: MA Experiment 108462 PARAMETER Experiment Name: At_Germinating_Seeds_cDNA_P Parameter: Age (day) Value: 2 vs. 0
  misc_feature: MA Experiment 108462 PARAMETER Experiment Name: At_Germinating_Seeds_cDNA_P Parameter: Tissue Value: Germinating Seeds
  misc_feature: MA Experiment ID: 108463 Result: Down-regulated in Transcription
  misc_feature: MA Experiment 108463 PARAMETER Experiment Name: At_Germinating_Seeds_cDNA_P Parameter: Age (day) Value: 3 vs. 0
  misc_feature: MA Experiment 108463 PARAMETER Experiment Name: At_Germinating_Seeds_cDNA_P Parameter: Tissue Value: Germinating Seeds
  misc_feature: MA Experiment ID: 108464 Result: Down-regulated in Transcription
  misc_feature: MA Experiment 108464 PARAMETER Experiment Name: At_Germinating_Seeds_cDNA_P Parameter: Age (day) Value: 4 vs. 0
  misc_feature: MA Experiment 108464 PARAMETER Experiment Name: At_Germinating_Seeds_cDNA_P Parameter: Tissue Value: Germinating Seeds
  misc_feature: MA Experiment ID: 108573 Result: Down-regulated in Transcription
  misc_feature: MA Experiment 108573 PARAMETER Experiment Name: At_Drought_cDNA_P Parameter: Timepoint (hr) Value: 6
  misc_feature: MA Experiment 108573 PARAMETER Experiment Name: At_Drought_cDNA_P Parameter: Tissue Value: Aerial
  misc_feature: MA Experiment 108573 PARAMETER Experiment Name: At_Drought_cDNA_P Parameter: Treatment Value: Drought vs. No Drought
  misc_feature: MA Experiment ID: 20000087 Result: Down-regulated in Transcription
  misc_feature: MA Experiment 20000087 PARAMETER Experiment Name: At_100uM_ABA_Mutants_cDNA_P Parameter: Plant Line Value: WS
  misc_feature: MA Experiment 20000087 PARAMETER Experiment Name: At_100uM_ABA_Mutants_cDNA_P Parameter: Timepoint (hr) Value: 6
  misc_feature: MA Experiment 20000087 PARAMETER Experiment Name: At_100uM_ABA_Mutants_cDNA_P Parameter: Tissue Value: Aerial
  misc_feature: MA Experiment 20000087 PARAMETER Experiment Name: At_100uM_ABA_Mutants_cDNA_P Parameter: Treatment Value: 100uM ABA vs. No Treatment
  misc_feature: MA Experiment ID: 20000179 Result: Down-regulated in Transcription
  misc_feature: MA Experiment 20000179 PARAMETER Experiment Name: At_Germinating_Seeds_P Parameter: Age (hr) Value: 6 vs. 0
  misc_feature: MA Experiment 20000179 PARAMETER Experiment Name: At_Germinating_Seeds_P Parameter: Tissue Value: Germinating Seeds
  misc_feature: MA Experiment ID: 20000443 Result: Down-regulated in Transcription
  misc_feature: MA Experiment 20000443 PARAMETER Experiment Name: At_1uM_BR-BRZ__P Parameter: Tissue Value: Shoot Apices
  misc_feature: MA Experiment 20000443 PARAMETER Experiment Name: At_1uM_BR-BRZ__P Parameter: Treatment Value: 1uM BRZ vs. No Treatment
ctcttcttcctctaattgcttttctccgtcactgagtaccttgcctctcgagctcccaatcttaagtagaggattgagcttaaggcaagatggtaagaaacttaaatatttattttgaatatttgatcaattatctatctttatgaattattgatcaagaaacaaaatttaaagaacatcggggacttgaaaaagtaatggaaatttcacaaaaccgaaaagcaaacggttaattcggttttacaaagaccaaacagaaaattcaataattcggtttggttcggtttaattacacctaacaaaaaagttggtatattcgtttttatttttccgccattcttgtcgatcttcttcagtcgtaaaaccgccgcgtctctgctgaccctcctcttctcatttcatcgacgggagaaaatctcataccatctgagatttccaacagtgaaattaagatgtcaacaggaatatccactgatctccatgtccattttggagctttgaatttctcaaaaacctacaaatctggtttaagaaatcgaacggtgtctttttcgagagtcgggtatgctcagaacaggaaattgagctgcagcgtttccaacacagagaatgtagctcctaaggatgatgaaagaggaaaggatagacctttggttaagatgtgtggcatcacatcagccagagatgcagctatggcagttgaggctggtgccgatttgattgggatgattatttggccacattcaaaacgatccatttctctttctgtcgcaaaggatatctctaaagtggccagggaaggtggggccaaacctgttggtgtttttgttgaagatgatgagaacacgatactgagagcagctgattactctgaccttgagcttgtgcagcttcatggtaatggttcgcgtgctgctttctcgaggttagtacgcaagaggagagtcatatatgtccttaatgcaaatcaggatggaaagctcttgaatgaagttcctgaagaggattgtcatcttgctgattggattcttgtggatagtgcaacgggtgggagtggacacggatttaactgggctcaattcaagttgccttccgtcagaagcagaaatgggtggctcttagctgggggaatcaatccaacaaatgtttcagaagctctttctatccttcaacctgatggaattgatgttagtagcggtatttgcggtacagatggtatccagaaggataagtctaagataagctcctttataactgcagttcgctctgtacactactaatggcaagcaatataaaccacggtaatttatcttgtaactatagttttgagcatcaacctattgtttccaatctatgtcattaagttttgaattgtaactggttgataataataataatgccctttcttttcatcagtagtagatttaaattaaaagcgttgggttgtcaccgtaataatgtcgttgggctctcaagaacaagatccttgtatgaaatgtattctactgatcatatattattcc

SEQ ID NO: 38341 - protein, 275 aa, Arabidopsis thaliana
  peptide (1)..(275): Ceres Seq. ID no. 12488231
  misc_feature (68)..(269): Pfam Name: N-(5'phosphoribosyl)anthranilate (PRA) isomerase Pfam Description: N-(5'phosphoribosyl)anthranilate (PRA) isomerase
  misc_feature (1)..(275): Homolog of NCBI NO: 5031264 NR Description: phosphoribosylanthranilate isomerase [Arabidopsis
  misc_feature (1)..(275): Homolog of NCBI NO: 5031254 NR Description: phosphoribosylanthranilate isomerase [Arabidopsis
  misc_feature (2)..(275): Homolog of NCBI NO: 10178136 NR Description: phosphoribosylanthranilate isomerase [Arabidopsis
  misc_feature (1)..(275): Homolog of NCBI NO: 5031256 NR Description: phosphoribosylanthranilate isomerase [Arabidopsis
  misc_feature (1)..(275): Homolog of NCBI NO: 1403671 NR Description: phosphoribosylanthranilate isomerase [Arabidopsis
  misc_feature (2)..(275): Homolog of NCBI NO: 25407008 NR Description: hypothetical protein [imported] - Arabidopsis
  misc_feature (1)..(275): Homolog of NCBI NO: 5031258 NR Description: phosphoribosylanthranilate isomerase [Arabidopsis
  misc_feature (1)..(275): Homolog of NCBI NO: 30681012 NR Description: phosphoribosylanthranilate isomerase (PAI2)
  misc_feature (1)..(275): Homolog of NCBI NO: 15223003 NR Description: phosphoribosylanthranilate isomerase
  misc_feature (1)..(275): Homolog of NCBI NO: 1403670 NR Description: phosphoribosylanthranilate isomerase [Arabidopsis
MSTGISTDLHVHFGALNFSKTYKSGLRNRTVSFSRVGYAQNRKLSCSVSNTENVAPKDDERGKDRPLVKMCGITSARDAAMAVEAGADLIGMIIWPHSKRSISLSVAKDISKVAREGGAKPVGVFVEDDENTILRAADYSDLELVQLHGNGSRAAFSRLVRKRRVIYVLNANQDGKLLNEVPEEDCHLADWILVDSATGGSGHGFNWAQFKLPSVRSRNGWLLAGGINPTNVSEALSILQPDGIDVSSGICGTDGIQKDKSKISSFITAVRSVHY

SEQ ID NO: 38342 - protein, 206 aa, Arabidopsis thaliana
  peptide (1)..(206): Ceres Seq. ID no. 12488232
  misc_feature (1)..(200): Pfam Name: N-(5'phosphoribosyl)anthranilate (PRA) isomerase Pfam Description: N-(5'phosphoribosyl)anthranilate (PRA) isomerase
  misc_feature (1)..(206): Homolog of NCBI NO: 5031264 NR Description: phosphoribosylanthranilate isomerase [Arabidopsis
  misc_feature (1)..(206): Homolog of NCBI NO: 5031254 NR Description: phosphoribosylanthranilate isomerase [Arabidopsis
  misc_feature (1)..(206): Homolog of NCBI NO: 10178136 NR Description: phosphoribosylanthranilate isomerase [Arabidopsis
  misc_feature (1)..(206): Homolog of NCBI NO: 5031256 NR Description: phosphoribosylanthranilate isomerase [Arabidopsis
  misc_feature (1)..(206): Homolog of NCBI NO: 1403671 NR Description: phosphoribosylanthranilate isomerase [Arabidopsis
  misc_feature (1)..(206): Homolog of NCBI NO: 25407008 NR Description: hypothetical protein [imported] - Arabidopsis
  misc_feature (1)..(206): Homolog of NCBI NO: 5031258 NR Description: phosphoribosylanthranilate isomerase [Arabidopsis
  misc_feature (1)..(206): Homolog of NCBI NO: 30681012 NR Description: phosphoribosylanthranilate isomerase (PAI2)
  misc_feature (1)..(206): Homolog of NCBI NO: 15223003 NR Description: phosphoribosylanthranilate isomerase
  misc_feature (1)..(206): Homolog of NCBI NO: 1403670 NR Description: phosphoribosylanthranilate isomerase [Arabidopsis
MCGITSARDAAMAVEAGADLIGMIIWPHSKRSISLSVAKDISKVAREGGAKPVGVFVEDDENTILRAADYSDLELVQLHGNGSRAAFSRLVRKRRVIYVLNANQDGKLLNEVPEEDCHLADWILVDSATGGSGHGFNWAQFKLPSVRSRNGWLLAGGINPTNVSEALSILQPDGIDVSSGICGTDGIQKDKSKISSFITAVRSVHY

SEQ ID NO: 38343 - protein, 195 aa, Arabidopsis thaliana
  peptide (1)..(195): Ceres Seq. ID no. 12488233
  misc_feature (1)..(189): Pfam Name: N-(5'phosphoribosyl)anthranilate (PRA) isomerase Pfam Description: N-(5'phosphoribosyl)anthranilate (PRA) isomerase
  misc_feature (1)..(195): Homolog of NCBI NO: 5031264 NR Description: phosphoribosylanthranilate isomerase [Arabidopsis
  misc_feature (1)..(195): Homolog of NCBI NO: 5031254 NR Description: phosphoribosylanthranilate isomerase [Arabidopsis
  misc_feature (1)..(195): Homolog of NCBI NO: 10178136 NR Description: phosphoribosylanthranilate isomerase [Arabidopsis
  misc_feature (1)..(195): Homolog of NCBI NO: 5031256 NR Description: phosphoribosylanthranilate isomerase [Arabidopsis
  misc_feature (1)..(195): Homolog of NCBI NO: 1403671 NR Description: phosphoribosylanthranilate isomerase [Arabidopsis
  misc_feature (1)..(195): Homolog of NCBI NO: 25407008 NR Description: hypothetical protein [imported] - Arabidopsis
  misc_feature (1)..(195): Homolog of NCBI NO: 5031258 NR Description: phosphoribosylanthranilate isomerase [Arabidopsis
  misc_feature (1)..(195): Homolog of NCBI NO: 30681012 NR Description: phosphoribosylanthranilate isomerase (PAI2)
  misc_feature (1)..(195): Homolog of NCBI NO: 15223003 NR Description: phosphoribosylanthranilate isomerase
  misc_feature (1)..(195): Homolog of NCBI NO: 1403670 NR Description: phosphoribosylanthranilate isomerase [Arabidopsis
MAVEAGADLIGMIIWPHSKRSISLSVAKDISKVAREGGAKPVGVFVEDDENTILRAADYSDLELVQLHGNGSRAAFSRLVRKRRVIYVLNANQDGKLLNEVPEEDCHLADWILVDSATGGSGHGFNWAQFKLPSVRSRNGWLLAGGINPTNVSEALSILQPDGIDVSSGICGTDGIQKDKSKISSFITAVRSVHY

SEQ ID NO: 38344 - DNA, 910 bp, Arabidopsis thaliana
  misc_feature (1)..(910): Ceres Seq. ID no. 13488348
  misc_feature: MA Experiment ID: 108595 Result: Down-regulated in Transcription
  misc_feature: MA Experiment 108595 PARAMETER Experiment Name: At_Ler-pi_Ovule_cDNA_P Parameter: Plant Line Value: null
  misc_feature: MA Experiment ID: 108607 Result: Down-regulated in Transcription
  misc_feature: MA Experiment 108607 PARAMETER Experiment Name: At_100uM_ABA_cDNA_P Parameter: Timepoint (hr) Value: 4
  misc_feature: MA Experiment 108607 PARAMETER Experiment Name: At_100uM_ABA_cDNA_P Parameter: Tissue Value: Aerial
  misc_feature: MA Experiment 108607 PARAMETER Experiment Name: At_100uM_ABA_cDNA_P Parameter: Treatment Value: 100uM ABA vs. No Treatment
aacagtcaattggcggcgaagatgacgactcagtcgcagttcttagtgaacctctcttacggaggcctcgcctcccaaagtaatctcagagcgaataatcgtgtttcaccttcttcttgtcaaattacacgaacaaatcgctcatgggcattaccagtttcctttaaagttgagaaatttcaactccaacgaggaaggaggagaagaggatcaccatgttttggggagagcgaagggttggtcaaaaatgggattggtgatgctgatgggattataattgttgatcacggttctcgtcgccgtgaatccaatcttatgcttgaggagtttgtgaaaatgttcaaagaaaaaactggttacccaattgtagagcctgctcatatggaattggctgagccatctataaaagatgcattcagtttgtgtgtacaacaaggggcgaaacgtgtagttgtgagcccgttttttctatttcctggaagacattggcatacggacattccctcgttgacggctgatgctgcaaaggagttctctggcatctcatacctcataactgcacctctcggcccccataatctcctcctggacgttgtaaatgacagaatccaacattgcttgagccatgttgaaggtgatgctgacgagtgtcttgtttgtgctggaacaaataagtgcaagctctacaatagttcttaggtgtacatgtaagaacgtttttgtatatctgctcatcttctctaaccttcggatgcgggaaaaaaaggaggcatagtatattgttcatactcatcatttagtacgcgtcctatgtttcaacaagggagttttgagatttatgttcttttcttcttattgcagaccaatttgaaagactacgataatataataaaagctgtctgttaaatgc

SEQ ID NO: 38345 - protein, 232 aa, Arabidopsis thaliana
  peptide (1)..(232): Ceres Seq. ID no. 13488349
  misc_feature (127)..(206): Pfam Name: CbiX Pfam Description: CbiX
  misc_feature (90)..(207): Homolog of NCBI NO: 21400014 NR Description: CbiX, CbiX [Bacillus anthracis A2012]
  misc_feature (89)..(170): Homolog of NCBI NO: 15669160 NR Description: conserved hypothetical protein [Methanococcus
  misc_feature (89)..(222): Homolog of NCBI NO: 40642725 NR Description: ferrochelatase [Bacillus megaterium]
  misc_feature (90)..(212): Homolog of NCBI NO: 15614059 NR Description: BH1496~unknown conserved protein [Bacillus
  misc_feature (91)..(208): Homolog of NCBI NO: 39998091 NR Description: cbiX protein [Geobacter sulfurreducens PCA]
  misc_feature (80)..(208): Homolog of NCBI NO: 23054392 NR Description: hypothetical protein [Geobacter metallireducens]
  misc_feature (8)..(232): Homolog of NCBI NO: 21618095 NR Description: unknown [Arabidopsis thaliana]
  misc_feature (127)..(232): Homolog of NCBI NO: 25405354 NR Description: hypothetical protein F14I3.20 [imported] -
  misc_feature (8)..(128): Homolog of NCBI NO: 25405354 NR Description: hypothetical protein F14I3.20 [imported] -
  misc_feature (8)..(232): Homolog of NCBI NO: 18402963 NR Description: expressed protein [Arabidopsis thaliana]
NSQLAAKMTTQSQFLVNLSYGGLASQSNLRANNRVSPSSCQITRTNRSWALPVSFKVEKFQLQRGRRRRGSPCFGESEGLVKNGIGDADGIIIVDHGSRRRESNLMLEEFVKMFKEKTGYPIVEPAHMELAEPSIKDAFSLCVQQGAKRVVVSPFFLFPGRHWHTDIPSLTADAAKEFSGISYLITAPLGPHNLLLDVVNDRIQHCLSHVEGDADECLVCAGTNKCKLYNSS

SEQ ID NO: 38346 - protein, 225 aa, Arabidopsis thaliana
  peptide (1)..(225): Ceres Seq. ID no. 13488350
  misc_feature (120)..(199): Pfam Name: CbiX Pfam Description: CbiX
  misc_feature (83)..(200): Homolog of NCBI NO: 21400014 NR Description: CbiX, CbiX [Bacillus anthracis A2012]
  misc_feature (82)..(163): Homolog of NCBI NO: 15669160 NR Description: conserved hypothetical protein [Methanococcus
  misc_feature (82)..(215): Homolog of NCBI NO: 40642725 NR Description: ferrochelatase [Bacillus megaterium]
  misc_feature (83)..(205): Homolog of NCBI NO: 15614059 NR Description: BH1496~unknown conserved protein [Bacillus
  misc_feature (84)..(201): Homolog of NCBI NO: 39998091 NR Description: cbiX protein [Geobacter sulfurreducens PCA]
  misc_feature (73)..(201): Homolog of NCBI NO: 23054392 NR Description: hypothetical protein [Geobacter metallireducens]
  misc_feature (1)..(225): Homolog of NCBI NO: 21618095 NR Description: unknown [Arabidopsis thaliana]
  misc_feature (120)..(225): Homolog of NCBI NO: 25405354 NR Description: hypothetical protein F14I3.20 [imported] -
  misc_feature (1)..(121): Homolog of NCBI NO: 25405354 NR Description: hypothetical protein F14I3.20 [imported] -
  misc_feature (1)..(225): Homolog of NCBI NO: 18402963 NR Description: expressed protein [Arabidopsis thaliana]
MTTQSQFLVNLSYGGLASQSNLRANNRVSPSSCQITRTNRSWALPVSFKVEKFQLQRGRRRRGSPCFGESEGLVKNGIGDADGIIIVDHGSRRRESNLMLEEFVKMFKEKTGYPIVEPAHMELAEPSIKDAFSLCVQQGAKRVVVSPFFLFPGRHWHTDIPSLTADAAKEFSGISYLITAPLGPHNLLLDVVNDRIQHCLSHVEGDADECLVCAGTNKCKLYNSS

SEQ ID NO: 38347 - protein, 127 aa, Arabidopsis thaliana
  peptide (1)..(127): Ceres Seq. ID no. 13488351
  misc_feature (22)..(101): Pfam Name: CbiX Pfam Description: CbiX
  misc_feature (1)..(102): Homolog of NCBI NO: 21400014 NR Description: CbiX, CbiX [Bacillus anthracis A2012]
  misc_feature (1)..(65): Homolog of NCBI NO: 15669160 NR Description: conserved hypothetical protein [Methanococcus
  misc_feature (1)..(117): Homolog of NCBI NO: 40642725 NR Description: ferrochelatase [Bacillus megaterium]
  misc_feature (1)..(107): Homolog of NCBI NO: 15614059 NR Description: BH1496~unknown conserved protein [Bacillus
  misc_feature (1)..(103): Homolog of NCBI NO: 39998091 NR Description: cbiX protein [Geobacter sulfurreducens PCA]
  misc_feature (1)..(103): Homolog of NCBI NO: 23054392 NR Description: hypothetical protein [Geobacter metallireducens]
  misc_feature (1)..(127): Homolog of NCBI NO: 21618095 NR Description: unknown [Arabidopsis thaliana]
  misc_feature (22)..(127): Homolog of NCBI NO: 25405354 NR Description: hypothetical protein F14I3.20 [imported] -
  misc_feature (1)..(23): Homolog of NCBI NO: 25405354 NR Description: hypothetical protein F14I3.20 [imported] -
  misc_feature (1)..(127): Homolog of NCBI NO: 18402963 NR Description: expressed protein [Arabidopsis thaliana]
MLEEFVKMFKEKTGYPIVEPAHMELAEPSIKDAFSLCVQQGAKRVVVSPFFLFPGRHWHTDIPSLTADAAKEFSGISYLITAPLGPHNLLLDVVNDRIQHCLSHVEGDADECLVCAGTNKCKLYNSS

SEQ ID NO: 38348 - DNA, 1007 bp, Arabidopsis thaliana; identical to SEQ ID NO: 20890
  misc_feature (1)..(1007): Ceres Seq. ID no. 12325471
  misc_feature: MA Experiment ID: 108434 Result: Up-regulated in Transcription
  misc_feature: MA Experiment 108434 PARAMETER Experiment Name: At_Root_Tips_cDNA_P Parameter: Tissue Value: Root Tips
  misc_feature: MA Experiment ID: 20000224 Result: Down-regulated in Transcription
  misc_feature: MA Experiment ID: 20000794 Result: Down-regulated in Transcription
  misc_feature: MA Experiment 20000794 PARAMETER Experiment Name: At_Petals_P Parameter: Age (day) Value: 23-25 days
  misc_feature: MA Experiment 20000794 PARAMETER Experiment Name: At_Petals_P Parameter: Plant Line Value: WS
  misc_feature: MA Experiment 20000794 PARAMETER Experiment Name: At_Petals_P Parameter: Tissue Value: Petals vs. Whole plant

SEQ ID NO: 38349 - protein, 228 aa, Arabidopsis thaliana; identical to SEQ ID NO: 20891
  peptide (1)..(228): Ceres Seq. ID no. 12325472
  misc_feature (1)..(154): Homolog of NCBI NO: 14249166 NR Description: seven transmembrane domain protein [Homo sapiens]
  misc_feature (1)..(154): Homolog of NCBI NO: 12841501 NR Description: unnamed protein product [Mus musculus]
  misc_feature (1)..(220): Homolog of NCBI NO: 7511137 NR Description: hypothetical protein ZK418.5 - Caenorhabditis
  misc_feature (1)..(216): Homolog of NCBI NO: 39593965 NR Description: Hypothetical protein CBG16516 [Caenorhabditis
  misc_feature (1)..(220): Homolog of NCBI NO: 17556931 NR Description: Seven transmembrane domain protein like (25.0 kD)
  misc_feature (109)..(146): Homolog of NCBI NO: 15220273 NR Description: cytochrome P450, putative; protein id:
  misc_feature (170)..(228): Homolog of NCBI NO: 15220273 NR Description: cytochrome P450, putative; protein id:
  misc_feature (1)..(108): Homolog of NCBI NO: 31415927 NR Description: unknown protein [Oryza sativa (japonica
  misc_feature (1)..(226): Homolog of NCBI NO: 31415928 NR Description: unknown protein [Oryza sativa (japonica
  misc_feature (1)..(228): Homolog of NCBI NO: 18401831 NR Description: expressed protein
  misc_feature (1)..(154): Homolog of NCBI NO: 14249166 NR Description: seven transmembrane domain protein [Homo sapiens]
  misc_feature (1)..(154): Homolog of NCBI NO: 12841501 NR Description: unnamed protein product [Mus musculus]
  misc_feature (1)..(220): Homolog of NCBI NO: 7511137 NR Description: hypothetical protein ZK418.5 - Caenorhabditis
  misc_feature (1)..(216): Homolog of NCBI NO: 39593965 NR Description: Hypothetical protein CBG16516 [Caenorhabditis
  misc_feature (1)..(220): Homolog of NCBI NO: 17556931 NR Description: Seven transmembrane domain protein like (25.0 kD)
  misc_feature (109)..(146): Homolog of NCBI NO: 15220273 NR Description: cytochrome P450, putative; protein id:
  misc_feature (170)..(228): Homolog of NCBI NO: 15220273 NR Description: cytochrome P450, putative; protein id:
  misc_feature (1)..(108): Homolog of NCBI NO: 31415927 NR Description: unknown protein [Oryza sativa (japonica
  misc_feature (1)..(226): Homolog of NCBI NO: 31415928 NR Description: unknown protein [Oryza sativa (japonica
  misc_feature (1)..(228): Homolog of NCBI NO: 18401831 NR Description: expressed protein

SEQ ID NO: 38350 - protein, 154 aa, Arabidopsis thaliana; identical to SEQ ID NO: 20892
  peptide (1)..(154): Ceres Seq. ID no. 12325473
  misc_feature (1)..(80): Homolog of NCBI NO: 14249166 NR Description: seven transmembrane domain protein [Homo sapiens]
  misc_feature (1)..(80): Homolog of NCBI NO: 12841501 NR Description: unnamed protein product [Mus musculus]
  misc_feature (1)..(146): Homolog of NCBI NO: 7511137 NR Description: hypothetical protein ZK418.5 - Caenorhabditis
  misc_feature (1)..(142): Homolog of NCBI NO: 39593965 NR Description: Hypothetical protein CBG16516 [Caenorhabditis
  misc_feature (1)..(146): Homolog of NCBI NO: 17556931 NR Description: Seven transmembrane domain protein like (25.0 kD)
  misc_feature (35)..(72): Homolog of NCBI NO: 15220273 NR Description: cytochrome P450, putative; protein id:
  misc_feature (96)..(154): Homolog of NCBI NO: 15220273 NR Description: cytochrome P450, putative; protein id:
  misc_feature (1)..(34): Homolog of NCBI NO: 31415927 NR Description: unknown protein [Oryza sativa (japonica
  misc_feature (1)..(152): Homolog of NCBI NO: 31415928 NR Description: unknown protein [Oryza sativa (japonica
  misc_feature (1)..(154): Homolog of NCBI NO: 18401831 NR Description: expressed protein
  misc_feature (1)..(80): Homolog of NCBI NO: 14249166 NR Description: seven transmembrane domain protein [Homo sapiens]
  misc_feature (1)..(80): Homolog of NCBI NO: 12841501 NR Description: unnamed protein product [Mus musculus]
  misc_feature (1)..(146): Homolog of NCBI NO: 7511137 NR Description: hypothetical protein ZK418.5 - Caenorhabditis
  misc_feature (1)..(142): Homolog of NCBI NO: 39593965 NR Description: Hypothetical protein CBG16516 [Caenorhabditis
  misc_feature (1)..(146): Homolog of NCBI NO: 17556931 NR Description: Seven transmembrane domain protein like (25.0 kD)
  misc_feature (35)..(72): Homolog of NCBI NO: 15220273 NR Description: cytochrome P450, putative; protein id:
  misc_feature (96)..(154): Homolog of NCBI NO: 15220273 NR Description: cytochrome P450, putative; protein id:
  misc_feature (1)..(34): Homolog of NCBI NO: 31415927 NR Description: unknown protein [Oryza sativa (japonica
  misc_feature (1)..(152): Homolog of NCBI NO: 31415928 NR Description: unknown protein [Oryza sativa (japonica
  misc_feature (1)..(154): Homolog of NCBI NO: 18401831 NR Description: expressed protein

SEQ ID NO: 38351 - DNA, 1306 bp, Arabidopsis thaliana
  misc_feature (1)..(1306): Ceres Seq. ID no. 12348661
  misc_feature: MA Experiment ID: 20000234 Result: Up-regulated in Transcription
  misc_feature: MA Experiment 20000234 PARAMETER Experiment Name: At_Siliques_P Parameter: Age (day) Value: 21
  misc_feature: MA Experiment 20000234 PARAMETER Experiment Name: At_Siliques_P Parameter: Organism Value: A. thaliana
  misc_feature: MA Experiment 20000234 PARAMETER Experiment Name: At_Siliques_P Parameter: Plant Line Value: WS
  misc_feature: MA Experiment 20000234 PARAMETER Experiment Name: At_Siliques_P Parameter: Tissue Value: Less Than 5mm Siliques vs. Whole Plant
  misc_feature: MA Experiment ID: 20000265 Result: Up-regulated in Transcription
  misc_feature: MA Experiment 20000265 PARAMETER Experiment Name: At_Open_Flower_P Parameter: Age (day) Value: 21
  misc_feature: MA Experiment 20000265 PARAMETER Experiment Name: At_Open_Flower_P Parameter: Plant Line Value: WS
  misc_feature: MA Experiment 20000265 PARAMETER Experiment Name: At_Open_Flower_P Parameter: Tissue Value: Closed Flower vs. Whole Plant
  misc_feature: MA Experiment ID: 20000286 Result: Up-regulated in Transcription
  misc_feature: MA Experiment 20000286 PARAMETER Experiment Name: At_Open_Flower_P Parameter: Age (day) Value: 21
  misc_feature: MA Experiment 20000286 PARAMETER Experiment Name: At_Open_Flower_P Parameter: Plant Line Value: WS
  misc_feature: MA Experiment 20000286 PARAMETER Experiment Name: At_Open_Flower_P Parameter: Tissue Value: Half Open vs. Whole Plant
  misc_feature: MA Experiment ID: 20000794 Result: Up-regulated in Transcription
  misc_feature: MA Experiment 20000794 PARAMETER Experiment Name: At_Petals_P Parameter: Age (day) Value: 23-25 days
  misc_feature: MA Experiment 20000794 PARAMETER Experiment Name: At_Petals_P Parameter: Plant Line Value: WS
  misc_feature: MA Experiment 20000794 PARAMETER Experiment Name: At_Petals_P Parameter: Tissue Value: Petals vs. Whole plant
  misc_feature: MA Experiment ID: 20001910 Result: Up-regulated in Transcription
  misc_feature: MA Experiment 20001910 PARAMETER Experiment Name: At_Drought_Reproduction_P Parameter: Age (day) Value: 37
  misc_feature: MA Experiment 20001910 PARAMETER Experiment Name: At_Drought_Reproduction_P Parameter: Organism Value: A. thaliana
  misc_feature: MA Experiment 20001910 PARAMETER Experiment Name: At_Drought_Reproduction_P Parameter: Plant Line Value: WS
  misc_feature: MA Experiment 20001910 PARAMETER Experiment Name: At_Drought_Reproduction_P Parameter: Timepoint (day) Value: 7
  misc_feature: MA Experiment 20001910 PARAMETER Experiment Name: At_Drought_Reproduction_P Parameter: Tissue Value: Flowers
  misc_feature: MA Experiment 20001910 PARAMETER Experiment Name: At_Drought_Reproduction_P Parameter: Treatment Value: Drought vs. No Drought
aactgatcgtataatcattctcacggagacgagtgaccaaaacaaggtctcccgcttcttgcgaagattaaacgaatccatttagattttagaaaccacacaaaaaaatatgggtcggctcaagttcgcatgtccggttcttgagatcaatttaatctcagctcaagacttagcccctgtctcaagaaacatgaaaacgtattccgtcgcttggatcaacaccgatcctatgagaaaactcaccacgcgtgttgatcaatccaacagagctaaccctatatggaacgagaagttcgtgtttcgcgttaatgacaagattctcgatgttgacgcatcagcgattgtgattgagatatacgcagcggcttgggctaaagatgctcttgttggtactgtgaatgttcttctcagcgatctttttgctccttggtctggttttggtgatggtaacgacggtggtggtgggaataacaacatgaggcttgtgactcttcagattcgtcgtccttcagggaggctacaagggtttttacgtctcggtattgcacttcttgacggtggtcaacggagtatgcctttatctattgaggttttcgatggaagtcgaaaaggagagaggaatagtgttaaaagagatcaagaggcttcaagaatgatgcatcgccgtacgaatagcgatcaaacggatttaaccacgtctacgaatgattacggtgtgaaaacaggggttgttactggcaatggaggaggaggtggtggtggtggcggtattgttgttggtgcggatagtatggttaatggttcgctttgtagctctgatattggaccatcagcgtctgtggttgcggctgcgattgcgcaagggctttacaatagacagaaaacagcggttaaagcggctaacaaagaggacgcaagttcgatacttgaagggaaaacagagggaattgagtatagagttgaacggtggagagcagagaaaaatggcacggttggagcgggtggagcggctggatcaagcgatgattctagcgggaaaggaggagcgggaaggagaagaaggaggaggagaagaaaggagaaacaacaagggaggagaaacggtggaggagagggtaagaaagggttgttttcatgttttggaaacgtgtttggatgtgagatttcgataacatgtggcggtggaagcggcggagaaggagacagcacaaagaagagatataataacaataaagtagtaaatcttagtgctgtagacgaaacgtttagtcattctgcgacttgaaataagagaaagtgtttactt

SEQ ID NO: 38352 - protein, 391 aa, Arabidopsis thaliana
  peptide (1)..(391): Ceres Seq. ID no. 12348662
  misc_feature (11)..(97): Pfam Name: C2 domain Pfam Description: C2 domain
  misc_feature (10)..(180): Homolog of NCBI NO: 15234097 NR Description: hypothetical protein
  misc_feature (10)..(201): Homolog of NCBI NO: 25372827 NR Description: hypothetical protein [imported] - Arabidopsis
  misc_feature (233)..(370): Homolog of NCBI NO: 15225023 NR Description: hypothetical protein; protein id: At2g13350.1
  misc_feature (8)..(199): Homolog of NCBI NO: 15225023 NR Description: hypothetical protein; protein id: At2g13350.1
  misc_feature (233)..(369): Homolog of NCBI NO: 15219742 NR Description: hypothetical protein; protein id: At1g04540.1
  misc_feature (10)..(201): Homolog of NCBI NO: 15219742 NR Description: hypothetical protein; protein id: At1g04540.1
  misc_feature (233)..(384): Homolog of NCBI NO: 15225835 NR Description: hypothetical protein; protein id: At2g33320.1
  misc_feature (10)..(201): Homolog of NCBI NO: 15225835 NR Description: hypothetical protein; protein id: At2g33320.1
  misc_feature (1)..(213): Homolog of NCBI NO: 18396861 NR Description: expressed protein; protein id: At3g04360.1
  misc_feature (1)..(391): Homolog of NCBI NO: 21618096 NR Description: unknown [Arabidopsis thaliana]
MGRLKFACPVLEINLISAQDLAPVSRNMKTYSVAWINTDPMRKLTTRVDQSNRANPIWNEKFVFRVNDKILDVDASAIVIEIYAAAWAKDALVGTVNVLLSDLFAPWSGFGDGNDGGGGNNNMRLVTLQIRRPSGRLQGFLRLGIALLDGGQRSMPLSIEVFDGSRKGERNSVKRDQEASRMMHRRTNSDQTDLTTSTNDYGVKTGVVTGNGGGGGGGGGIVVGADSMVNGSLCSSDIGPSASVVAAAIAQGLYNRQKTAVKAANKEDASSILEGKTEGIEYRVERWRAEKNGTVGAGGAAGSSDDSSGKGGAGRRRRRRRRKEKQQGRRNGGGEGKKGLFSCFGNVFGCEISITCGGGSGGEGDSTKKRYNNNKVVNLSAVDETFSHSAT

SEQ ID NO: 38353 - protein, 364 aa, Arabidopsis thaliana
  peptide (1)..(364): Ceres Seq. ID no. 12348663
  misc_feature (1)..(70): Pfam Name: C2 domain Pfam Description: C2 domain
  misc_feature (1)..(153): Homolog of NCBI NO: 15234097 NR Description: hypothetical protein
  misc_feature (1)..(174): Homolog of NCBI NO: 25372827 NR Description: hypothetical protein [imported] - Arabidopsis
  misc_feature (206)..(343): Homolog of NCBI NO: 15225023 NR Description: hypothetical protein; protein id: At2g13350.1
  misc_feature (1)..(172): Homolog of NCBI NO: 15225023 NR Description: hypothetical protein; protein id: At2g13350.1
  misc_feature (206)..(342): Homolog of NCBI NO: 15219742 NR Description: hypothetical protein; protein id: At1g04540.1
  misc_feature (1)..(174): Homolog of NCBI NO: 15219742 NR Description: hypothetical protein; protein id: At1g04540.1
  misc_feature (206)..(357): Homolog of NCBI NO: 15225835 NR Description: hypothetical protein; protein id: At2g33320.1
  misc_feature (1)..(174): Homolog of NCBI NO: 15225835 NR Description: hypothetical protein; protein id: At2g33320.1
  misc_feature (1)..(186): Homolog of NCBI NO: 18396861 NR Description: expressed protein; protein id: At3g04360.1
  misc_feature (1)..(364): Homolog of NCBI NO: 21618096 NR Description: unknown [Arabidopsis thaliana]
MKTYSVAWINTDPMRKLTTRVDQSNRANPIWNEKFVFRVNDKILDVDASAIVIEIYAAAWAKDALVGTVNVLLSDLFAPWSGFGDGNDGGGGNNNMRLVTLQIRRPSGRLQGFLRLGIALLDGGQRSMPLSIEVFDGSRKGERNSVKRDQEASRMMHRRTNSDQTDLTTSTNDYGVKTGVVTGNGGGGGGGGGIVVGADSMVNGSLCSSDIGPSASVVAAAIAQGLYNRQKTAVKAANKEDASSILEGKTEGIEYRVERWRAEKNGTVGAGGAAGSSDDSSGKGGAGRRRRRRRRKEKQQGRRNGGGEGKKGLFSCFGNVFGCEISITCGGGSGGEGDSTKKRYNNNKVVNLSAVDETFSHSAT

SEQ ID NO: 38354 - protein, 351 aa, Arabidopsis thaliana
  peptide (1)..(351): Ceres Seq. ID no. 12348664
  misc_feature (1)..(57): Pfam Name: C2 domain Pfam Description: C2 domain
  misc_feature (1)..(140): Homolog of NCBI NO: 15234097 NR Description: hypothetical protein
  misc_feature (1)..(161): Homolog of NCBI NO: 25372827 NR Description: hypothetical protein [imported] - Arabidopsis
  misc_feature (193)..(330): Homolog of NCBI NO: 15225023 NR Description: hypothetical protein; protein id: At2g13350.1
  misc_feature (1)..(159): Homolog of NCBI NO: 15225023 NR Description: hypothetical protein; protein id: At2g13350.1
  misc_feature (193)..(329): Homolog of NCBI NO: 15219742 NR Description: hypothetical protein; protein id: At1g04540.1
  misc_feature (1)..(161): Homolog of NCBI NO: 15219742 NR Description: hypothetical protein; protein id: At1g04540.1
  misc_feature (193)..(344): Homolog of NCBI NO: 15225835 NR Description: hypothetical protein; protein id: At2g33320.1
  misc_feature (1)..(161): Homolog of NCBI NO: 15225835 NR Description: hypothetical protein; protein id: At2g33320.1
  misc_feature (1)..(173): Homolog of NCBI NO: 18396861 NR Description: expressed protein; protein id: At3g04360.1
  misc_feature (1)..(351): Homolog of NCBI NO: 21618096 NR Description: unknown [Arabidopsis thaliana]
MRKLTTRVDQSNRANPIWNEKFVFRVNDKILDVDASAIVIEIYAAAWAKDALVGTVNVLLSDLFAPWSGFGDGNDGGGGNNNMRLVTLQIRRPSGRLQGFLRLGIALLDGGQRSMPLSIEVFDGSRKGERNSVKRDQEASRMMHRRTNSDQTDLTTSTNDYGVKTGVVTGNGGGGGGGGGIVVGADSMVNGSLCSSDIGPSASVVAAAIAQGLYNRQKTAVKAANKEDASSILEGKTEGIEYRVERWRAEKNGTVGAGGAAGSSDDSSGKGGAGRRRRRRRRKEKQQGRRNGGGEGKKGLFSCFGNVFGCEISITCGGGSGGEGDSTKKRYNNNKVVNLSAVDETFSHSAT

SEQ ID NO: 38355 - DNA, 1768 bp, Arabidopsis thaliana
  misc_feature (1)..(1768): Ceres Seq. ID no. 13489028
  misc_feature: MA Experiment ID: 108434 Result: Down-regulated in Transcription
  misc_feature: MA Experiment 108434 PARAMETER Experiment Name: At_Root_Tips_cDNA_P Parameter: Tissue Value: Root Tips
  misc_feature: MA Experiment ID: 108462 Result: Up-regulated in Transcription
  misc_feature: MA Experiment 108462 PARAMETER Experiment Name: At_Germinating_Seeds_cDNA_P Parameter: Age (day) Value: 2 vs. 0
  misc_feature: MA Experiment 108462 PARAMETER Experiment Name: At_Germinating_Seeds_cDNA_P Parameter: Tissue Value: Germinating Seeds
  misc_feature: MA Experiment ID: 108463 Result: Up-regulated in Transcription
  misc_feature: MA Experiment 108463 PARAMETER Experiment Name: At_Germinating_Seeds_cDNA_P Parameter: Age (day) Value: 3 vs. 0
  misc_feature: MA Experiment 108463 PARAMETER Experiment Name: At_Germinating_Seeds_cDNA_P Parameter: Tissue Value: Germinating Seeds
  misc_feature: MA Experiment ID: 108464 Result: Up-regulated in Transcription
  misc_feature: MA Experiment 108464 PARAMETER Experiment Name: At_Germinating_Seeds_cDNA_P Parameter: Age (day) Value: 4 vs. 0
  misc_feature: MA Experiment 108464 PARAMETER Experiment Name: At_Germinating_Seeds_cDNA_P Parameter: Tissue Value: Germinating Seeds
  misc_feature: MA Experiment ID: 108585 Result: Up-regulated in Transcription
  misc_feature: MA Experiment 108585 PARAMETER Experiment Name: At_5mM_NaNP_cDNA_P Parameter: Timepoint (hr) Value: 6
  misc_feature: MA Experiment 108585 PARAMETER Experiment Name: At_5mM_NaNP_cDNA_P Parameter: Tissue Value: Aerial
  misc_feature: MA Experiment 108585 PARAMETER Experiment Name: At_5mM_NaNP_cDNA_P Parameter: Treatment Value: null
  misc_feature: MA Experiment ID: 108668 Result: Up-regulated in Transcription
  misc_feature: MA Experiment 108668 PARAMETER Experiment Name: At_2mM_SA_cDNA_P Parameter: Plant Line Value: WS
  misc_feature: MA Experiment 108668 PARAMETER Experiment Name: At_2mM_SA_cDNA_P Parameter: Timepoint (hr) Value: 6
  misc_feature: MA Experiment 108668 PARAMETER Experiment Name: At_2mM_SA_cDNA_P Parameter: Treatment Value: 2mM SA vs. No Treatment
  misc_feature: MA Experiment ID: 20000090 Result: Up-regulated in Transcription
  misc_feature: MA Experiment ID: 20000166 Result: Up-regulated in Transcription
  misc_feature: MA Experiment 20000166 PARAMETER Experiment Name: At_100uM_ABA_P Parameter: Age (day) Value: 14
  misc_feature: MA Experiment 20000166 PARAMETER Experiment Name: At_100uM_ABA_P Parameter: Organism Value: A. thaliana
  misc_feature: MA Experiment 20000166 PARAMETER Experiment Name: At_100uM_ABA_P Parameter: Plant Line Value: WS
  misc_feature: MA Experiment 20000166 PARAMETER Experiment Name: At_100uM_ABA_P Parameter: Timepoint (hr) Value: 1
  misc_feature: MA Experiment 20000166 PARAMETER Experiment Name: At_100uM_ABA_P Parameter: Tissue Value: Aerial
  misc_feature: MA Experiment 20000166 PARAMETER Experiment Name: At_100uM_ABA_P Parameter: Treatment Value: 100uM ABA vs. No Treatment
  misc_feature: MA Experiment ID: 20000171 Result: Down-regulated in Transcription
  misc_feature: MA Experiment 20000171 PARAMETER Experiment Name: At_42deg_Heat_P Parameter: Age (day) Value: 14
  misc_feature: MA Experiment 20000171 PARAMETER Experiment Name: At_42deg_Heat_P Parameter: Organism Value: A. thaliana
  misc_feature: MA Experiment 20000171 PARAMETER Experiment Name: At_42deg_Heat_P Parameter: Plant Line Value: WS
  misc_feature: MA Experiment 20000171 PARAMETER Experiment Name: At_42deg_Heat_P Parameter: Temperature (deg C) Value: 42 vs. 22
  misc_feature: MA Experiment 20000171 PARAMETER Experiment Name: At_42deg_Heat_P Parameter: Timepoint (hr) Value: 1
  misc_feature: MA Experiment 20000171 PARAMETER Experiment Name: At_42deg_Heat_P Parameter: Tissue Value: Aerial
  misc_feature: MA Experiment ID: 20000173 Result: Down-regulated in Transcription
  misc_feature: MA Experiment 20000173 PARAMETER Experiment Name: At_42deg_Heat_P Parameter: Age (day) Value: 14
  misc_feature: MA Experiment 20000173 PARAMETER Experiment Name: At_42deg_Heat_P Parameter: Organism Value: A. thaliana
  misc_feature: MA Experiment 20000173 PARAMETER Experiment Name: At_42deg_Heat_P Parameter: Plant Line Value: WS
  misc_feature: MA Experiment 20000173 PARAMETER Experiment Name: At_42deg_Heat_P Parameter: Temperature (deg C) Value: 42 vs. 22
  misc_feature: MA Experiment 20000173 PARAMETER Experiment Name: At_42deg_Heat_P Parameter: Timepoint (hr) Value: 6
  misc_feature: MA Experiment 20000173 PARAMETER Experiment Name: At_42deg_Heat_P Parameter: Tissue Value: Aerial
  misc_feature: MA Experiment ID: 20000182 Result: Up-regulated in Transcription
  misc_feature: MA Experiment 20000182 PARAMETER Experiment Name: At_2mM_SA_P Parameter: Age (day) Value: 14
  misc_feature: MA Experiment 20000182 PARAMETER Experiment Name: At_2mM_SA_P Parameter: Organism Value: A. thaliana
  misc_feature: MA Experiment 20000182 PARAMETER Experiment Name: At_2mM_SA_P Parameter: Plant Line Value: WS
  misc_feature: MA Experiment 20000182 PARAMETER Experiment Name: At_2mM_SA_P Parameter: Timepoint (hr) Value: 6
  misc_feature: MA Experiment 20000182 PARAMETER Experiment Name: At_2mM_SA_P Parameter: Tissue Value: Aerial
  misc_feature: MA Experiment 20000182 PARAMETER Experiment Name: At_2mM_SA_P Parameter: Treatment Value: 2mM SA vs. No Treatment
  misc_feature: MA Experiment ID: 20000184 Result: Down-regulated in Transcription
  misc_feature: MA Experiment 20000184 PARAMETER Experiment Name: At_Shoots__P Parameter: Age (day) Value: 7
  misc_feature: MA Experiment 20000184 PARAMETER Experiment Name: At_Shoots__P Parameter: Tissue Value: Shoots vs. Whole Plant
  misc_feature: MA Experiment ID: 20000185 Result: Down-regulated in Transcription
  misc_feature: MA Experiment 20000185 PARAMETER Experiment Name: At_Roots__P Parameter: Age (day) Value: 7 vs. 21
  misc_feature: MA Experiment 20000185 PARAMETER Experiment Name: At_Roots__P Parameter: Organism Value: A. thaliana
  misc_feature: MA Experiment 20000185 PARAMETER Experiment Name: At_Roots__P Parameter: Tissue Value: Roots vs. Whole Plant
  misc_feature: MA Experiment ID: 20000234 Result: Down-regulated in Transcription
  misc_feature: MA Experiment 20000234 PARAMETER Experiment Name: At_Siliques_P Parameter: Age (day) Value: 21
  misc_feature: MA Experiment 20000234 PARAMETER Experiment Name: At_Siliques_P Parameter: Organism Value: A. thaliana
  misc_feature: MA Experiment 20000234 PARAMETER Experiment Name: At_Siliques_P Parameter: Plant Line Value: WS
  misc_feature: MA Experiment 20000234 PARAMETER Experiment Name: At_Siliques_P Parameter: Tissue Value: Less Than 5mm Siliques vs. Whole Plant
  misc_feature: MA Experiment ID: 20000235 Result: Down-regulated in Transcription
  misc_feature: MA Experiment 20000235 PARAMETER Experiment Name: At_Siliques_P Parameter: Age (day) Value: 21
  misc_feature: MA Experiment 20000235 PARAMETER Experiment Name: At_Siliques_P Parameter: Organism Value: A. thaliana
  misc_feature: MA Experiment 20000235 PARAMETER Experiment Name: At_Siliques_P Parameter: Plant Line Value: WS
  misc_feature: MA Experiment 20000235 PARAMETER Experiment Name: At_Siliques_P Parameter: Tissue Value: 5-10mm Siliques vs. Whole Plant
  misc_feature: MA Experiment ID: 20000264 Result: Down-regulated in Transcription
  misc_feature: MA Experiment 20000264 PARAMETER Experiment Name: At_Open_Flower_P Parameter: Age (day) Value: 21
  misc_feature: MA Experiment 20000264 PARAMETER Experiment Name: At_Open_Flower_P Parameter: Plant Line Value: WS
  misc_feature: MA Experiment 20000264 PARAMETER Experiment Name: At_Open_Flower_P Parameter: Tissue Value: Open Flower vs. Whole Plant
  misc_feature: MA Experiment ID: 20000265 Result: Down-regulated in Transcription
  misc_feature: MA Experiment 20000265 PARAMETER Experiment Name: At_Open_Flower_P Parameter: Age (day) Value: 21
  misc_feature: MA Experiment 20000265 PARAMETER Experiment Name: At_Open_Flower_P Parameter: Plant Line Value: WS
  misc_feature: MA Experiment 20000265 PARAMETER Experiment Name: At_Open_Flower_P Parameter: Tissue Value: Closed Flower vs. Whole Plant
  misc_feature: MA Experiment ID: 20000286 Result: Down-regulated in Transcription
  misc_feature: MA Experiment 20000286 PARAMETER Experiment Name: At_Open_Flower_P Parameter: Age (day) Value: 21
  misc_feature: MA Experiment 20000286 PARAMETER Experiment Name: At_Open_Flower_P Parameter: Plant Line Value: WS
  misc_feature: MA Experiment 20000286 PARAMETER Experiment Name: At_Open_Flower_P Parameter: Tissue Value: Half Open vs. Whole Plant
  misc_feature: MA Experiment ID: 20000438 Result: Down-regulated in Transcription
  misc_feature: MA Experiment 20000438 PARAMETER Experiment Name: At_Shoots__P Parameter: Age (day) Value: 14
  misc_feature: MA Experiment 20000438 PARAMETER Experiment Name: At_Shoots__P Parameter: Tissue Value: Shoots vs. Whole Plant
  misc_feature: MA Experiment ID: 20000439 Result: Down-regulated in Transcription
  misc_feature: MA Experiment 20000439 PARAMETER Experiment Name: At_Roots__P Parameter: Age (day) Value: 14 vs. 21
  misc_feature: MA Experiment 20000439 PARAMETER Experiment Name: At_Roots__P Parameter: Organism Value: A. thaliana
  misc_feature: MA Experiment 20000439 PARAMETER Experiment Name: At_Roots__P Parameter: Tissue Value: Roots vs. Whole Plant
  misc_feature: MA Experiment ID: 20000527 Result: Up-regulated in Transcription
  misc_feature: MA Experiment 20000527 PARAMETER Experiment Name: At_10percent_PEG_P Parameter: Age (day) Value: 20
  misc_feature: MA Experiment 20000527 PARAMETER Experiment Name: At_10percent_PEG_P Parameter: Organism Value: A. thaliana
  misc_feature: MA Experiment 20000527 PARAMETER Experiment Name: At_10percent_PEG_P Parameter: Plant Line Value: WS
  misc_feature: MA Experiment 20000527 PARAMETER Experiment Name: At_10percent_PEG_P Parameter: Timepoint (day) Value: 20
  misc_feature: MA Experiment 20000527 PARAMETER Experiment Name: At_10percent_PEG_P Parameter: Tissue Value: Whole Plant
  misc_feature: MA Experiment 20000527 PARAMETER Experiment Name: At_10percent_PEG_P Parameter: Treatment Value: 10percent PEG vs. No Treatment
atcttaatctgctttctcgacaaagaaaagcagagaaagagagacttgttatactaaactcaatctctggcttttagttttgttgtctctctccttcagtttccaggaaaaaatctctttctcattaagctgttatatagatctgtgttcatactcttcttccacaatctaacccaaaaaaaaataactctttatttctctctacaaatttcatttgttccattttctcaattttagaacttaagaaacccaaaaagcaaatttttagtacatttttaggtttaattaaagtaattaatttttgtgtgtttccatcaaaattccacttgttttctacagaaattttcaatctttttattattgtatctctctttaagacatgaactgtctgttcttgttcaaatcaaagaaacccagaaagcaacagaaagacaacaacaagaacaaaagaaaaggtaaagagttgttacaaaactcagctccagaactgacgaatcggagtgaaacgtcttcgtttaatctccagacaccaagatcgttgccttctccaagaagtatcaaagatttgtatacagagagagaacaaaatcttagggttttttcttacgaagaactcagtaaagccacttatgtgtttagcagaaagcttgtgatcggtgaaggtggatttggtattgtttataaaggaaagattctcagcaatggagattcttctgatcctccacttgtcgttgccatcaagaaactcaatcgacaaggtttacagggtcacaagcaatggctagcagaggttcagtttcttggagtagtgaatcatccgaacgttgtgaagctcataggttattgctcggaagacggcgagaccgggatcgagaggcttttggtttatgagtacatgtcgaatcgaagtttagaagaccatctcttccctcgtcgatcacacacattaccgtggaaaaaaagactcgagatcatgcttggtgctgctgaaggattgacttatttacatgatcttaaggtgatatatagagatttcaaatcctctaatgtgcttttagacgatcaattctgtccaaaattatcggactttgggcttgccagagaaggacctgatggcgacaatactcatgtcactaccgcaagagttggaacacacggctatgcggctccggaatacgtgcaaacaggtcatcttcggttaaagagcgacgtctatagcttcggtgttgtgctctacgagatcataaccggacgcagaaccattgagaggaacaagccagtggctgaacgaaggctattggattgggtcaaagagtatcctgctgatagtcaacgtttcagcatgatcgttgaccctcggttacgcaacaattatccagctgctggagctaggagtttggctaaattggctgatctttgcctgaaaaagaacgataaagagcgacctacgatggaaattgtagtggaaagattgaaaaagattatcgaagaatcggatagtgaagattatccgatggctacgactacgaccaaggaaagtagtcaggtaaggaggagacaagttgcaaaacctgagaaacaaagtttgagaggggttagtgtcagaggatgattttgagtttagaagtttttttgcaagtttatatattataaataagtttatgcaatttgttggtttattgtgagattagtagagaaaatgtatcttattgtgtgttttgtaaataaaattcaatacggtgaatgagaatcattgagatcaagtttt

SEQ ID NO: 38356 - protein, 410 aa, Arabidopsis thaliana
  peptide (1)..(410): Ceres Seq. ID no. 13489029
  misc_feature (86)..(365): Pfam Name: Protein kinase domain Pfam Description: Protein kinase domain
  misc_feature (1)..(397): Homolog of NCBI NO: 25287613 NR Description: probable protein kinase [imported] - Arabidopsis
  misc_feature (33)..(387): Homolog of NCBI NO: 38345946 NR Description: OSJNBb0103I08.17 [Oryza sativa (japonica
  misc_feature (1)..(391): Homolog of NCBI NO: 15232764 NR Description: protein kinase, putative [Arabidopsis thaliana]
  misc_feature (15)..(378): Homolog of NCBI NO: 34901778 NR Description: protein serine/threonine kinase-like
  misc_feature (1)..(397): Homolog of NCBI NO: 30687780 NR Description: protein kinase, putative [Arabidopsis thaliana]
  misc_feature (1)..(397): Homolog of NCBI NO: 28416693 NR Description: At2g39110 [Arabidopsis thaliana]
  misc_feature (38)..(409): Homolog of NCBI NO: 7488278 NR Description: probable protein kinase [imported] - Arabidopsis
  misc_feature (18)..(376): Homolog of NCBI NO: 7434305 NR Description: probable protein kinase - Arabidopsis thaliana
  misc_feature (1)..(376): Homolog of NCBI NO: 30684132 NR Description: protein kinase, putative [Arabidopsis thaliana]
  misc_feature (1)..(410): Homolog of NCBI NO: 15238002 NR Description: protein kinase, putative [Arabidopsis thaliana]
MNCLFLFKSKKPRKQQKDNNKNKRKGKELLQNSAPELTNRSETSSFNLQTPRSLPSPRSIKDLYTEREQNLRVFSYEELSKATYVFSRKLVIGEGGFGIVYKGKILSNGDSSDPPLVVAIKKLNRQGLQGHKQWLAEVQFLGVVNHPNVVKLIGYCSEDGETGIERLLVYEYMSNRSLEDHLFPRRSHTLPWKKRLEIMLGAAEGLTYLHDLKVIYRDFKSSNVLLDDQFCPKLSDFGLAREGPDGDNTHVTTARVGTHGYAAPEYVQTGHLRLKSDVYSFGVVLYEIITGRRTIERNKPVAERRLLDWVKEYPADSQRFSMIVDPRLRNNYPAAGARSLAKLADLCLKKNDKERPTMEIVVERLKKIIEESDSEDYPMATTTTKESSQVRRRQVAKPEKQSLRGVSVRG

SEQ ID NO: 38357 - protein, 238 aa, Arabidopsis thaliana
  peptide (1)..(238): Ceres Seq. ID no. 13489030
  misc_feature (1)..(193): Pfam Name: Protein kinase domain Pfam Description: Protein kinase domain
  misc_feature (1)..(225): Homolog of NCBI NO: 25287613 NR Description: probable protein kinase [imported] - Arabidopsis
  misc_feature (1)..(215): Homolog of NCBI NO: 38345946 NR Description: OSJNBb0103I08.17 [Oryza sativa (japonica
  misc_feature (1)..(219): Homolog of NCBI NO: 15232764 NR Description: protein kinase, putative [Arabidopsis thaliana]
  misc_feature (1)..(206): Homolog of NCBI NO: 34901778 NR Description: protein serine/threonine kinase-like
  misc_feature (1)..(225): Homolog of NCBI NO: 30687780 NR Description: protein kinase, putative [Arabidopsis thaliana]
  misc_feature (1)..(225): Homolog of NCBI NO: 28416693 NR Description: At2g39110 [Arabidopsis thaliana]
  misc_feature (1)..(237): Homolog of NCBI NO: 7488278 NR Description: probable protein kinase [imported] - Arabidopsis
  misc_feature (1)..(204): Homolog of NCBI NO: 7434305 NR Description: probable protein kinase - Arabidopsis thaliana
  misc_feature (1)..(204): Homolog of NCBI NO: 30684132 NR Description: protein kinase, putative [Arabidopsis thaliana]
  misc_feature (1)..(238): Homolog of NCBI NO: 15238002 NR Description: protein kinase, putative [Arabidopsis thaliana]
MSNRSLEDHLFPRRSHTLPWKKRLEIMLGAAEGLTYLHDLKVIYRDFKSSNVLLDDQFCPKLSDFGLAREGPDGDNTHVTTARVGTHGYAAPEYVQTGHLRLKSDVYSFGVVLYEIITGRRTIERNKPVAERRLLDWVKEYPADSQRFSMIVDPRLRNNYPAAGARSLAKLADLCLKKNDKERPTMEIVVERLKKIIEESDSEDYPMATTTTKESSQVRRRQVAKPEKQSLRGVSVRG

SEQ ID NO: 38358 - protein, 212 aa, Arabidopsis thaliana
  peptide (1)..(212): Ceres Seq. ID no. 13489031
  misc_feature (1)..(167): Pfam Name: Protein kinase domain Pfam Description: Protein kinase domain
  misc_feature (1)..(199): Homolog of NCBI NO: 25287613 NR Description: probable protein kinase [imported] - Arabidopsis
  misc_feature (1)..(189): Homolog of NCBI NO: 38345946 NR Description: OSJNBb0103I08.17 [Oryza sativa (japonica
  misc_feature (1)..(193): Homolog of NCBI NO: 15232764 NR Description: protein kinase, putative [Arabidopsis thaliana]
  misc_feature (1)..(180): Homolog of NCBI NO: 34901778 NR Description: protein serine/threonine kinase-like
  misc_feature (1)..(199): Homolog of NCBI NO: 30687780 NR Description: protein kinase, putative [Arabidopsis thaliana]
  misc_feature (1)..(199): Homolog of NCBI NO: 28416693 NR Description: At2g39110 [Arabidopsis thaliana]
  misc_feature (1)..(211): Homolog of NCBI NO: 7488278 NR Description: probable protein kinase [imported] - Arabidopsis
  misc_feature (1)..(178): Homolog of NCBI NO: 7434305 NR Description: probable protein kinase - Arabidopsis thaliana
  misc_feature (1)..(178): Homolog of NCBI NO: 30684132 NR Description: protein kinase, putative [Arabidopsis thaliana]
  misc_feature (1)..(212): Homolog of NCBI NO: 15238002 NR Description: protein kinase, putative [Arabidopsis thaliana]
MLGAAEGLTYLHDLKVIYRDFKSSNVLLDDQFCPKLSDFGLAREGPDGDNTHVTTARVGTHGYAAPEYVQTGHLRLKSDVYSFGVVLYEIITGRRTIERNKPVAERRLLDWVKEYPADSQRFSMIVDPRLRNNYPAAGARSLAKLADLCLKKNDKERPTMEIVVERLKKIIEESDSEDYPMATTTTKESSQVRRRQVAKPEKQSLRGVSVRG

SEQ ID NO: 38359 - DNA, 1307 bp, Arabidopsis thaliana; identical to SEQ ID NO: 35946
  misc_feature (1)..(1307): Ceres Seq. ID no. 12482093
  misc_feature: MA Experiment ID: 20000180 Result: Up-regulated in Transcription
  misc_feature: MA Experiment 20000180 PARAMETER Experiment Name: At_Germinating_Seeds_P Parameter: Age (hr) Value: 24 vs. 0
  misc_feature: MA Experiment 20000180 PARAMETER Experiment Name: At_Germinating_Seeds_P Parameter: Tissue Value: Germinating Seeds
  misc_feature: MA Experiment ID: 20000184 Result: Up-regulated in Transcription
  misc_feature: MA Experiment 20000184 PARAMETER Experiment Name: At_Shoots__P Parameter: Age (day) Value: 7
  misc_feature: MA Experiment 20000184 PARAMETER Experiment Name: At_Shoots__P Parameter: Tissue Value: Shoots vs. Whole Plant
  misc_feature: MA Experiment ID: 20000185 Result: Up-regulated in Transcription
  misc_feature: MA Experiment 20000185 PARAMETER Experiment Name: At_Roots__P Parameter: Age (day) Value: 7 vs. 21
  misc_feature: MA Experiment 20000185 PARAMETER Experiment Name: At_Roots__P Parameter: Organism Value: A. thaliana
  misc_feature: MA Experiment 20000185 PARAMETER Experiment Name: At_Roots__P Parameter: Tissue Value: Roots vs. Whole Plant
  misc_feature: MA Experiment ID: 20000227 Result: Up-regulated in Transcription
  misc_feature: MA Experiment 20000227 PARAMETER Experiment Name: At_Root-Tips-vs-Tops_P Parameter: Tissue Value: Root Tips vs. Root Tops
  misc_feature: MA Experiment ID: 20000234 Result: Up-regulated in Transcription
  misc_feature: MA Experiment 20000234 PARAMETER Experiment Name: At_Siliques_P Parameter: Age (day) Value: 21
  misc_feature: MA Experiment 20000234 PARAMETER Experiment Name: At_Siliques_P Parameter: Organism Value: A. thaliana
  misc_feature: MA Experiment 20000234 PARAMETER Experiment Name: At_Siliques_P Parameter: Plant Line Value: WS
  misc_feature: MA Experiment 20000234 PARAMETER Experiment Name: At_Siliques_P Parameter: Tissue Value: Less Than 5mm Siliques vs. Whole Plant
  misc_feature: MA Experiment ID: 20000264 Result: Up-regulated in Transcription
  misc_feature: MA Experiment 20000264 PARAMETER Experiment Name: At_Open_Flower_P Parameter: Age (day) Value: 21
  misc_feature: MA Experiment 20000264 PARAMETER Experiment Name: At_Open_Flower_P Parameter: Plant Line Value: WS
  misc_feature: MA Experiment 20000264 PARAMETER Experiment Name: At_Open_Flower_P Parameter: Tissue Value: Open Flower vs. Whole Plant
  misc_feature: MA Experiment ID: 20000265 Result: Up-regulated in Transcription
  misc_feature: MA Experiment 20000265 PARAMETER Experiment Name: At_Open_Flower_P Parameter: Age (day) Value: 21
  misc_feature: MA Experiment 20000265 PARAMETER Experiment Name: At_Open_Flower_P Parameter: Plant Line Value: WS
  misc_feature: MA Experiment 20000265 PARAMETER Experiment Name: At_Open_Flower_P Parameter: Tissue Value: Closed Flower vs. Whole Plant
  misc_feature: MA Experiment ID: 20000286 Result: Up-regulated in Transcription
  misc_feature: MA Experiment 20000286 PARAMETER Experiment Name: At_Open_Flower_P Parameter: Age (day) Value: 21
  misc_feature: MA Experiment 20000286 PARAMETER Experiment Name: At_Open_Flower_P Parameter: Plant Line Value: WS
  misc_feature: MA Experiment 20000286 PARAMETER Experiment Name: At_Open_Flower_P Parameter: Tissue Value: Half Open vs. Whole Plant
  misc_feature: MA Experiment ID: 20000437 Result: Down-regulated in Transcription
  misc_feature: MA Experiment 20000437 PARAMETER Experiment Name: At_Drought_P Parameter: Age (day) Value: 8
  misc_feature: MA Experiment 20000437 PARAMETER Experiment Name: At_Drought_P Parameter: Organism Value: A. thaliana
  misc_feature: MA Experiment 20000437 PARAMETER Experiment Name: At_Drought_P Parameter: Plant Line Value: WS
  misc_feature: MA Experiment 20000437 PARAMETER Experiment Name: At_Drought_P Parameter: Timepoint (hr) Value: 24
  misc_feature: MA Experiment 20000437 PARAMETER Experiment Name: At_Drought_P Parameter: Tissue Value: Whole Plant
  misc_feature: MA Experiment 20000437 PARAMETER Experiment Name: At_Drought_P Parameter: Treatment Value: Drought vs. No Drought
  misc_feature: MA Experiment ID: 20000439 Result: Up-regulated in Transcription
  misc_feature: MA Experiment 20000439 PARAMETER Experiment Name: At_Roots__P Parameter: Age (day) Value: 14 vs. 21
  misc_feature: MA Experiment 20000439 PARAMETER Experiment Name: At_Roots__P Parameter: Organism Value: A. thaliana
  misc_feature: MA Experiment 20000439 PARAMETER Experiment Name: At_Roots__P Parameter: Tissue Value: Roots vs. Whole Plant
  misc_feature: MA Experiment ID: 20001911 Result: Down-regulated in Transcription
  misc_feature: MA Experiment 20001911 PARAMETER Experiment Name: At_Drought_Reproduction_P Parameter: Age (day) Value: 40
  misc_feature: MA Experiment 20001911 PARAMETER Experiment Name: At_Drought_Reproduction_P Parameter: Organism Value: A. thaliana
  misc_feature: MA Experiment 20001911 PARAMETER Experiment Name: At_Drought_Reproduction_P Parameter: Plant Line Value: WS
  misc_feature: MA Experiment 20001911 PARAMETER Experiment Name: At_Drought_Reproduction_P Parameter: Timepoint (day) Value: 10
  misc_feature: MA Experiment 20001911 PARAMETER Experiment Name: At_Drought_Reproduction_P Parameter: Tissue Value: Flowers
  misc_feature: MA Experiment 20001911 PARAMETER Experiment Name: At_Drought_Reproduction_P Parameter: Treatment Value: Drought vs. No Drought
  misc_feature: Phenotype: ROSETTE LEAVES Shape-Serrate
  misc_feature: Phenotype: WHOLE PLANT Other
  misc_feature: Phenotype: FERTILITY Fertility-Reduced
  misc_feature: Phenotype: ROSETTE LEAVES Shape-Serrate
  misc_feature: Phenotype: WHOLE PLANT Other
  misc_feature: Phenotype: FERTILITY Fertility-Reduced
  misc_feature: Phenotype: ROSETTE LEAVES Shape-Lanceolate
  misc_feature: Phenotype: ROSETTE LEAVES Shape-Serrate
  misc_feature: Phenotype: WHOLE PLANT Color-Dark Green
  misc_feature: Phenotype: FERTILITY Fertility-Reduced

SEQ ID NO: 38360 - protein, 255 aa, Arabidopsis thaliana; identical to SEQ ID NO: 35947
  peptide (1)..(255): Ceres Seq. ID no. 12482094
  misc_feature (179)..(253): Pfam Name: Biotin-requiring enzyme Pfam Description: Biotin-requiring enzyme
  misc_feature (179)..(253): Pfam Name: Biotin-requiring enzyme Pfam Description: Biotin-requiring enzyme
  misc_feature (45)..(255): Homolog of NCBI NO: 29169309 NR Description: biotin carboxylase carrier protein [Lycopersicon
  misc_feature (114)..(255): Homolog of NCBI NO: 2129788 NR Description: biotin carboxyl carrier protein (clone BP7) -
  misc_feature (1)..(255): Homolog of NCBI NO: 2129787 NR Description: biotin carboxyl carrier protein (clone BP6)
  misc_feature (45)..(255): Homolog of NCBI NO: 29169309 NR Description: biotin carboxylase carrier protein [Lycopersicon
  misc_feature (1)..(255): Homolog of NCBI NO: 2129787 NR Description: biotin carboxyl carrier protein (clone BP6)
  misc_feature (36)..(252): Homolog of NCBI NO: 11357199 NR Description: biotin carboxyl carrier protein homolog
  misc_feature (1)..(255): Homolog of NCBI NO: 18417704 NR Description: biotin carboxyl carrier protein 2 (BCCP2)
  misc_feature (1)..(255): Homolog of NCBI NO: 2129789 NR Description: biotin carboxyl carrier protein precursor (clone
  misc_feature (114)..(255): Homolog of NCBI NO: 2129788 NR Description: biotin carboxyl carrier protein (clone BP7) -
  misc_feature (1)..(255): Homolog of NCBI NO: 2129789 NR Description: biotin carboxyl carrier protein precursor (clone
  misc_feature (36)..(252): Homolog of NCBI NO: 11357199 NR Description: biotin carboxyl carrier protein homolog
  misc_feature (1)..(255): Homolog of NCBI NO: 18417704 NR Description: biotin carboxyl carrier protein 2 (BCCP2)

SEQ ID NO: 38361 - protein, 190 aa, Arabidopsis thaliana; identical to SEQ ID NO: 35948
  peptide (1)..(190): Ceres Seq. ID no. 12482095
  misc_feature (114)..(188): Pfam Name: Biotin-requiring enzyme Pfam Description: Biotin-requiring enzyme
  misc_feature (114)..(188): Pfam Name: Biotin-requiring enzyme Pfam Description: Biotin-requiring enzyme
  misc_feature (1)..(190): Homolog of NCBI NO: 29169309 NR Description: biotin carboxylase carrier protein [Lycopersicon
  misc_feature (49)..(190): Homolog of NCBI NO: 2129788 NR Description: biotin carboxyl carrier protein (clone BP7) -
  misc_feature (1)..(190): Homolog of NCBI NO: 2129787 NR Description: biotin carboxyl carrier protein (clone BP6)
  misc_feature (1)..(190): Homolog of NCBI NO: 29169309 NR Description: biotin carboxylase carrier protein [Lycopersicon
  misc_feature (1)..(190): Homolog of NCBI NO: 2129787 NR Description: biotin carboxyl carrier protein (clone BP6)
  misc_feature (1)..(187): Homolog of NCBI NO: 11357199 NR Description: biotin carboxyl carrier protein homolog
  misc_feature (1)..(190): Homolog of NCBI NO: 18417704 NR Description: biotin carboxyl carrier protein 2 (BCCP2)
  misc_feature (1)..(190): Homolog of NCBI NO: 2129789 NR Description: biotin carboxyl carrier protein precursor (clone
  misc_feature (49)..(190): Homolog of NCBI NO: 2129788 NR Description: biotin carboxyl carrier protein (clone BP7) -
  misc_feature (1)..(190): Homolog of NCBI NO: 2129789 NR Description: biotin carboxyl carrier protein precursor (clone
  misc_feature (1)..(187): Homolog of NCBI NO: 11357199 NR Description: biotin carboxyl carrier protein homolog
  misc_feature (1)..(190): Homolog of NCBI NO: 18417704 NR Description: biotin carboxyl carrier protein 2 (BCCP2)

SEQ ID NO: 38362 - protein, 184 aa, Arabidopsis thaliana; identical to SEQ ID NO: 35949
  peptide (1)..(184): Ceres Seq. ID no. 12482096
  misc_feature (108)..(182): Pfam Name: Biotin-requiring enzyme Pfam Description: Biotin-requiring enzyme
  misc_feature (108)..(182): Pfam Name: Biotin-requiring enzyme Pfam Description: Biotin-requiring enzyme
  misc_feature (1)..(184): Homolog of NCBI NO: 29169309 NR Description: biotin carboxylase carrier protein [Lycopersicon
  misc_feature (43)..(184): Homolog of NCBI NO: 2129788 NR Description: biotin carboxyl carrier protein (clone BP7) -
  misc_feature (1)..(184): Homolog of NCBI NO: 2129787 NR Description: biotin carboxyl carrier protein (clone BP6)
  misc_feature (1)..(184): Homolog of NCBI NO: 29169309 NR Description: biotin carboxylase carrier protein [Lycopersicon
  misc_feature (1)..(184): Homolog of NCBI NO: 2129787 NR Description: biotin carboxyl carrier protein (clone BP6)
  misc_feature (1)..(181): Homolog of NCBI NO: 11357199 NR Description: biotin carboxyl carrier protein homolog
  misc_feature (1)..(184): Homolog of NCBI NO: 18417704 NR Description: biotin carboxyl carrier protein 2 (BCCP2)
  misc_feature (1)..(184): Homolog of NCBI NO: 2129789 NR Description: biotin carboxyl carrier protein precursor (clone
  misc_feature (43)..(184): Homolog of NCBI NO: 2129788 NR Description: biotin carboxyl carrier protein (clone BP7) -
  misc_feature (1)..(184): Homolog of NCBI NO: 2129789 NR Description: biotin carboxyl carrier protein precursor (clone
  misc_feature (1)..(181): Homolog of NCBI NO: 11357199 NR Description: biotin carboxyl carrier protein homolog
  misc_feature (1)..(184): Homolog of NCBI NO: 18417704 NR Description: biotin carboxyl carrier protein 2 (BCCP2)

SEQ ID NO: 38363 - DNA, 1302 bp, Arabidopsis thaliana
  misc_feature (1)..(1302): Ceres Seq. ID no. 12327836
  misc_feature: MA Experiment ID: 20001905 Result: Up-regulated in Transcription
  misc_feature: MA Experiment 20001905 PARAMETER Experiment Name: At_Drought_Reproduction_P Parameter: Age (day) Value: 40
  misc_feature: MA Experiment 20001905 PARAMETER Experiment Name: At_Drought_Reproduction_P Parameter: Organism Value: A. thaliana
  misc_feature: MA Experiment 20001905 PARAMETER Experiment Name: At_Drought_Reproduction_P Parameter: Plant Line Value: WS
  misc_feature: MA Experiment 20001905 PARAMETER Experiment Name: At_Drought_Reproduction_P Parameter: Timepoint (day) Value: 10
  misc_feature: MA Experiment 20001905 PARAMETER Experiment Name: At_Drought_Reproduction_P Parameter: Tissue Value: Rosettes
  misc_feature: MA Experiment 20001905 PARAMETER Experiment Name: At_Drought_Reproduction_P Parameter: Treatment Value: Drought vs. No Drought
agagtttttcccattgaagaagatcgagtgaaattcgaagagcgaatcaaagaggaagaagaagaaggaggaggtatagcaatgggggtcgattattacaaggttcttcaggtggatcggaatgcgaaagacgacgacttgaagaaagcttatcgcaaactcgccatgaagtggcatccagacaagaaccctaacaacaaaaaagacgccgaagccaaattcaagcagatctctgaagcttacgatgttttgagtgatcctcaaaagagagccatctatgatcaatatggagaagaaggtctaacaagccaggctccgcctcccggagcaggcggcgggttttcggatggaggggcttcgttccggttcaacggtagaagcgcagatgatatcttctcggagttctttggcttcacaagaccatttggtgactcacgtggtgcaggtccctctaatgggttccggttcgaagaagacgttttctcgtcgaatgttgttccaccgaggaaagctgcccctattgagagacaacttccttgtagtttggaagatctctacaaaggagtcagtaagaagatgaagatctctcgggacgtcctcgattcaagcgggagacccacaacagttgaggagatcttgacgatagaaatcaagccagggtggaagaaagggacgaagattaccttcccggagaaaggaaacgagcagcgaggaatcataccatcagatcttgtattcatagttgatgagaagccgcatgctgtgttcaagcgagacgggaatgaccttgtgatgacacagaagatccctcttgtggaagccctcacgggatacactgctcaggtctcgactctggatggaagatcagtaacggttccaattaacaacgtgatcagcccttcttatgaagaggtggtgaaaggtgaaggcatgccaatccctaaagacccatcaaagaaagggaacttgagaatcaagttcactgttaagttcccatcgaggctaacaacagagcagaaatctggaatcaaacgaatgttttcgtcttcctagtctgtctctttctttcttactgctacgtttgattttcggttatgactaggtatgtggtagtgtgggtctttgtttgggagattgtgaggttcttgaacgatgtcgcattgagatttctcaacgtccttcagagcttttggtttgggtttggggttttacattttagcatattttttttttttcgttcttttaaatttgttattagattggggaaaaaataaaaaactaaataaagattctttgcttctc

SEQ ID NO: 38364 - protein, 350 aa, Arabidopsis thaliana
  peptide (1)..(350): Ceres Seq. ID no. 12327837
  misc_feature (225)..(347): Pfam Name: DnaJ C terminal region Pfam Description: DnaJ C terminal region
  misc_feature (28)..(346): Homolog of NCBI NO: 34905276 NR Description: putative heat shock protein
  misc_feature (108)..(349): Homolog of NCBI NO: 6179940 NR Description: DnaJ-like protein [Nicotiana tabacum]
  misc_feature (108)..(349): Homolog of NCBI NO: 11863723 NR Description: DnaJ like protein [Lycopersicon esculentum]
  misc_feature (28)..(350): Homolog of NCBI NO: 15218901 NR Description: chaperone, putative; protein id: At1g59725.1
  misc_feature (28)..(120): Homolog of NCBI NO: 15228294 NR Description: heat shock protein-like protein; protein id:
  misc_feature (119)..(346): Homolog of NCBI NO: 15228294 NR Description: heat shock protein-like protein; protein id:
  misc_feature (28)..(346): Homolog of NCBI NO: 15225377 NR Description: putative heat shock protein
  misc_feature (28)..(348): Homolog of NCBI NO: 15240968 NR Description: heat shock protein 40-like
  misc_feature (28)..(350): Homolog of NCBI NO: 15231987 NR Description: putative heat shock protein
  misc_feature (28)..(350): Homolog of NCBI NO: 21618097 NR Description: putative heat shock protein [Arabidopsis thaliana]
RVFPIEEDRVKFEERIKEEEEEGGGIAMGVDYYKVLQVDRNAKDDDLKKAYRKLAMKWHPDKNPNNKKDAEAKFKQISEAYDVLSDPQKRAIYDQYGEEGLTSQAPPPGAGGGFSDGGASFRFNGRSADDIFSEFFGFTRPFGDSRGAGPSNGFRFEEDVFSSNVVPPRKAAPIERQLPCSLEDLYKGVSKKMKISRDVLDSSGRPTTVEEILTIEIKPGWKKGTKITFPEKGNEQRGIIPSDLVFIVDEKPHAVFKRDGNDLVMTQKIPLVEALTGYTAQVSTLDGRSVTVPINNVISPSYEEVVKGEGMPIPKDPSKKGNLRIKFTVKFPSRLTTEQKSGIKRMFSSS

SEQ ID NO: 38365 - protein, 323 aa, Arabidopsis thaliana
  peptide (1)..(323): Ceres Seq. ID no. 12327838
  misc_feature (198)..(320): Pfam Name: DnaJ C terminal region Pfam Description: DnaJ C terminal region
  misc_feature (1)..(319): Homolog of NCBI NO: 34905276 NR Description: putative heat shock protein
  misc_feature (81)..(322): Homolog of NCBI NO: 6179940 NR Description: DnaJ-like protein [Nicotiana tabacum]
  misc_feature (81)..(322): Homolog of NCBI NO: 11863723 NR Description: DnaJ like protein [Lycopersicon esculentum]
  misc_feature (1)..(323): Homolog of NCBI NO: 15218901 NR Description: chaperone, putative; protein id: At1g59725.1
  misc_feature (1)..(93): Homolog of NCBI NO: 15228294 NR Description: heat shock protein-like protein; protein id:
  misc_feature (92)..(319): Homolog of NCBI NO: 15228294 NR Description: heat shock protein-like protein; protein id:
  misc_feature (1)..(319): Homolog of NCBI NO: 15225377 NR Description: putative heat shock protein
  misc_feature (1)..(321): Homolog of NCBI NO: 15240968 NR Description: heat shock protein 40-like
  misc_feature (1)..(323): Homolog of NCBI NO: 15231987 NR Description: putative heat shock protein
  misc_feature (1)..(323): Homolog of NCBI NO: 21618097 NR Description: putative heat shock protein [Arabidopsis thaliana]
MGVDYYKVLQVDRNAKDDDLKKAYRKLAMKWHPDKNPNNKKDAEAKFKQISEAYDVLSDPQKRAIYDQYGEEGLTSQAPPPGAGGGFSDGGASFRFNGRSADDIFSEFFGFTRPFGDSRGAGPSNGFRFEEDVFSSNVVPPRKAAPIERQLPCSLEDLYKGVSKKMKISRDVLDSSGRPTTVEEILTIEIKPGWKKGTKITFPEKGNEQRGIIPSDLVFIVDEKPHAVFKRDGNDLVMTQKIPLVEALTGYTAQVSTLDGRSVTVPINNVISPSYEEVVKGEGMPIPKDPSKKGNLRIKFTVKFPSRLTTEQKSGIKRMFSSS

SEQ ID NO: 38366 - protein, 295 aa, Arabidopsis thaliana
  peptide (1)..(295): Ceres Seq. ID no. 12327839
  misc_feature (170)..(292): Pfam Name: DnaJ C terminal region Pfam Description: DnaJ C terminal region
  misc_feature (1)..(291): Homolog of NCBI NO: 34905276 NR Description: putative heat shock protein
  misc_feature (53)..(294): Homolog of NCBI NO: 6179940 NR Description: DnaJ-like protein [Nicotiana tabacum]
  misc_feature (53)..(294): Homolog of NCBI NO: 11863723 NR Description: DnaJ like protein [Lycopersicon esculentum]
  misc_feature (1)..(295): Homolog of NCBI NO: 15218901 NR Description: chaperone, putative; protein id: At1g59725.1
  misc_feature (1)..(65): Homolog of NCBI NO: 15228294 NR Description: heat shock protein-like protein; protein id:
  misc_feature (64)..(291): Homolog of NCBI NO: 15228294 NR Description: heat shock protein-like protein; protein id:
  misc_feature (1)..(291): Homolog of NCBI NO: 15225377 NR Description: putative heat shock protein
  misc_feature (1)..(293): Homolog of NCBI NO: 15240968 NR Description: heat shock protein 40-like
  misc_feature (1)..(295): Homolog of NCBI NO: 15231987 NR Description: putative heat shock protein
  misc_feature (1)..(295): Homolog of NCBI NO: 21618097 NR Description: putative heat shock protein [Arabidopsis thaliana]
MKWHPDKNPNNKKDAEAKFKQISEAYDVLSDPQKRAIYDQYGEEGLTSQAPPPGAGGGFSDGGASFRFNGRSADDIFSEFFGFTRPFGDSRGAGPSNGFRFEEDVFSSNVVPPRKAAPIERQLPCSLEDLYKGVSKKMKISRDVLDSSGRPTTVEEILTIEIKPGWKKGTKITFPEKGNEQRGIIPSDLVFIVDEKPHAVFKRDGNDLVMTQKIPLVEALTGYTAQVSTLDGRSVTVPINNVISPSYEEVVKGEGMPIPKDPSKKGNLRIKFTVKFPSRLTTEQKSGIKRMFSSS

SEQ ID NO: 38367 - DNA, 1188 bp, Arabidopsis thaliana
  misc_feature (1)..(1188): Ceres Seq. ID no. 12329150
  misc_feature: MA Experiment ID: 108461 Result: Down-regulated in Transcription
  misc_feature: MA Experiment 108461 PARAMETER Experiment Name: At_Germinating_Seeds_cDNA_P Parameter: Age (day) Value: 1 vs. 0
  misc_feature: MA Experiment 108461 PARAMETER Experiment Name: At_Germinating_Seeds_cDNA_P Parameter: Tissue Value: Germinating Seeds
  misc_feature: MA Experiment ID: 108462 Result: Down-regulated in Transcription
  misc_feature: MA Experiment 108462 PARAMETER Experiment Name: At_Germinating_Seeds_cDNA_P Parameter: Age (day) Value: 2 vs. 0
  misc_feature: MA Experiment 108462 PARAMETER Experiment Name: At_Germinating_Seeds_cDNA_P Parameter: Tissue Value: Germinating Seeds
  misc_feature: MA Experiment ID: 108573 Result: Up-regulated in Transcription
  misc_feature: MA Experiment 108573 PARAMETER Experiment Name: At_Drought_cDNA_P Parameter: Timepoint (hr) Value: 6
  misc_feature: MA Experiment 108573 PARAMETER Experiment Name: At_Drought_cDNA_P Parameter: Tissue Value: Aerial
  misc_feature: MA Experiment 108573 PARAMETER Experiment Name: At_Drought_cDNA_P Parameter: Treatment Value: Drought vs. No Drought
  misc_feature: MA Experiment ID: 108585 Result: Up-regulated in Transcription
  misc_feature: MA Experiment 108585 PARAMETER Experiment Name: At_5mM_NaNP_cDNA_P Parameter: Timepoint (hr) Value: 6
  misc_feature: MA Experiment 108585 PARAMETER Experiment Name: At_5mM_NaNP_cDNA_P Parameter: Tissue Value: Aerial
  misc_feature: MA Experiment 108585 PARAMETER Experiment Name: At_5mM_NaNP_cDNA_P Parameter: Treatment Value: null
  misc_feature: MA Experiment ID: 20000224 Result: Down-regulated in Transcription
  misc_feature: MA Experiment ID: 20000264 Result: Up-regulated in Transcription
  misc_feature: MA Experiment 20000264 PARAMETER Experiment Name: At_Open_Flower_P Parameter: Age (day) Value: 21
  misc_feature: MA Experiment 20000264 PARAMETER Experiment Name: At_Open_Flower_P Parameter: Plant Line Value: WS
  misc_feature: MA Experiment 20000264 PARAMETER Experiment Name: At_Open_Flower_P Parameter: Tissue Value: Open Flower vs. Whole Plant
  misc_feature: MA Experiment ID: 20000286 Result: Up-regulated in Transcription
  misc_feature: MA Experiment 20000286 PARAMETER Experiment Name: At_Open_Flower_P Parameter: Age (day) Value: 21
  misc_feature: MA Experiment 20000286 PARAMETER Experiment Name: At_Open_Flower_P Parameter: Plant Line Value: WS
  misc_feature: MA Experiment 20000286 PARAMETER Experiment Name: At_Open_Flower_P Parameter: Tissue Value: Half Open vs. Whole Plant
aaatccagtttcgctcctccttgctctagctctgttatctgattcgtaaccattgatgaaatgcgagttctcgacgaaattgcagagtcaccatttctgatttcaccgctaaaccctaattcgacagccaatggatatagatgggtcgataagtgccatggattcttacataacacggttctcgttgcggcttctctcttcttcgtcgcttacttagcttacgaagcgaagaagagtctgtctaaactctcgaatcggagatcttatatcatgattgcttattatggttgtctttggcttgttagcttgctcaatcttgcttggtgctgtctccagggttgggaatgtactcctgggaaagaagttgtttggaatctgttaactttgttcacaacatctggaatgttgtttctggaagtaagcttggtggcttttctcttccaaggaaactatgcaagcggtgcagaagcattaactagaacgttcctaatctcgggttttattgttgctcttgatttgctttctcaaggcaatttttctctttggattggagtgccattgtttattgacaacaatgaaaatggaaaaacgttcaaatggggcttatggatcattcataagcttctactcactggcgtttatgggatggtgttcttgatgtacaactctaggtggagagaaaaattgcctgcaaggcctgcattctacaactacataatcatcatgttcgccttatacagcctttacctagttgcatctgcgtttaccgcaaacaacgcgcattttggtttctggttatatgggatcatgagtgtttgctaccacgcattataccttcctcttctttacataacgttcctcgcagactttttccaggaagaagatttgaacttggagaatgtatactactcagagatgaaggatgctggatttttcgactctgattgggaataggactaggataacaaacatcttcctcattttctcaatctgtaaatacacgttgggtaggatctcctagaagtcatggctgctttttccggctttggcgggttacattttagggtctagtcttttgtatgtctgtactttttcctcatgtttctttctcttttataaatccaaaatgtcttgtgaatctctttgttccttaagctgataatctaaaagaaagttttgtagtagtcc

SEQ ID NO: 38368 - protein, 297 aa, Arabidopsis thaliana
  peptide (1)..(297): Ceres Seq. ID no. 12329151
  misc_feature (40)..(274): Homolog of NCBI NO: 26354422 NR Description: unnamed protein product [Mus musculus]
  misc_feature (40)..(274): Homolog of NCBI NO: 6755859 NR Description: transmembrane domain protein regulated in
  misc_feature (28)..(163): Homolog of NCBI NO: 21326119 NR Description: putative expressed protein [Sorghum bicolor]
  misc_feature (148)..(297): Homolog of NCBI NO: 21326119 NR Description: putative expressed protein [Sorghum bicolor]
  misc_feature (130)..(263): Homolog of NCBI NO: 7485300 NR Description: hypothetical protein A_TM021B04.15 - Arabidopsis
  misc_feature (1)..(297): Homolog of NCBI NO: 12322847 NR Description: unknown protein; 15342-13483 [Arabidopsis
  misc_feature (1)..(297): Homolog of NCBI NO: 18397089 NR Description: expressed protein
  misc_feature (1)..(297): Homolog of NCBI NO: 21618098 NR Description: unknown [Arabidopsis thaliana]
  misc_feature (1)..(297): Homolog of NCBI NO: 15240462 NR Description: putative protein
  misc_feature (1)..(297): Homolog of NCBI NO: 14532472 NR Description: AT5g27210/T21B4_120 [Arabidopsis thaliana]
MRVLDEIAESPFLISPLNPNSTANGYRWVDKCHGFLHNTVLVAASLFFVAYLAYEAKKSLSKLSNRRSYIMIAYYGCLWLVSLLNLAWCCLQGWECTPGKEVVWNLLTLFTTSGMLFLEVSLVAFLFQGNYASGAEALTRTFLISGFIVALDLLSQGNFSLWIGVPLFIDNNENGKTFKWGLWIIHKLLLTGVYGMVFLMYNSRWREKLPARPAFYNYIIIMFALYSLYLVASAFTANNAHFGFWLYGIMSVCYHALYLPLLYITFLADFFQEEDLNLENVYYSEMKDAGFFDSDWE

SEQ ID NO: 38369 - protein, 227 aa, Arabidopsis thaliana
  peptide (1)..(227): Ceres Seq. ID no. 12329152
  misc_feature (1)..(204): Homolog of NCBI NO: 26354422 NR Description: unnamed protein product [Mus musculus]
  misc_feature (1)..(204): Homolog of NCBI NO: 6755859 NR Description: transmembrane domain protein regulated in
  misc_feature (1)..(93): Homolog of NCBI NO: 21326119 NR Description: putative expressed protein [Sorghum bicolor]
  misc_feature (78)..(227): Homolog of NCBI NO: 21326119 NR Description: putative expressed protein [Sorghum bicolor]
  misc_feature (60)..(193): Homolog of NCBI NO: 7485300 NR Description: hypothetical protein A_TM021B04.15 - Arabidopsis
  misc_feature (1)..(227): Homolog of NCBI NO: 12322847 NR Description: unknown protein; 15342-13483 [Arabidopsis
  misc_feature (1)..(227): Homolog of NCBI NO: 18397089 NR Description: expressed protein
  misc_feature (1)..(227): Homolog of NCBI NO: 21618098 NR Description: unknown [Arabidopsis thaliana]
  misc_feature (1)..(227): Homolog of NCBI NO: 15240462 NR Description: putative protein
  misc_feature (1)..(227): Homolog of NCBI NO: 14532472 NR Description: AT5g27210/T21B4_120 [Arabidopsis thaliana]
MIAYYGCLWLVSLLNLAWCCLQGWECTPGKEVVWNLLTLFTTSGMLFLEVSLVAFLFQGNYASGAEALTRTFLISGFIVALDLLSQGNFSLWIGVPLFIDNNENGKTFKWGLWIIHKLLLTGVYGMVFLMYNSRWREKLPARPAFYNYIIIMFALYSLYLVASAFTANNAHFGFWLYGIMSVCYHALYLPLLYITFLADFFQEEDLNLENVYYSEMKDAGFFDSDWE

SEQ ID NO: 38370 - protein, 183 aa, Arabidopsis thaliana
  peptide (1)..(183): Ceres Seq. ID no. 12329153
  misc_feature (1)..(160): Homolog of NCBI NO: 26354422 NR Description: unnamed protein product [Mus musculus]
  misc_feature (1)..(160): Homolog of NCBI NO: 6755859 NR Description: transmembrane domain protein regulated in
  misc_feature (1)..(49): Homolog of NCBI NO: 21326119 NR Description: putative expressed protein [Sorghum bicolor]
  misc_feature (34)..(183): Homolog of NCBI NO: 21326119 NR Description: putative expressed protein [Sorghum bicolor]
  misc_feature (16)..(149): Homolog of NCBI NO: 7485300 NR Description: hypothetical protein A_TM021B04.15 - Arabidopsis
  misc_feature (1)..(183): Homolog of NCBI NO: 12322847 NR Description: unknown protein; 15342-13483 [Arabidopsis
  misc_feature (1)..(183): Homolog of NCBI NO: 18397089 NR Description: expressed protein
  misc_feature (1)..(183): Homolog of NCBI NO: 21618098 NR Description: unknown [Arabidopsis thaliana]
  misc_feature (1)..(183): Homolog of NCBI NO: 15240462 NR Description: putative protein
  misc_feature (1)..(183): Homolog of NCBI NO: 14532472 NR Description: AT5g27210/T21B4_120 [Arabidopsis thaliana]
MLFLEVSLVAFLFQGNYASGAEALTRTFLISGFIVALDLLSQGNFSLWIGVPLFIDNNENGKTFKWGLWIIHKLLLTGVYGMVFLMYNSRWREKLPARPAFYNYIIIMFALYSLYLVASAFTANNAHFGFWLYGIMSVCYHALYLPLLYITFLADFFQEEDLNLENVYYSEMKDAGFFDSDWE

SEQ ID NO: 38371 - DNA, 1213 bp, Arabidopsis thaliana
  misc_feature (1)..(1213): Ceres Seq. ID no. 12560121
  misc_feature: MA Experiment ID: 20000184 Result: Up-regulated in Transcription
  misc_feature: MA Experiment 20000184 PARAMETER Experiment Name: At_Shoots__P Parameter: Age (day) Value: 7
  misc_feature: MA Experiment 20000184 PARAMETER Experiment Name: At_Shoots__P Parameter: Tissue Value: Shoots vs. Whole Plant
  misc_feature: MA Experiment ID: 20000495 Result: Up-regulated in Transcription
  misc_feature: MA Experiment 20000495 PARAMETER Experiment Name: At_Guard_Cells_P Parameter: Harvest Date Value: 8/2/2002
  misc_feature: MA Experiment 20000495 PARAMETER Experiment Name: At_Guard_Cells_P Parameter: Organism Value: A. thaliana
  misc_feature: MA Experiment 20000495 PARAMETER Experiment Name: At_Guard_Cells_P Parameter: Tissue Value: Guard Cells vs. Leaves
  misc_feature: MA Experiment ID: 20001557 Result: Up-regulated in Transcription
  misc_feature: MA Experiment 20001557 PARAMETER Experiment Name: At_Drought_Soil_Dry_P Parameter: Age (day) Value: 27
  misc_feature: MA Experiment 20001557 PARAMETER Experiment Name: At_Drought_Soil_Dry_P Parameter: Organism Value: A. thaliana
  misc_feature: MA Experiment 20001557 PARAMETER Experiment Name: At_Drought_Soil_Dry_P Parameter: Plant Line Value: WS
  misc_feature: MA Experiment 20001557 PARAMETER Experiment Name: At_Drought_Soil_Dry_P Parameter: Post Timepoint (hr) Value: 3
  misc_feature: MA Experiment 20001557 PARAMETER Experiment Name: At_Drought_Soil_Dry_P Parameter: Post-Treatment Value: Re-Water vs. No Drought
  misc_feature: MA Experiment 20001557 PARAMETER Experiment Name: At_Drought_Soil_Dry_P Parameter: Timepoint (day) Value: 13
  misc_feature: MA Experiment 20001557 PARAMETER Experiment Name: At_Drought_Soil_Dry_P Parameter: Treatment Value: Drought vs. No Drought
  misc_feature: MA Experiment ID: 20001911 Result: Down-regulated in Transcription
  misc_feature: MA Experiment 20001911 PARAMETER Experiment Name: At_Drought_Reproduction_P Parameter: Age (day) Value: 40
  misc_feature: MA Experiment 20001911 PARAMETER Experiment Name: At_Drought_Reproduction_P Parameter: Organism Value: A. thaliana
  misc_feature: MA Experiment 20001911 PARAMETER Experiment Name: At_Drought_Reproduction_P Parameter: Plant Line Value: WS
  misc_feature: MA Experiment 20001911 PARAMETER Experiment Name: At_Drought_Reproduction_P Parameter: Timepoint (day) Value: 10
  misc_feature: MA Experiment 20001911 PARAMETER Experiment Name: At_Drought_Reproduction_P Parameter: Tissue Value: Flowers
  misc_feature: MA Experiment 20001911 PARAMETER Experiment Name: At_Drought_Reproduction_P Parameter: Treatment Value: Drought vs. No Drought
aataatgtgttgcaaaagaggcaaagtatacaacgtgaaagtggtaggtctaccagatcccataccctcattttaatggcggagattacaagggaaagagacaactccaattcaaagctctgatttttccctttcacaattctttagctagttttatacttttcttcttcctttcatttgggttaagagaagccatggataccgagtttctccgaaccctagatcgtcagattcttttgggtgtcttcgttgctttcgtcgccgttggtgctggtgctgcttattttcttacatcctccaagaaacgcagagtgtgtttggatccagagaatttcaaggagttcaagcttgttaagagacatcagcttagtcacaatgtggccaagttcgtttttgaactcccaacttctacttctgtgttgggtcttcccattagacaacacatcaagttgcaggggaaaggatggtcaaggagaggatgttattaagccatacaccccgactacggttagactctgacgttggacgtttcgaacttgtcattaagatgtatccgcaaggacggatgtctcatcatttcagggagatgcgtgttggagaccatcttgccgaaaagggaccaaagggtaggttcaagatcaaccaggcagtttagggcatttggaatgcttgctggaggttcaggcatcactcccatgttccaagtggccagagcaattctagaaaacccaacagacaagacaaaggtgcatctcatttacgccaacgtcatatacgacgacattctcttgaaggaagaattggagggtcttactaccaattaccntgaacaatttaaaatcttctatgttttgaaccagcctccggaagtatgggatggtggtgttggatttgtatcaaaggaaatgattcagactcattgccctgcacctgcatctgatattcagatcctaagatgcggaccaccgccaatgaacaaggccatggctgcaaaccttgaagctctgggatactctccggagatgcaattccagttctgatctgaatatcttcttttggttgctctgaaacggaactcataataatttagttacaatcccaactacgagagttgtgtcttaactgagtgagagttgtatttctgttgtgtgtttgttagcccacttgaaagtttccattgattggtttacgaattggttagacattttggttc

SEQ ID NO: 38372 - protein, 124 aa, Arabidopsis thaliana
  peptide (1)..(124): Ceres Seq. ID no. 12560122
  misc_feature (1)..(110): Pfam Name: Oxidoreductase NAD-binding domain Pfam Description: Oxidoreductase NAD-binding domain
  misc_feature (1)..(124): Homolog of NCBI NO: 8052297 NR Description: NADH-cytochrome B5 reductase [Leishmania major]
  misc_feature (1)..(116): Homolog of NCBI NO: 19075352 NR Description: putative nadh-cytochrome b5 reductase
  misc_feature (1)..(124): Homolog of NCBI NO: 21312524 NR Description: RIKEN cDNA 1500005G05 [Mus musculus]
  misc_feature (1)..(124): Homolog of NCBI NO: 27712062 NR Description: similar to RIKEN cDNA 1500005G05
  misc_feature (1)..(116): Homolog of NCBI NO: 6070342 NR Description: NADH-cytochrome b5 reductase [Mortierella alpina]
  misc_feature (1)..(117): Homolog of NCBI NO: 40739560 NR Description: hypothetical protein AN6366.2 [Aspergillus
  misc_feature (1)..(124): Homolog of NCBI NO: 4336205 NR Description: cytochrome b5 reductase [Zea mays]
  misc_feature (1)..(124): Homolog of NCBI NO: 17221690 NR Description: cytochrome b5 reductase isoform II [Zea mays]
  misc_feature (1)..(124): Homolog of NCBI NO: 16648905 NR Description: NADH-cytochrome b5 reductase [Arabidopsis
  misc_feature (1)..(124): Homolog of NCBI NO: 15238025 NR Description: NADH-cytochrome b5 reductase
  misc_feature (54)..(54): Xaa is any aa, unknown or other
MLAGGSGITPMFQVARAILENPTDKTKVHLIYANVIYDDILLKEELEGLTTNYXEQFKIFYVLNQPPEVWDGGVGFVSKEMIQTHCPAPASDIQILRCGPPPMNKAMAANLEALGYSPEMQFQF

SEQ ID NO: 38373 - protein, 114 aa, Arabidopsis thaliana
  peptide (1)..(114): Ceres Seq. ID no. 12560123
  misc_feature (1)..(100): Pfam Name: Oxidoreductase NAD-binding domain Pfam Description: Oxidoreductase NAD-binding domain
  misc_feature (1)..(114): Homolog of NCBI NO: 8052297 NR Description: NADH-cytochrome B5 reductase [Leishmania major]
  misc_feature (1)..(106): Homolog of NCBI NO: 19075352 NR Description: putative nadh-cytochrome b5 reductase
  misc_feature (1)..(114): Homolog of NCBI NO: 21312524 NR Description: RIKEN cDNA 1500005G05 [Mus musculus]
  misc_feature (1)..(114): Homolog of NCBI NO: 27712062 NR Description: similar to RIKEN cDNA 1500005G05
  misc_feature (1)..(106): Homolog of NCBI NO: 6070342 NR Description: NADH-cytochrome b5 reductase [Mortierella alpina]
  misc_feature (1)..(107): Homolog of NCBI NO: 40739560 NR Description: hypothetical protein AN6366.2 [Aspergillus
  misc_feature (1)..(114): Homolog of NCBI NO: 4336205 NR Description: cytochrome b5 reductase [Zea mays]
  misc_feature (1)..(114): Homolog of NCBI NO: 17221690 NR Description: cytochrome b5 reductase isoform II [Zea mays]
  misc_feature (1)..(114): Homolog of NCBI NO: 16648905 NR Description: NADH-cytochrome b5 reductase [Arabidopsis
  misc_feature (1)..(114): Homolog of NCBI NO: 15238025 NR Description: NADH-cytochrome b5 reductase
  misc_feature (44)..(44): Xaa is any aa, unknown or other
MFQVARAILENPTDKTKVHLIYANVIYDDILLKEELEGLTTNYXEQFKIFYVLNQPPEVWDGGVGFVSKEMIQTHCPAPASDIQILRCGPPPMNKAMAANLEALGYSPEMQFQF

SEQ ID NO: 38374 - protein, 97 aa, Arabidopsis thaliana
  peptide (1)..(97): Ceres Seq. ID no. 12560124
  misc_feature (38)..(97): Homolog of NCBI NO: 28202143 NR Description: reductase [Gibberella zeae]
  misc_feature (43)..(86): Homolog of NCBI NO: 1314248 NR Description: NADH:cytochrome c reductase
  misc_feature (42)..(97): Homolog of NCBI NO: 40739937 NR Description: hypothetical protein AN3862.2 [Aspergillus
  misc_feature (15)..(86): Homolog of NCBI NO: 7706455 NR Description: cytochrome b5 reductase 1 (B5R.1) [Homo sapiens]
  misc_feature (14)..(87): Homolog of NCBI NO: 8052297 NR Description: NADH-cytochrome B5 reductase [Leishmania major]
  misc_feature (15)..(89): Homolog of NCBI NO: 21312524 NR Description: RIKEN cDNA 1500005G05 [Mus musculus]
  misc_feature (15)..(89): Homolog of NCBI NO: 27712062 NR Description: similar to RIKEN cDNA 1500005G05
  misc_feature (21)..(97): Homolog of NCBI NO: 6070342 NR Description: NADH-cytochrome b5 reductase [Mortierella alpina]
  misc_feature (13)..(86): Homolog of NCBI NO: 40739560 NR Description: hypothetical protein AN6366.2 [Aspergillus
  misc_feature (1)..(97): Homolog of NCBI NO: 15238025 NR Description: NADH-cytochrome b5 reductase
MDTEFLRTLDRQILLGVFVAFVAVGAGAAYFLTSSKKRRVCLDPENFKEFKLVKRHQLSHNVAKFVFELPTSTSVLGLPIRQHIKLQGKGWSRRGCY

SEQ ID NO: 38375 - DNA, 1280 bp, Arabidopsis thaliana; identical to SEQ ID NO: 37431
  misc_feature (1)..(1280): Ceres Seq. ID no. 12335829
  misc_feature: MA Experiment ID: 108462 Result: Down-regulated in Transcription
  misc_feature: MA Experiment 108462 PARAMETER Experiment Name: At_Germinating_Seeds_cDNA_P Parameter: Age (day) Value: 2 vs. 0
  misc_feature: MA Experiment 108462 PARAMETER Experiment Name: At_Germinating_Seeds_cDNA_P Parameter: Tissue Value: Germinating Seeds
  misc_feature: MA Experiment ID: 108463 Result: Down-regulated in Transcription
  misc_feature: MA Experiment 108463 PARAMETER Experiment Name: At_Germinating_Seeds_cDNA_P Parameter: Age (day) Value: 3 vs. 0
  misc_feature: MA Experiment 108463 PARAMETER Experiment Name: At_Germinating_Seeds_cDNA_P Parameter: Tissue Value: Germinating Seeds
  misc_feature: MA Experiment ID: 108464 Result: Down-regulated in Transcription
  misc_feature: MA Experiment 108464 PARAMETER Experiment Name: At_Germinating_Seeds_cDNA_P Parameter: Age (day) Value: 4 vs. 0
  misc_feature: MA Experiment 108464 PARAMETER Experiment Name: At_Germinating_Seeds_cDNA_P Parameter: Tissue Value: Germinating Seeds

SEQ ID NO: 38376 - protein, 252 aa, Arabidopsis thaliana; identical to SEQ ID NO: 37432
  peptide (1)..(252): Ceres Seq. ID no. 12335830
  misc_feature (197)..(247): Pfam Name: PHD-finger Pfam Description: PHD-finger
  misc_feature (197)..(247): Pfam Name: PHD-finger Pfam Description: PHD-finger
  misc_feature (9)..(245): Homolog of NCBI NO: 34394182 NR Description: putative nucleic acid binding protein
  misc_feature (9)..(245): Homolog of NCBI NO: 14192880 NR Description: Putative nucleic acid binding protein [Oryza
  misc_feature (9)..(248): Homolog of NCBI NO: 15239624 NR Description: nucleic acid binding protein - like
  misc_feature (9)..(252): Homolog of NCBI NO: 15229157 NR Description: nucleic acid binding protein-like
  misc_feature (1)..(248): Homolog of NCBI NO: 7488751 NR Description: probable zinc finger protein - alfalfa (fragment)
  misc_feature (9)..(245): Homolog of NCBI NO: 34394182 NR Description: putative nucleic acid binding protein
  misc_feature (9)..(248): Homolog of NCBI NO: 15239624 NR Description: nucleic acid binding protein - like
  misc_feature (1)..(248): Homolog of NCBI NO: 7488751 NR Description: probable zinc finger protein - alfalfa (fragment)
  misc_feature (1)..(252): Homolog of NCBI NO: 15223786 NR Description: nucleic acid binding protein (alfin-1), putative
  misc_feature (34)..(252): Homolog of NCBI NO: 25346630 NR Description: F14L17.29 protein - Arabidopsis thaliana
  misc_feature (1)..(32): Homolog of NCBI NO: 25346630 NR Description: F14L17.29 protein - Arabidopsis thaliana
  misc_feature (1)..(248): Homolog of NCBI NO: 21593407 NR Description: putative PHD-type zinc finger protein
  misc_feature (1)..(248): Homolog of NCBI NO: 15226967 NR Description: putative PHD-type zinc finger protein
  misc_feature (9)..(252): Homolog of NCBI NO: 15229157 NR Description: nucleic acid binding protein-like
  misc_feature (9)..(245): Homolog of NCBI NO: 14192880 NR Description: Putative nucleic acid binding protein [Oryza
  misc_feature (1)..(248): Homolog of NCBI NO: 15226967 NR Description: putative PHD-type zinc finger protein
  misc_feature (1)..(248): Homolog of NCBI NO: 21593407 NR Description: putative PHD-type zinc finger protein
  misc_feature (1)..(32): Homolog of NCBI NO: 25346630 NR Description: F14L17.29 protein - Arabidopsis thaliana
  misc_feature (34)..(252): Homolog of NCBI NO: 25346630 NR Description: F14L17.29 protein - Arabidopsis thaliana
  misc_feature (1)..(252): Homolog of NCBI NO: 15223786 NR Description: nucleic acid binding protein (alfin-1), putative

SEQ ID NO: 38377 - protein, 168 aa, Arabidopsis thaliana; identical to SEQ ID NO: 37433
  peptide (1)..(168): Ceres Seq. ID no. 12335831
  misc_feature (113)..(163): Pfam Name: PHD-finger Pfam Description: PHD-finger
  misc_feature (113)..(163): Pfam Name: PHD-finger Pfam Description: PHD-finger
  misc_feature (1)..(164): Homolog of NCBI NO: 30687843 NR Description: zinc finger protein - like [Arabidopsis thaliana]
  misc_feature (1)..(161): Homolog of NCBI NO: 34394182 NR Description: putative nucleic acid binding protein
  misc_feature (1)..(161): Homolog of NCBI NO: 14192880 NR Description: Putative nucleic acid binding protein [Oryza
  misc_feature (1)..(164): Homolog of NCBI NO: 15239624 NR Description: nucleic acid binding protein - like
  misc_feature (1)..(168): Homolog of NCBI NO: 15229157 NR Description: nucleic acid binding protein-like
  misc_feature (1)..(164): Homolog of NCBI NO: 30687843 NR Description: zinc finger protein - like [Arabidopsis thaliana]
  misc_feature (1)..(161): Homolog of NCBI NO: 14192880 NR Description: Putative nucleic acid binding protein [Oryza
  misc_feature (1)..(168): Homolog of NCBI NO: 15229157 NR Description: nucleic acid binding protein-like
  misc_feature (1)..(168): Homolog of NCBI NO: 15223786 NR Description: nucleic acid binding protein (alfin-1), putative
  misc_feature (1)..(168): Homolog of NCBI NO: 25346630 NR Description: F14L17.29 protein - Arabidopsis thaliana
  misc_feature (1)..(164): Homolog of NCBI NO: 21593407 NR Description: putative PHD-type zinc finger protein
  misc_feature (1)..(164): Homolog of NCBI NO: 15226967 NR Description: putative PHD-type zinc finger protein
  misc_feature (1)..(164): Homolog of NCBI NO: 7488751 NR Description: probable zinc finger protein - alfalfa (fragment)
  misc_feature (1)..(164): Homolog of NCBI NO: 15239624 NR Description: nucleic acid binding protein - like
  misc_feature (1)..(161): Homolog of NCBI NO: 34394182 NR Description: putative nucleic acid binding protein
  misc_feature (1)..(164): Homolog of NCBI NO: 7488751 NR Description: probable zinc finger protein - alfalfa (fragment)
  misc_feature (1)..(164): Homolog of NCBI NO: 15226967 NR Description: putative PHD-type zinc finger protein
  misc_feature (1)..(164): Homolog of NCBI NO: 21593407 NR Description: putative PHD-type zinc finger protein
  misc_feature (1)..(168): Homolog of NCBI NO: 25346630 NR Description: F14L17.29 protein - Arabidopsis thaliana
  misc_feature (1)..(168): Homolog of NCBI NO: 15223786 NR Description: nucleic acid binding protein (alfin-1), putative

SEQ ID NO: 38378 - protein, 127 aa, Arabidopsis thaliana; identical to SEQ ID NO: 37434
  peptide (1)..(127): Ceres Seq. ID no. 12335832
  misc_feature (72)..(122): Pfam Name: PHD-finger Pfam Description: PHD-finger
  misc_feature (72)..(122): Pfam Name: PHD-finger Pfam Description: PHD-finger
  misc_feature (1)..(123): Homolog of NCBI NO: 30687843 NR Description: zinc finger protein - like [Arabidopsis thaliana]
  misc_feature (1)..(120): Homolog of NCBI NO: 34394182 NR Description: putative nucleic acid binding protein
  misc_feature (1)..(120): Homolog of NCBI NO: 14192880 NR Description: Putative nucleic acid binding protein [Oryza
  misc_feature (1)..(123): Homolog of NCBI NO: 15239624 NR Description: nucleic acid binding protein - like
  misc_feature (1)..(127): Homolog of NCBI NO: 15229157 NR Description: nucleic acid binding protein-like
  misc_feature (1)..(123): Homolog of NCBI NO: 30687843 NR Description: zinc finger protein - like [Arabidopsis thaliana]
  misc_feature (1)..(120): Homolog of NCBI NO: 14192880 NR Description: Putative nucleic acid binding protein [Oryza
  misc_feature (1)..(127): Homolog of NCBI NO: 15229157 NR Description: nucleic acid binding protein-like
  misc_feature (1)..(127): Homolog of NCBI NO: 15223786 NR Description: nucleic acid binding protein (alfin-1), putative
  misc_feature (1)..(127): Homolog of NCBI NO: 25346630 NR Description: F14L17.29 protein - Arabidopsis thaliana
  misc_feature (1)..(123): Homolog of NCBI NO: 21593407 NR Description: putative PHD-type zinc finger protein
  misc_feature (1)..(123): Homolog of NCBI NO: 15226967 NR Description: putative PHD-type zinc finger protein
  misc_feature (1)..(123): Homolog of NCBI NO: 7488751 NR Description: probable zinc finger protein - alfalfa (fragment)
  misc_feature (1)..(123): Homolog of NCBI NO: 15239624 NR Description: nucleic acid binding protein - like
  misc_feature (1)..(120): Homolog of NCBI NO: 34394182 NR Description: putative nucleic acid binding protein
  misc_feature (1)..(123): Homolog of NCBI NO: 7488751 NR Description: probable zinc finger protein - alfalfa (fragment)
  misc_feature (1)..(123): Homolog of NCBI NO: 15226967 NR Description: putative PHD-type zinc finger protein
  misc_feature (1)..(123): Homolog of NCBI NO: 21593407 NR Description: putative PHD-type zinc finger protein
  misc_feature (1)..(127): Homolog of NCBI NO: 25346630 NR Description: F14L17.29 protein - Arabidopsis thaliana
  misc_feature (1)..(127): Homolog of NCBI NO: 15223786 NR Description: nucleic acid binding protein (alfin-1), putative

SEQ ID NO: 38379 - DNA, 1854 bp, Arabidopsis thaliana
  misc_feature (1)..(1854): Ceres Seq. ID no. 13653854
  misc_feature: MA Experiment ID: 108461 Result: Down-regulated in Transcription
  misc_feature: MA Experiment 108461 PARAMETER Experiment Name: At_Germinating_Seeds_cDNA_P Parameter: Age (day) Value: 1 vs. 0
  misc_feature: MA Experiment 108461 PARAMETER Experiment Name: At_Germinating_Seeds_cDNA_P Parameter: Tissue Value: Germinating Seeds
  misc_feature: MA Experiment ID: 108462 Result: Down-regulated in Transcription
  misc_feature: MA Experiment 108462 PARAMETER Experiment Name: At_Germinating_Seeds_cDNA_P Parameter: Age (day) Value: 2 vs. 0
  misc_feature: MA Experiment 108462 PARAMETER Experiment Name: At_Germinating_Seeds_cDNA_P Parameter: Tissue Value: Germinating Seeds
  misc_feature: MA Experiment ID: 108463 Result: Down-regulated in Transcription
  misc_feature: MA Experiment 108463 PARAMETER Experiment Name: At_Germinating_Seeds_cDNA_P Parameter: Age (day) Value: 3 vs. 0
  misc_feature: MA Experiment 108463 PARAMETER Experiment Name: At_Germinating_Seeds_cDNA_P Parameter: Tissue Value: Germinating Seeds
  misc_feature: MA Experiment ID: 108464 Result: Down-regulated in Transcription
  misc_feature: MA Experiment 108464 PARAMETER Experiment Name: At_Germinating_Seeds_cDNA_P Parameter: Age (day) Value: 4 vs. 0
  misc_feature: MA Experiment 108464 PARAMETER Experiment Name: At_Germinating_Seeds_cDNA_P Parameter: Tissue Value: Germinating Seeds
  misc_feature: MA Experiment ID: 108573 Result: Up-regulated in Transcription
  misc_feature: MA Experiment 108573 PARAMETER Experiment Name: At_Drought_cDNA_P Parameter: Timepoint (hr) Value: 6
  misc_feature: MA Experiment 108573 PARAMETER Experiment Name: At_Drought_cDNA_P Parameter: Tissue Value: Aerial
  misc_feature: MA Experiment 108573 PARAMETER Experiment Name: At_Drought_cDNA_P Parameter: Treatment Value: Drought vs. No Drought
  misc_feature: MA Experiment ID: 108576 Result: Down-regulated in Transcription
  misc_feature: MA Experiment 108576 PARAMETER Experiment Name: At_42deg_Heat_cDNA_P Parameter: Temperature (deg C) Value: 42 vs. 22
  misc_feature: MA Experiment 108576 PARAMETER Experiment Name: At_42deg_Heat_cDNA_P Parameter: Timepoint (hr) Value: 1
  misc_feature: MA Experiment 108576 PARAMETER Experiment Name: At_42deg_Heat_cDNA_P Parameter: Tissue Value: Aerial
  misc_feature: MA Experiment ID: 108577 Result: Down-regulated in Transcription
  misc_feature: MA Experiment 108577 PARAMETER Experiment Name: At_42deg_Heat_cDNA_P Parameter: Temperature (deg C) Value: 42 vs. 22
  misc_feature: MA Experiment 108577 PARAMETER Experiment Name: At_42deg_Heat_cDNA_P Parameter: Timepoint (hr) Value: 6
  misc_feature: MA Experiment 108577 PARAMETER Experiment Name: At_42deg_Heat_cDNA_P Parameter: Tissue Value: Aerial
  misc_feature: MA Experiment ID: 20000179 Result: Down-regulated in Transcription
  misc_feature: MA Experiment 20000179 PARAMETER Experiment Name: At_Germinating_Seeds_P Parameter: Age (hr) Value: 6 vs. 0
  misc_feature: MA Experiment 20000179 PARAMETER Experiment Name: At_Germinating_Seeds_P Parameter: Tissue Value: Germinating Seeds
  misc_feature: MA Experiment ID: 20000180 Result: Down-regulated in Transcription
  misc_feature: MA Experiment 20000180 PARAMETER Experiment Name: At_Germinating_Seeds_P Parameter: Age (hr) Value: 24 vs. 0
  misc_feature: MA Experiment 20000180 PARAMETER Experiment Name: At_Germinating_Seeds_P Parameter: Tissue Value: Germinating Seeds
  misc_feature: MA Experiment ID: 20001451 Result: Down-regulated in Transcription
  misc_feature: MA Experiment 20001451 PARAMETER Experiment Name: At_Far-red-induction_P Parameter: Age (day) Value: 7
  misc_feature: MA Experiment 20001451 PARAMETER Experiment Name: At_Far-red-induction_P Parameter: Light Value: Far-red vs. White
  misc_feature: MA Experiment 20001451 PARAMETER Experiment Name: At_Far-red-induction_P Parameter: Organism Value: A. thaliana
  misc_feature: MA Experiment 20001451 PARAMETER Experiment Name: At_Far-red-induction_P Parameter: Plant Line Value: Columbia
  misc_feature: MA Experiment 20001451 PARAMETER Experiment Name: At_Far-red-induction_P Parameter: Timepoint (hr) Value: 24
  misc_feature: MA Experiment 20001451 PARAMETER Experiment Name: At_Far-red-induction_P Parameter: Tissue Value: Whole Plant
  misc_feature: MA Experiment ID: 20001557 Result: Up-regulated in Transcription
  misc_feature: MA Experiment 20001557 PARAMETER Experiment Name: At_Drought_Soil_Dry_P Parameter: Age (day) Value: 27
  misc_feature: MA Experiment 20001557 PARAMETER Experiment Name: At_Drought_Soil_Dry_P Parameter: Organism Value: A. thaliana
  misc_feature: MA Experiment 20001557 PARAMETER Experiment Name: At_Drought_Soil_Dry_P Parameter: Plant Line Value: WS
  misc_feature: MA Experiment 20001557 PARAMETER Experiment Name: At_Drought_Soil_Dry_P Parameter: Post Timepoint (hr) Value: 3
  misc_feature: MA Experiment 20001557 PARAMETER Experiment Name: At_Drought_Soil_Dry_P Parameter: Post-Treatment Value: Re-Water vs. No Drought
  misc_feature: MA Experiment 20001557 PARAMETER Experiment Name: At_Drought_Soil_Dry_P Parameter: Timepoint (day) Value: 13
  misc_feature: MA Experiment 20001557 PARAMETER Experiment Name: At_Drought_Soil_Dry_P Parameter: Treatment Value: Drought vs. No Drought
  misc_feature: MA Experiment ID: 20001558 Result: Up-regulated in Transcription
  misc_feature: MA Experiment 20001558 PARAMETER Experiment Name: At_Drought_Soil_Dry_P Parameter: Age (day) Value: 27
  misc_feature: MA Experiment 20001558 PARAMETER Experiment Name: At_Drought_Soil_Dry_P Parameter: Organism Value: A. thaliana
  misc_feature: MA Experiment 20001558 PARAMETER Experiment Name: At_Drought_Soil_Dry_P Parameter: Plant Line Value: WS
  misc_feature: MA Experiment 20001558 PARAMETER Experiment Name: At_Drought_Soil_Dry_P Parameter: Post Timepoint (hr) Value: 6
  misc_feature: MA Experiment 20001558 PARAMETER Experiment Name: At_Drought_Soil_Dry_P Parameter: Post-Treatment Value: Re-Water vs. No Drought
  misc_feature: MA Experiment 20001558 PARAMETER Experiment Name: At_Drought_Soil_Dry_P Parameter: Timepoint (day) Value: 13
  misc_feature: MA Experiment 20001558 PARAMETER Experiment Name: At_Drought_Soil_Dry_P Parameter: Treatment Value: Drought vs. No Drought
aaggaggggaaaatcagctttttggagaagaaaccaaagaaaacattcgaaaccctaaaatctccattagaattcgaaaatgacaaagaagagaaagctcgaaggagaagaatctaacgaagctgaagaaccgtcgcagaagctgaagcagacgccggaggaggagcagcagcttgtaattaaaaatcaggataatcaaggagacgttgaagaagttgaatacgaggaagtagaggaagagcaagaagaagaagtagaagatgatgacgatgaagatgatggtgatgagaatgaggatcagacggatgggaatcgtatagaggcggcggcgacgtctggatctggcgatcaagaagatgatgacgatgaaccaattcaggatctgttggaaccattttcaaaggagcaagttttgagtcttcttaaggaagcagcggagaagcatgttgatgtagccaatcgaattagggaagtagctgatgaggaccctgttcatcggaagatctttgtgcacggtcttggttgggatacgaaaacagagacgcttattgaagcttttaagcagtacggagagatcgaagattgcaaggctgtgtttgataagatctcagggaaatctaaaggttatggctttattctgtacaagtctcgttcaggtgctcgcaacgcactcaagcagcctcagaagaagattggtagtcgtatgacggcatgccaattagcttctaaaggacctgtctttggtggagctcctatcgctgctgcagctgtttcagcgcctgctcagcattcgaactcggagcatactcagaaaaagatttatgttagtaatgtcggagcagagcttgatccacagaagttgctgatgtttttctcaaagtttggagaaattgaagaaggtcctttgggtcttgataagtatactgggagacctaaaggtttctgtctctttgtttataagtcgtctgaaagcgccaagagggctttggaggagccacacaagacttttgaaggccatatcttgcattgccagaaagctatcgatggtcccaaaccgggcaagcagcagcagcatcaccataacccacacgcctataacaatcctcgttaccaaaggaatgataacaatggttatggtccgcctggaggtcatggacatctcatggctggtaacccagctgggatgggtggtccaacggcacaggtgataaacccggccattggacaggccttgacagctttattggcatctcagggagctggtttggcttttaatccggcaattggacaggctttgttgggttccttggggacagctgctggtgtaaacccagggaatggagttggaatgccaactggttacggtactcaagctatggcaccggggacaatgcctgggtacggtacacaacctgggttgcaaggcggttatcagactccgcaacctggtcaaggcggtacaagtagagggcaacatggtgtcgggccatacggtactccttacatgggtcactaaatgtatcatgtatccatccactcagatatcagaaatcagtgttttaatattggcctggtgattcttctcaagtttataaggagctgatgctaaatgaagtctttatgaaatgttactctttggtcactcctaaggccaaactcataaaaaaccttttaaggagttttagttttcatctacttgtttttcccaaactctctttatgaaattcctaaaaaaaactttgtactactattttcagtgtttatgtctctattttttcagttttctgaatatcccccttagactttcatttgtaaaactaaaaaagcgcaacnacgctccatgtgggtctttgc

SEQ ID NO: 38380 - protein, 478 aa, Arabidopsis thaliana
  peptide (1)..(478): Ceres Seq. ID no. 13653855
  misc_feature (247)..(317): Pfam Name: RNA recognition motif. (a.k.a. RRM, RBD, or RNP domain) Pfam Description: RNA recognition motif. (a.k.a. RRM, RBD, or RNP
  misc_feature (82)..(244): Homolog of NCBI NO: 21595502 NR Description: putative RNA-binding protein [Arabidopsis
  misc_feature (102)..(474): Homolog of NCBI NO: 15232459 NR Description: RNA recognition motif (RRM)-containing protein
  misc_feature (82)..(429): Homolog of NCBI NO: 34912640 NR Description: P0410E01.24 [Oryza sativa (japonica
  misc_feature (81)..(449): Homolog of NCBI NO: 21741248 NR Description: OSJNBb0034I13.9 [Oryza sativa (japonica
  misc_feature (47)..(478): Homolog of NCBI NO: 34903096 NR Description: unnamed protein product [Oryza sativa (japonica
  misc_feature (15)..(466): Homolog of NCBI NO: 34903096 NR Description: unnamed protein product [Oryza sativa (japonica
  misc_feature (1)..(459): Homolog of NCBI NO: 21666573 NR Description: RNA-binding protein AKIP1 [Vicia faba]
  misc_feature (1)..(477): Homolog of NCBI NO: 15226817 NR Description: RNA recognition motif (RRM)-containing protein
  misc_feature (1)..(478): Homolog of NCBI NO: 18410591 NR Description: RNA recognition motif (RRM)-containing protein
  misc_feature (1)..(478): Homolog of NCBI NO: 14596195 NR Description: putative protein [Arabidopsis thaliana]
MTKKRKLEGEESNEAEEPSQKLKQTPEEEQQLVIKNQDNQGDVEEVEYEEVEEEQEEEVEDDDDEDDGDENEDQTDGNRIEAAATSGSGDQEDDDDEPIQDLLEPFSKEQVLSLLKEAAEKHVDVANRIREVADEDPVHRKIFVHGLGWDTKTETLIEAFKQYGEIEDCKAVFDKISGKSKGYGFILYKSRSGARNALKQPQKKIGSRMTACQLASKGPVFGGAPIAAAAVSAPAQHSNSEHTQKKIYVSNVGAELDPQKLLMFFSKFGEIEEGPLGLDKYTGRPKGFCLFVYKSSESAKRALEEPHKTFEGHILHCQKAIDGPKPGKQQQHHHNPHAYNNPRYQRNDNNGYGPPGGHGHLMAGNPAGMGGPTAQVINPAIGQALTALLASQGAGLAFNPAIGQALLGSLGTAAGVNPGNGVGMPTGYGTQAMAPGTMPGYGTQPGLQGGYQTPQPGQGGTSRGQHGVGPYGTPYMGH

SEQ ID NO: 38381 - protein, 270 aa, Arabidopsis thaliana
  peptide (1)..(270): Ceres Seq. ID no. 13653856
  misc_feature (39)..(109): Pfam Name: RNA recognition motif. (a.k.a. RRM, RBD, or RNP domain) Pfam Description: RNA recognition motif. (a.k.a. RRM, RBD, or RNP
  misc_feature (1)..(36): Homolog of NCBI NO: 21595502 NR Description: putative RNA-binding protein [Arabidopsis
  misc_feature (1)..(266): Homolog of NCBI NO: 15232459 NR Description: RNA recognition motif (RRM)-containing protein
  misc_feature (1)..(221): Homolog of NCBI NO: 34912640 NR Description: P0410E01.24 [Oryza sativa (japonica
  misc_feature (1)..(241): Homolog of NCBI NO: 21741248 NR Description: OSJNBb0034I13.9 [Oryza sativa (japonica
  misc_feature (1)..(270): Homolog of NCBI NO: 34903096 NR Description: unnamed protein product [Oryza sativa (japonica
  misc_feature (1)..(258): Homolog of NCBI NO: 34903096 NR Description: unnamed protein product [Oryza sativa (japonica
  misc_feature (1)..(251): Homolog of NCBI NO: 21666573 NR Description: RNA-binding protein AKIP1 [Vicia faba]
  misc_feature (1)..(269): Homolog of NCBI NO: 15226817 NR Description: RNA recognition motif (RRM)-containing protein
  misc_feature (1)..(270): Homolog of NCBI NO: 18410591 NR Description: RNA recognition motif (RRM)-containing protein
  misc_feature (1)..(270): Homolog of NCBI NO: 14596195 NR Description: putative protein [Arabidopsis thaliana]
MTACQLASKGPVFGGAPIAAAAVSAPAQHSNSEHTQKKIYVSNVGAELDPQKLLMFFSKFGEIEEGPLGLDKYTGRPKGFCLFVYKSSESAKRALEEPHKTFEGHILHCQKAIDGPKPGKQQQHHHNPHAYNNPRYQRNDNNGYGPPGGHGHLMAGNPAGMGGPTAQVINPAIGQALTALLASQGAGLAFNPAIGQALLGSLGTAAGVNPGNGVGMPTGYGTQAMAPGTMPGYGTQPGLQGGYQTPQPGQGGTSRGQHGVGPYGTPYMGH

SEQ ID NO: 38382 - DNA, 1349 bp, Arabidopsis thaliana
  misc_feature (1)..(1349): Ceres Seq. ID no. 13488010
  misc_feature: MA Experiment ID: 108462 Result: Down-regulated in Transcription
  misc_feature: MA Experiment 108462 PARAMETER Experiment Name: At_Germinating_Seeds_cDNA_P Parameter: Age (day) Value: 2 vs. 0
  misc_feature: MA Experiment 108462 PARAMETER Experiment Name: At_Germinating_Seeds_cDNA_P Parameter: Tissue Value: Germinating Seeds
  misc_feature: MA Experiment ID: 108488 Result: Down-regulated in Transcription
  misc_feature: MA Experiment ID: 108572 Result: Down-regulated in Transcription
  misc_feature: MA Experiment 108572 PARAMETER Experiment Name: At_Drought_cDNA_P Parameter: Timepoint (hr) Value: 1
  misc_feature: MA Experiment 108572 PARAMETER Experiment Name: At_Drought_cDNA_P Parameter: Tissue Value: Aerial
  misc_feature: MA Experiment 108572 PARAMETER Experiment Name: At_Drought_cDNA_P Parameter: Treatment Value: Drought vs. No Drought
  misc_feature: MA Experiment ID: 108573 Result: Down-regulated in Transcription
  misc_feature: MA Experiment 108573 PARAMETER Experiment Name: At_Drought_cDNA_P Parameter: Timepoint (hr) Value: 6
  misc_feature: MA Experiment 108573 PARAMETER Experiment Name: At_Drought_cDNA_P Parameter: Tissue Value: Aerial
  misc_feature: MA Experiment 108573 PARAMETER Experiment Name: At_Drought_cDNA_P Parameter: Treatment Value: Drought vs. No Drought
  misc_feature: MA Experiment ID: 108576 Result: Down-regulated in Transcription
  misc_feature: MA Experiment 108576 PARAMETER Experiment Name: At_42deg_Heat_cDNA_P Parameter: Temperature (deg C) Value: 42 vs. 22
  misc_feature: MA Experiment 108576 PARAMETER Experiment Name: At_42deg_Heat_cDNA_P Parameter: Timepoint (hr) Value: 1
  misc_feature: MA Experiment 108576 PARAMETER Experiment Name: At_42deg_Heat_cDNA_P Parameter: Tissue Value: Aerial
  misc_feature: MA Experiment ID: 108577 Result: Down-regulated in Transcription
  misc_feature: MA Experiment 108577 PARAMETER Experiment Name: At_42deg_Heat_cDNA_P Parameter: Temperature (deg C) Value: 42 vs. 22
  misc_feature: MA Experiment 108577 PARAMETER Experiment Name: At_42deg_Heat_cDNA_P Parameter: Timepoint (hr) Value: 6
  misc_feature: MA Experiment 108577 PARAMETER Experiment Name: At_42deg_Heat_cDNA_P Parameter: Tissue Value: Aerial
  misc_feature: MA Experiment ID: 108579 Result: Up-regulated in Transcription
  misc_feature: MA Experiment 108579 PARAMETER Experiment Name: At_4deg_Cold_cDNA_P Parameter: Temperature (deg C) Value: 4 vs. 22
  misc_feature: MA Experiment 108579 PARAMETER Experiment Name: At_4deg_Cold_cDNA_P Parameter: Timepoint (hr) Value: 6
  misc_feature: MA Experiment 108579 PARAMETER Experiment Name: At_4deg_Cold_cDNA_P Parameter: Tissue Value: Aerial
  misc_feature: MA Experiment ID: 108605 Result: Down-regulated in Transcription
  misc_feature: MA Experiment 108605 PARAMETER Experiment Name: At_100uM_ABA_cDNA_P Parameter: Timepoint (hr) Value: 6
  misc_feature: MA Experiment 108605 PARAMETER Experiment Name: At_100uM_ABA_cDNA_P Parameter: Tissue Value: Aerial
  misc_feature: MA Experiment 108605 PARAMETER Experiment Name: At_100uM_ABA_cDNA_P Parameter: Treatment Value: 100uM ABA vs. No Treatment
  misc_feature: MA Experiment ID: 108607 Result: Down-regulated in Transcription
  misc_feature: MA Experiment 108607 PARAMETER Experiment Name: At_100uM_ABA_cDNA_P Parameter: Timepoint (hr) Value: 4
  misc_feature: MA Experiment 108607 PARAMETER Experiment Name: At_100uM_ABA_cDNA_P Parameter: Tissue Value: Aerial
  misc_feature: MA Experiment 108607 PARAMETER Experiment Name: At_100uM_ABA_cDNA_P Parameter: Treatment Value: 100uM ABA vs. No Treatment
  misc_feature: MA Experiment ID: 108609 Result: Down-regulated in Transcription
  misc_feature: MA Experiment 108609 PARAMETER Experiment Name: At_100uM_ABA_cDNA_P Parameter: Timepoint (hr) Value: 24
  misc_feature: MA Experiment 108609 PARAMETER Experiment Name: At_100uM_ABA_cDNA_P Parameter: Tissue Value: Aerial
  misc_feature: MA Experiment 108609 PARAMETER Experiment Name: At_100uM_ABA_cDNA_P Parameter: Treatment Value: 100uM ABA vs. No Treatment
  misc_feature: MA Experiment ID: 20000069 Result: Up-regulated in Transcription
  misc_feature: MA Experiment 20000069 PARAMETER Experiment Name: At_100uM_ABA_Mutants_cDNA_P Parameter: Plant Line Value: CS23
  misc_feature: MA Experiment 20000069 PARAMETER Experiment Name: At_100uM_ABA_Mutants_cDNA_P Parameter: Timepoint (hr) Value: 6
  misc_feature: MA Experiment 20000069 PARAMETER Experiment Name: At_100uM_ABA_Mutants_cDNA_P Parameter: Tissue Value: Aerial
  misc_feature: MA Experiment 20000069 PARAMETER Experiment Name: At_100uM_ABA_Mutants_cDNA_P Parameter: Treatment Value: 100uM ABA vs. No Treatment
  misc_feature: MA Experiment ID: 20000070 Result: Up-regulated in Transcription
  misc_feature: MA Experiment 20000070 PARAMETER Experiment Name: At_100uM_ABA_Mutants_cDNA_P Parameter: Plant Line Value: CS24
  misc_feature: MA Experiment 20000070 PARAMETER Experiment Name: At_100uM_ABA_Mutants_cDNA_P Parameter: Timepoint (hr) Value: 6
  misc_feature: MA Experiment 20000070 PARAMETER Experiment Name: At_100uM_ABA_Mutants_cDNA_P Parameter: Tissue Value: Aerial
  misc_feature: MA Experiment 20000070 PARAMETER Experiment Name: At_100uM_ABA_Mutants_cDNA_P Parameter: Treatment Value: 100uM ABA vs. No Treatment
  misc_feature: MA Experiment ID: 20000071 Result: Up-regulated in Transcription
  misc_feature: MA Experiment 20000071 PARAMETER Experiment Name: At_100uM_ABA_Mutants_cDNA_P Parameter: Plant Line Value: CS8104
  misc_feature: MA Experiment 20000071 PARAMETER Experiment Name: At_100uM_ABA_Mutants_cDNA_P Parameter: Timepoint (hr) Value: 6
  misc_feature: MA Experiment 20000071 PARAMETER Experiment Name: At_100uM_ABA_Mutants_cDNA_P Parameter: Tissue Value: Aerial
  misc_feature: MA Experiment 20000071 PARAMETER Experiment Name: At_100uM_ABA_Mutants_cDNA_P Parameter: Treatment Value: 100uM ABA vs. No Treatment
  misc_feature: MA Experiment ID: 20000072 Result: Up-regulated in Transcription
  misc_feature: MA Experiment 20000072 PARAMETER Experiment Name: At_100uM_ABA_Mutants_cDNA_P Parameter: Plant Line Value: CS8105
  misc_feature: MA Experiment 20000072 PARAMETER Experiment Name: At_100uM_ABA_Mutants_cDNA_P Parameter: Timepoint (hr) Value: 6
  misc_feature: MA Experiment 20000072 PARAMETER Experiment Name: At_100uM_ABA_Mutants_cDNA_P Parameter: Tissue Value: Aerial
  misc_feature: MA Experiment 20000072 PARAMETER Experiment Name: At_100uM_ABA_Mutants_cDNA_P Parameter: Treatment Value: 100uM ABA vs. No Treatment
  misc_feature: MA Experiment ID: 20000086 Result: Up-regulated in Transcription
  misc_feature: MA Experiment 20000086 PARAMETER Experiment Name: At_100uM_ABA_Mutants_cDNA_P Parameter: Plant Line Value: CS22
  misc_feature: MA Experiment 20000086 PARAMETER Experiment Name: At_100uM_ABA_Mutants_cDNA_P Parameter: Timepoint (hr) Value: 6
  misc_feature: MA Experiment 20000086 PARAMETER Experiment Name: At_100uM_ABA_Mutants_cDNA_P Parameter: Tissue Value: Aerial
  misc_feature: MA Experiment 20000086 PARAMETER Experiment Name: At_100uM_ABA_Mutants_cDNA_P Parameter: Treatment Value: 100uM ABA vs. No Treatment
  misc_feature: MA Experiment ID: 20000087 Result: Up-regulated in Transcription
  misc_feature: MA Experiment 20000087 PARAMETER Experiment Name: At_100uM_ABA_Mutants_cDNA_P Parameter: Plant Line Value: WS
  misc_feature: MA Experiment 20000087 PARAMETER Experiment Name: At_100uM_ABA_Mutants_cDNA_P Parameter: Timepoint (hr) Value: 6
  misc_feature: MA Experiment 20000087 PARAMETER Experiment Name: At_100uM_ABA_Mutants_cDNA_P Parameter: Tissue Value: Aerial
  misc_feature: MA Experiment 20000087 PARAMETER Experiment Name: At_100uM_ABA_Mutants_cDNA_P Parameter: Treatment Value: 100uM ABA vs. No Treatment
  misc_feature: MA Experiment ID: 20000088 Result: Up-regulated in Transcription
  misc_feature: MA Experiment 20000088 PARAMETER Experiment Name: At_100uM_ABA_Mutants_cDNA_P Parameter: Plant Line Value: Landsberg
  misc_feature: MA Experiment 20000088 PARAMETER Experiment Name: At_100uM_ABA_Mutants_cDNA_P Parameter: Timepoint (hr) Value: 6
  misc_feature: MA Experiment 20000088 PARAMETER Experiment Name: At_100uM_ABA_Mutants_cDNA_P Parameter: Tissue Value: Aerial
  misc_feature: MA Experiment 20000088 PARAMETER Experiment Name: At_100uM_ABA_Mutants_cDNA_P Parameter: Treatment Value: 100uM ABA vs. No Treatment
  misc_feature: MA Experiment ID: 20000089 Result: Up-regulated in Transcription
  misc_feature: MA Experiment ID: 20000090 Result: Up-regulated in Transcription
  misc_feature: MA Experiment ID: 20000111 Result: Down-regulated in Transcription
  misc_feature: MA Experiment 20000111 PARAMETER Experiment Name: At_42deg_Heat_cDNA_P Parameter: Temperature (deg C) Value: 42 vs. 22
  misc_feature: MA Experiment 20000111 PARAMETER Experiment Name: At_42deg_Heat_cDNA_P Parameter: Timepoint (hr) Value: 6
  misc_feature: MA Experiment 20000111 PARAMETER Experiment Name: At_42deg_Heat_cDNA_P Parameter: Tissue Value: Aerial
  misc_feature: MA Experiment ID: 20000112 Result: Down-regulated in Transcription
  misc_feature: MA Experiment 20000112 PARAMETER Experiment Name: At_42deg_Heat_cDNA_P Parameter: Temperature (deg C) Value: 42 vs. 22
  misc_feature: MA Experiment 20000112 PARAMETER Experiment Name: At_42deg_Heat_cDNA_P Parameter: Timepoint (hr) Value: 2
  misc_feature: MA Experiment 20000112 PARAMETER Experiment Name: At_42deg_Heat_cDNA_P Parameter: Tissue Value: Aerial
  misc_feature: MA Experiment ID: 20000113 Result: Down-regulated in Transcription
  misc_feature: MA Experiment 20000113 PARAMETER Experiment Name: At_42deg_Heat_cDNA_P Parameter: Temperature (deg C) Value: 42 vs. 22
  misc_feature: MA Experiment 20000113 PARAMETER Experiment Name: At_42deg_Heat_cDNA_P Parameter: Timepoint (hr) Value: 8
  misc_feature: MA Experiment 20000113 PARAMETER Experiment Name: At_42deg_Heat_cDNA_P Parameter: Tissue Value: Aerial
  misc_feature: MA Experiment ID: 20000117 Result: Up-regulated in Transcription
  misc_feature: MA Experiment 20000117 PARAMETER Experiment Name: At_100uM_ABA_Mutants_cDNA_P Parameter: Plant Line Value: Columbia
  misc_feature: MA Experiment 20000117 PARAMETER Experiment Name: At_100uM_ABA_Mutants_cDNA_P Parameter: Timepoint (hr) Value: 6
  misc_feature: MA Experiment 20000117 PARAMETER Experiment Name: At_100uM_ABA_Mutants_cDNA_P Parameter: Tissue Value: Aerial
  misc_feature: MA Experiment 20000117 PARAMETER Experiment Name: At_100uM_ABA_Mutants_cDNA_P Parameter: Treatment Value: 100uM ABA vs. No Treatment
  misc_feature: MA Experiment ID: 20000173 Result: Down-regulated in Transcription
  misc_feature: MA Experiment 20000173 PARAMETER Experiment Name: At_42deg_Heat_P Parameter: Age (day) Value: 14
  misc_feature: MA Experiment 20000173 PARAMETER Experiment Name: At_42deg_Heat_P Parameter: Organism Value: A. thaliana
  misc_feature: MA Experiment 20000173 PARAMETER Experiment Name: At_42deg_Heat_P Parameter: Plant Line Value: WS
  misc_feature: MA Experiment 20000173 PARAMETER Experiment Name: At_42deg_Heat_P Parameter: Temperature (deg C) Value: 42 vs. 22
  misc_feature: MA Experiment 20000173 PARAMETER Experiment Name: At_42deg_Heat_P Parameter: Timepoint (hr) Value: 6
  misc_feature: MA Experiment 20000173 PARAMETER Experiment Name: At_42deg_Heat_P Parameter: Tissue Value: Aerial
  misc_feature: MA Experiment ID: 20000213 Result: Up-regulated in Transcription
  misc_feature: MA Experiment 20000213 PARAMETER Experiment Name: At_4deg_Cold_P Parameter: Timepoint (hr) Value: 2
  misc_feature: MA Experiment ID: 20000453 Result: Down-regulated in Transcription
  misc_feature: MA Experiment 20000453 PARAMETER Experiment Name: At_100uM_ABA_P Parameter: Age (day) Value: 15
  misc_feature: MA Experiment 20000453 PARAMETER Experiment Name: At_100uM_ABA_P Parameter: Organism Value: A. thaliana
  misc_feature: MA Experiment 20000453 PARAMETER Experiment Name: At_100uM_ABA_P Parameter: Plant Line Value: WS
  misc_feature: MA Experiment 20000453 PARAMETER Experiment Name: At_100uM_ABA_P Parameter: Timepoint (hr) Value: 24
  misc_feature: MA Experiment 20000453 PARAMETER Experiment Name: At_100uM_ABA_P Parameter: Tissue Value: Aerial
  misc_feature: MA Experiment 20000453 PARAMETER Experiment Name: At_100uM_ABA_P Parameter: Treatment Value: 100uM ABA vs. No Treatment
  misc_feature: MA Experiment ID: 20001247 Result: Down-regulated in Transcription
  misc_feature: MA Experiment 20001247 PARAMETER Experiment Name: At_Far-red-induction_P Parameter: Age (day) Value: 7
  misc_feature: MA Experiment 20001247 PARAMETER Experiment Name: At_Far-red-induction_P Parameter: Light Value: Far-red vs. White
  misc_feature: MA Experiment 20001247 PARAMETER Experiment Name: At_Far-red-induction_P Parameter: Organism Value: A. thaliana
  misc_feature: MA Experiment 20001247 PARAMETER Experiment Name: At_Far-red-induction_P Parameter: Plant Line Value: Columbia
  misc_feature: MA Experiment 20001247 PARAMETER Experiment Name: At_Far-red-induction_P Parameter: Timepoint (hr) Value: 1
  misc_feature: MA Experiment 20001247 PARAMETER Experiment Name: At_Far-red-induction_P Parameter: Tissue Value: Whole Plant
  misc_feature: MA Experiment ID: 20001248 Result: Up-regulated in Transcription
  misc_feature: MA Experiment 20001248 PARAMETER Experiment Name: At_Far-red-induction_P Parameter: Age (day) Value: 7
  misc_feature: MA Experiment 20001248 PARAMETER Experiment Name: At_Far-red-induction_P Parameter: Light Value: Far-red vs. White
  misc_feature: MA Experiment 20001248 PARAMETER Experiment Name: At_Far-red-induction_P Parameter: Organism Value: A. thaliana
  misc_feature: MA Experiment 20001248 PARAMETER Experiment Name: At_Far-red-induction_P Parameter: Plant Line Value: Columbia
  misc_feature: MA Experiment 20001248 PARAMETER Experiment Name: At_Far-red-induction_P Parameter: Timepoint (hr) Value: 4
  misc_feature: MA Experiment 20001248 PARAMETER Experiment Name: At_Far-red-induction_P Parameter: Tissue Value: Whole Plant
  misc_feature: MA Experiment ID: 20001557 Result: Up-regulated in Transcription
  misc_feature: MA Experiment 20001557 PARAMETER Experiment Name: At_Drought_Soil_Dry_P Parameter: Age (day) Value: 27
  misc_feature: MA Experiment 20001557 PARAMETER Experiment Name: At_Drought_Soil_Dry_P Parameter: Organism Value: A. thaliana
  misc_feature: MA Experiment 20001557 PARAMETER Experiment Name: At_Drought_Soil_Dry_P Parameter: Plant Line Value: WS
  misc_feature: MA Experiment 20001557 PARAMETER Experiment Name: At_Drought_Soil_Dry_P Parameter: Post Timepoint (hr) Value: 3
  misc_feature: MA Experiment 20001557 PARAMETER Experiment Name: At_Drought_Soil_Dry_P Parameter: Post-Treatment Value: Re-Water vs. No Drought
  misc_feature: MA Experiment 20001557 PARAMETER Experiment Name: At_Drought_Soil_Dry_P Parameter: Timepoint (day) Value: 13
  misc_feature: MA Experiment 20001557 PARAMETER Experiment Name: At_Drought_Soil_Dry_P Parameter: Treatment Value: Drought vs. No Drought
ttgtatgacataatgacgacgagacgaaggacaaaattgtcatttaaggaataaaagatattcttacaaagatattttttgctcgaaacgaggagaaaaaatcattagttatcgaaaatgctcacatgatgtgggcctaaccactaacccaattaaccacacatcttaatcagagtaagttgaaacaaatctttcagcaaaccctagaaaacatgtttaaccctagttattacgtcacacctgttctataaattaaggctgcgtcttatcacctcaaatcacataagtctctctcttacattttgaaaccctaatttctcaaaaaaaatgtctgaagttgagtaccggtgctttgtcggcggccttgcctgggccaccaatgatgaagatcttcaaaggacgttctcacagttcggcgacgttatcgattctaaggtctgttacacgagagatcggtctcccggatcgagccgattccgatgattctgatcctcgacggatctgattccgatctgtttctctgttacttgattcgattactgttactatgttctctctcgttctttgttactgttacttaatttgtcccatcggtacgttcatcttcctgcttctatgagctcggagatcgatcgatttttgctttattttcatcgctttgttttatattccttccacgattgtttttgctgatgtgtatgattttgtttgtttacagatcattaacgaccgcgagagtggaagatcaaggggattcggattcgtcaccttcaaggacgagaaagccatgagggatgcgattgaagagatgaacggtaaagagctcgatggacgtgtcatcaccgtgaacgaggctcagtcgagaggtagcggcggtggcggaggaggccgtggtggaagcggtggtggttaccgcagcggaggcggtggtggatactcaggaggcggtggcggcggatactcaggaggaggcggtggtggttacgagagacgtagcggaggttacggatctggtggaggcggtggtggccgaggatacggtggtggtggacgccgtgagggaggtggctacggaggcggtgatggtggaagttacggaggcggtggtggcggctggtaatcaaagatagagttgtttgcgtgctgctgctctgtttttggtttagatttggttttgtgtcaccacttctggtttggttatcgttcgtttggtttacttttttgatgaaacagtttcgtttaagtcttctttgtctggaacgaaatgttaattcgcgtgttgtttactaaatttataacgtttccttttaaccagattcgagattttccctcaaataatttatcttgtt

SEQ ID NO: 38383 - protein, 110 aa, Arabidopsis thaliana; identical to SEQ ID NO: 22060
  peptide (1)..(110): Ceres Seq. ID no. 13488011
  misc_feature (30)..(109): Pfam Name: Herpesvirus large structural phosphoprotein UL32 Pfam Description: Herpesvirus large structural phosphoprotein UL32
  misc_feature (1)..(108): Homolog of NCBI NO: 18076086 NR Description: glycine-rich RNA-binding protein [Ricinus
  misc_feature (1)..(110): Homolog of NCBI NO: 15226605 NR Description: glycine-rich RNA-binding protein (AtGRP7)
  misc_feature (1)..(109): Homolog of NCBI NO: 7439985 NR Description: glycine-rich RNA-binding protein - rice
  misc_feature (1)..(108): Homolog of NCBI NO: 7439982 NR Description: RNA-binding glycine-rich protein-1 (RGP-1c) -
  misc_feature (1)..(104): Homolog of NCBI NO: 7439987 NR Description: glycine-rich RNA-binding protein - rice
  misc_feature (1)..(110): Homolog of NCBI NO: 2331131 NR Description: glycine-rich protein [Oryza sativa]
  misc_feature (1)..(106): Homolog of NCBI NO: 20152613 NR Description: putative glycine rich protein [Rumex obtusifolius]
  misc_feature (1)..(110): Homolog of NCBI NO: 14334648 NR Description: putative glycine-rich protein [Arabidopsis
  misc_feature (1)..(110): Homolog of NCBI NO: 1346180 NR Description: Glycine-rich RNA-binding protein GRP1A
  misc_feature (1)..(110): Homolog of NCBI NO: 15235002 NR Description: glycine-rich RNA-binding protein 8 (GRP8) (CCR1)

SEQ ID NO: 38384 - protein, 103 aa, Arabidopsis thaliana; identical to SEQ ID NO: 22061
  peptide (1)..(103): Ceres Seq. ID no. 13488012
  misc_feature (23)..(102): Pfam Name: Herpesvirus large structural phosphoprotein UL32 Pfam Description: Herpesvirus large structural phosphoprotein UL32
  misc_feature (1)..(101): Homolog of NCBI NO: 18076086 NR Description: glycine-rich RNA-binding protein [Ricinus
  misc_feature (1)..(103): Homolog of NCBI NO: 15226605 NR Description: glycine-rich RNA-binding protein (AtGRP7)
  misc_feature (1)..(102): Homolog of NCBI NO: 7439985 NR Description: glycine-rich RNA-binding protein - rice
  misc_feature (1)..(101): Homolog of NCBI NO: 7439982 NR Description: RNA-binding glycine-rich protein-1 (RGP-1c) -
  misc_feature (1)..(97): Homolog of NCBI NO: 7439987 NR Description: glycine-rich RNA-binding protein - rice
  misc_feature (1)..(103): Homolog of NCBI NO: 2331131 NR Description: glycine-rich protein [Oryza sativa]
  misc_feature (1)..(99): Homolog of NCBI NO: 20152613 NR Description: putative glycine rich protein [Rumex obtusifolius]
  misc_feature (1)..(103): Homolog of NCBI NO: 14334648 NR Description: putative glycine-rich protein [Arabidopsis
  misc_feature (1)..(103): Homolog of NCBI NO: 1346180 NR Description: Glycine-rich RNA-binding protein GRP1A
  misc_feature (1)..(103): Homolog of NCBI NO: 15235002 NR Description: glycine-rich RNA-binding protein 8 (GRP8) (CCR1)

SEQ ID NO: 38385 - DNA, 767 bp, Arabidopsis thaliana; identical to SEQ ID NO: 38288
  misc_feature (1)..(767): Ceres Seq. ID no. 13497708
  misc_feature: MA Experiment ID: 108434 Result: Up-regulated in Transcription
  misc_feature: MA Experiment 108434 PARAMETER Experiment Name: At_Root_Tips_cDNA_P Parameter: Tissue Value: Root Tips
  misc_feature: MA Experiment ID: 108435 Result: Up-regulated in Transcription
  misc_feature: MA Experiment 108435 PARAMETER Experiment Name: At_stm_Mutants_cDNA_P Parameter: Plant Line Value: wt Landsburg vs stm
  misc_feature: MA Experiment 108435 PARAMETER Experiment Name: At_stm_Mutants_cDNA_P Parameter: Tissue Value: Shoot Apical Meristem Region
  misc_feature: MA Experiment ID: 108461 Result: Up-regulated in Transcription
  misc_feature: MA Experiment 108461 PARAMETER Experiment Name: At_Germinating_Seeds_cDNA_P Parameter: Age (day) Value: 1 vs. 0
  misc_feature: MA Experiment 108461 PARAMETER Experiment Name: At_Germinating_Seeds_cDNA_P Parameter: Tissue Value: Germinating Seeds
  misc_feature: MA Experiment ID: 108462 Result: Up-regulated in Transcription
  misc_feature: MA Experiment 108462 PARAMETER Experiment Name: At_Germinating_Seeds_cDNA_P Parameter: Age (day) Value: 2 vs. 0
  misc_feature: MA Experiment 108462 PARAMETER Experiment Name: At_Germinating_Seeds_cDNA_P Parameter: Tissue Value: Germinating Seeds
  misc_feature: MA Experiment ID: 108463 Result: Up-regulated in Transcription
  misc_feature: MA Experiment 108463 PARAMETER Experiment Name: At_Germinating_Seeds_cDNA_P Parameter: Age (day) Value: 3 vs. 0
  misc_feature: MA Experiment 108463 PARAMETER Experiment Name: At_Germinating_Seeds_cDNA_P Parameter: Tissue Value: Germinating Seeds
  misc_feature: MA Experiment ID: 108474 Result: Down-regulated in Transcription
  misc_feature: MA Experiment 108474 PARAMETER Experiment Name: At_Drought_Flowers_cDNA_P Parameter: Timepoint (hr) Value: null
  misc_feature: MA Experiment 108474 PARAMETER Experiment Name: At_Drought_Flowers_cDNA_P Parameter: Treatment Value: Drought vs. No Drought
  misc_feature: MA Experiment ID: 108501 Result: Up-regulated in Transcription
  misc_feature: MA Experiment 108501 PARAMETER Experiment Name: At_ap2_floral_buds_cDNA_P Parameter: Plant Line Value: ap2 (Ler.)
  misc_feature: MA Experiment 108501 PARAMETER Experiment Name: At_ap2_floral_buds_cDNA_P Parameter: Tissue Value: Closed Flower
  misc_feature: MA Experiment ID: 108561 Result: Down-regulated in Transcription
  misc_feature: MA Experiment 108561 PARAMETER Experiment Name: At_100uM_ABA_cDNA_P Parameter: Timepoint (hr) Value: 6
  misc_feature: MA Experiment 108561 PARAMETER Experiment Name: At_100uM_ABA_cDNA_P Parameter: Tissue Value: Aerial
  misc_feature: MA Experiment 108561 PARAMETER Experiment Name: At_100uM_ABA_cDNA_P Parameter: Treatment Value: 100uM ABA vs. No Treatment
  misc_feature: MA Experiment ID: 108572 Result: Down-regulated in Transcription
  misc_feature: MA Experiment 108572 PARAMETER Experiment Name: At_Drought_cDNA_P Parameter: Timepoint (hr) Value: 1
  misc_feature: MA Experiment 108572 PARAMETER Experiment Name: At_Drought_cDNA_P Parameter: Tissue Value: Aerial
  misc_feature: MA Experiment 108572 PARAMETER Experiment Name: At_Drought_cDNA_P Parameter: Treatment Value: Drought vs. No Drought
  misc_feature: MA Experiment ID: 108576 Result: Down-regulated in Transcription
  misc_feature: MA Experiment 108576 PARAMETER Experiment Name: At_42deg_Heat_cDNA_P Parameter: Temperature (deg C) Value: 42 vs. 22
  misc_feature: MA Experiment 108576 PARAMETER Experiment Name: At_42deg_Heat_cDNA_P Parameter: Timepoint (hr) Value: 1
  misc_feature: MA Experiment 108576 PARAMETER Experiment Name: At_42deg_Heat_cDNA_P Parameter: Tissue Value: Aerial
  misc_feature: MA Experiment ID: 108577 Result: Up-regulated in Transcription
  misc_feature: MA Experiment 108577 PARAMETER Experiment Name: At_42deg_Heat_cDNA_P Parameter: Temperature (deg C) Value: 42 vs. 22
  misc_feature: MA Experiment 108577 PARAMETER Experiment Name: At_42deg_Heat_cDNA_P Parameter: Timepoint (hr) Value: 6
  misc_feature: MA Experiment 108577 PARAMETER Experiment Name: At_42deg_Heat_cDNA_P Parameter: Tissue Value: Aerial
  misc_feature: MA Experiment ID: 108579 Result: Up-regulated in Transcription
  misc_feature: MA Experiment 108579 PARAMETER Experiment Name: At_4deg_Cold_cDNA_P Parameter: Temperature (deg C) Value: 4 vs. 22
  misc_feature: MA Experiment 108579 PARAMETER Experiment Name: At_4deg_Cold_cDNA_P Parameter: Timepoint (hr) Value: 6
  misc_feature: MA Experiment 108579 PARAMETER Experiment Name: At_4deg_Cold_cDNA_P Parameter: Tissue Value: Aerial
  misc_feature: MA Experiment ID: 108585 Result: Up-regulated in Transcription
  misc_feature: MA Experiment 108585 PARAMETER Experiment Name: At_5mM_NaNP_cDNA_P Parameter: Timepoint (hr) Value: 6
  misc_feature: MA Experiment 108585 PARAMETER Experiment Name: At_5mM_NaNP_cDNA_P Parameter: Tissue Value: Aerial
  misc_feature: MA Experiment 108585 PARAMETER Experiment Name: At_5mM_NaNP_cDNA_P Parameter: Treatment Value: null
  misc_feature: MA Experiment ID: 108595 Result: Up-regulated in Transcription
  misc_feature: MA Experiment 108595 PARAMETER Experiment Name: At_Ler-pi_Ovule_cDNA_P Parameter: Plant Line Value: null
  misc_feature: MA Experiment ID: 108605 Result: Down-regulated in Transcription
  misc_feature: MA Experiment 108605 PARAMETER Experiment Name: At_100uM_ABA_cDNA_P Parameter: Timepoint (hr) Value: 6
  misc_feature: MA Experiment 108605 PARAMETER Experiment Name: At_100uM_ABA_cDNA_P Parameter: Tissue Value: Aerial
  misc_feature: MA Experiment 108605 PARAMETER Experiment Name: At_100uM_ABA_cDNA_P Parameter: Treatment Value: 100uM ABA vs. No Treatment
  misc_feature: MA Experiment ID: 108668 Result: Up-regulated in Transcription
  misc_feature: MA Experiment 108668 PARAMETER Experiment Name: At_2mM_SA_cDNA_P Parameter: Plant Line Value: WS
  misc_feature: MA Experiment 108668 PARAMETER Experiment Name: At_2mM_SA_cDNA_P Parameter: Timepoint (hr) Value: 6
  misc_feature: MA Experiment 108668 PARAMETER Experiment Name: At_2mM_SA_cDNA_P Parameter: Treatment Value: 2mM SA vs. No Treatment
  misc_feature: MA Experiment ID: 20000069 Result: Down-regulated in Transcription
  misc_feature: MA Experiment 20000069 PARAMETER Experiment Name: At_100uM_ABA_Mutants_cDNA_P Parameter: Plant Line Value: CS23
  misc_feature: MA Experiment 20000069 PARAMETER Experiment Name: At_100uM_ABA_Mutants_cDNA_P Parameter: Timepoint (hr) Value: 6
  misc_feature: MA Experiment 20000069 PARAMETER Experiment Name: At_100uM_ABA_Mutants_cDNA_P Parameter: Tissue Value: Aerial
  misc_feature: MA Experiment 20000069 PARAMETER Experiment Name: At_100uM_ABA_Mutants_cDNA_P Parameter: Treatment Value: 100uM ABA vs. No Treatment
  misc_feature: MA Experiment ID: 20000070 Result: Down-regulated in Transcription
  misc_feature: MA Experiment 20000070 PARAMETER Experiment Name: At_100uM_ABA_Mutants_cDNA_P Parameter: Plant Line Value: CS24
  misc_feature: MA Experiment 20000070 PARAMETER Experiment Name: At_100uM_ABA_Mutants_cDNA_P Parameter: Timepoint (hr) Value: 6
  misc_feature: MA Experiment 20000070 PARAMETER Experiment Name: At_100uM_ABA_Mutants_cDNA_P Parameter: Tissue Value: Aerial
  misc_feature: MA Experiment 20000070 PARAMETER Experiment Name: At_100uM_ABA_Mutants_cDNA_P Parameter: Treatment Value: 100uM ABA vs. No Treatment
  misc_feature: MA Experiment ID: 20000071 Result: Down-regulated in Transcription
  misc_feature: MA Experiment 20000071 PARAMETER Experiment Name: At_100uM_ABA_Mutants_cDNA_P Parameter: Plant Line Value: CS8104
  misc_feature: MA Experiment 20000071 PARAMETER Experiment Name: At_100uM_ABA_Mutants_cDNA_P Parameter: Timepoint (hr) Value: 6
  misc_feature: MA Experiment 20000071 PARAMETER Experiment Name: At_100uM_ABA_Mutants_cDNA_P Parameter: Tissue Value: Aerial
  misc_feature: MA Experiment 20000071 PARAMETER Experiment Name: At_100uM_ABA_Mutants_cDNA_P Parameter: Treatment Value: 100uM ABA vs. No Treatment
  misc_feature: MA Experiment ID: 20000072 Result: Down-regulated in Transcription
  misc_feature: MA Experiment 20000072 PARAMETER Experiment Name: At_100uM_ABA_Mutants_cDNA_P Parameter: Plant Line Value: CS8105
  misc_feature: MA Experiment 20000072 PARAMETER Experiment Name: At_100uM_ABA_Mutants_cDNA_P Parameter: Timepoint (hr) Value: 6
  misc_feature: MA Experiment 20000072 PARAMETER Experiment Name: At_100uM_ABA_Mutants_cDNA_P Parameter: Tissue Value: Aerial
  misc_feature: MA Experiment 20000072 PARAMETER Experiment Name: At_100uM_ABA_Mutants_cDNA_P Parameter: Treatment Value: 100uM ABA vs. No Treatment
  misc_feature: MA Experiment ID: 20000087 Result: Down-regulated in Transcription
  misc_feature: MA Experiment 20000087 PARAMETER Experiment Name: At_100uM_ABA_Mutants_cDNA_P Parameter: Plant Line Value: WS
  misc_feature: MA Experiment 20000087 PARAMETER Experiment Name: At_100uM_ABA_Mutants_cDNA_P Parameter: Timepoint (hr) Value: 6
  misc_feature: MA Experiment 20000087 PARAMETER Experiment Name: At_100uM_ABA_Mutants_cDNA_P Parameter: Tissue Value: Aerial
  misc_feature: MA Experiment 20000087 PARAMETER Experiment Name: At_100uM_ABA_Mutants_cDNA_P Parameter: Treatment Value: 100uM ABA vs. No Treatment
  misc_feature: MA Experiment ID: 20000088 Result: Down-regulated in Transcription
  misc_feature: MA Experiment 20000088 PARAMETER Experiment Name: At_100uM_ABA_Mutants_cDNA_P Parameter: Plant Line Value: Landsberg
  misc_feature: MA Experiment 20000088 PARAMETER Experiment Name: At_100uM_ABA_Mutants_cDNA_P Parameter: Timepoint (hr) Value: 6
  misc_feature: MA Experiment 20000088 PARAMETER Experiment Name: At_100uM_ABA_Mutants_cDNA_P Parameter: Tissue Value: Aerial
  misc_feature: MA Experiment 20000088 PARAMETER Experiment Name: At_100uM_ABA_Mutants_cDNA_P Parameter: Treatment Value: 100uM ABA vs. No Treatment
  misc_feature: MA Experiment ID: 20000111 Result: Up-regulated in Transcription
  misc_feature: MA Experiment 20000111 PARAMETER Experiment Name: At_42deg_Heat_cDNA_P Parameter: Temperature (deg C) Value: 42 vs. 22
  misc_feature: MA Experiment 20000111 PARAMETER Experiment Name: At_42deg_Heat_cDNA_P Parameter: Timepoint (hr) Value: 6
  misc_feature: MA Experiment 20000111 PARAMETER Experiment Name: At_42deg_Heat_cDNA_P Parameter: Tissue Value: Aerial
  misc_feature: MA Experiment ID: 20000112 Result: Up-regulated in Transcription
  misc_feature: MA Experiment 20000112 PARAMETER Experiment Name: At_42deg_Heat_cDNA_P Parameter: Temperature (deg C) Value: 42 vs. 22
  misc_feature: MA Experiment 20000112 PARAMETER Experiment Name: At_42deg_Heat_cDNA_P Parameter: Timepoint (hr) Value: 2
  misc_feature: MA Experiment 20000112 PARAMETER Experiment Name: At_42deg_Heat_cDNA_P Parameter: Tissue Value: Aerial
  misc_feature: MA Experiment ID: 20000117 Result: Down-regulated in Transcription
  misc_feature: MA Experiment 20000117 PARAMETER Experiment Name: At_100uM_ABA_Mutants_cDNA_P Parameter: Plant Line Value: Columbia
  misc_feature: MA Experiment 20000117 PARAMETER Experiment Name: At_100uM_ABA_Mutants_cDNA_P Parameter: Timepoint (hr) Value: 6
  misc_feature: MA Experiment 20000117 PARAMETER Experiment Name: At_100uM_ABA_Mutants_cDNA_P Parameter: Tissue Value: Aerial
  misc_feature: MA Experiment 20000117 PARAMETER Experiment Name: At_100uM_ABA_Mutants_cDNA_P Parameter: Treatment Value: 100uM ABA vs. No Treatment
  misc_feature: MA Experiment ID: 20000144 Result: Up-regulated in Transcription
  misc_feature: MA Experiment 20000144 PARAMETER Experiment Name: At_42deg_Heat_cDNA_P Parameter: Temperature (deg C) Value: 42 vs. 22
  misc_feature: MA Experiment 20000144 PARAMETER Experiment Name: At_42deg_Heat_cDNA_P Parameter: Timepoint (hr) Value: 1
  misc_feature: MA Experiment 20000144 PARAMETER Experiment Name: At_42deg_Heat_cDNA_P Parameter: Tissue Value: Aerial
  misc_feature: MA Experiment ID: 20000169 Result: Down-regulated in Transcription
  misc_feature: MA Experiment 20000169 PARAMETER Experiment Name: At_100uM_ABA_P Parameter: Age (day) Value: 14
  misc_feature: MA Experiment 20000169 PARAMETER Experiment Name: At_100uM_ABA_P Parameter: Organism Value: A. thaliana
  misc_feature: MA Experiment 20000169 PARAMETER Experiment Name: At_100uM_ABA_P Parameter: Plant Line Value: WS
  misc_feature: MA Experiment 20000169 PARAMETER Experiment Name: At_100uM_ABA_P Parameter: Timepoint (hr) Value: 6
  misc_feature: MA Experiment 20000169 PARAMETER Experiment Name: At_100uM_ABA_P Parameter: Tissue Value: Aerial
  misc_feature: MA Experiment 20000169 PARAMETER Experiment Name: At_100uM_ABA_P Parameter: Treatment Value: 100uM ABA vs. No Treatment
  misc_feature: MA Experiment ID: 20000171 Result: Up-regulated in Transcription
  misc_feature: MA Experiment 20000171 PARAMETER Experiment Name: At_42deg_Heat_P Parameter: Age (day) Value: 14
  misc_feature: MA Experiment 20000171 PARAMETER Experiment Name: At_42deg_Heat_P Parameter: Organism Value: A. thaliana
  misc_feature: MA Experiment 20000171 PARAMETER Experiment Name: At_42deg_Heat_P Parameter: Plant Line Value: WS
  misc_feature: MA Experiment 20000171 PARAMETER Experiment Name: At_42deg_Heat_P Parameter: Temperature (deg C) Value: 42 vs. 22
  misc_feature: MA Experiment 20000171 PARAMETER Experiment Name: At_42deg_Heat_P Parameter: Timepoint (hr) Value: 1
  misc_feature: MA Experiment 20000171 PARAMETER Experiment Name: At_42deg_Heat_P Parameter: Tissue Value: Aerial
  misc_feature: MA Experiment ID: 20000173 Result: Up-regulated in Transcription
  misc_feature: MA Experiment 20000173 PARAMETER Experiment Name: At_42deg_Heat_P Parameter: Age (day) Value: 14
  misc_feature: MA Experiment 20000173 PARAMETER Experiment Name: At_42deg_Heat_P Parameter: Organism Value: A. thaliana
  misc_feature: MA Experiment 20000173 PARAMETER Experiment Name: At_42deg_Heat_P Parameter: Plant Line Value: WS
  misc_feature: MA Experiment 20000173 PARAMETER Experiment Name: At_42deg_Heat_P Parameter: Temperature (deg C) Value: 42 vs. 22
  misc_feature: MA Experiment 20000173 PARAMETER Experiment Name: At_42deg_Heat_P Parameter: Timepoint (hr) Value: 6
  misc_feature: MA Experiment 20000173 PARAMETER Experiment Name: At_42deg_Heat_P Parameter: Tissue Value: Aerial
  misc_feature: MA Experiment ID: 20000179 Result: Up-regulated in Transcription
  misc_feature: MA Experiment 20000179 PARAMETER Experiment Name: At_Germinating_Seeds_P Parameter: Age (hr) Value: 6 vs. 0
  misc_feature: MA Experiment 20000179 PARAMETER Experiment Name: At_Germinating_Seeds_P Parameter: Tissue Value: Germinating Seeds
  misc_feature: MA Experiment ID: 20000180 Result: Up-regulated in Transcription
  misc_feature: MA Experiment 20000180 PARAMETER Experiment Name: At_Germinating_Seeds_P Parameter: Age (hr) Value: 24 vs. 0
  misc_feature: MA Experiment 20000180 PARAMETER Experiment Name: At_Germinating_Seeds_P Parameter: Tissue Value: Germinating Seeds
  misc_feature: MA Experiment ID: 20000182 Result: Up-regulated in Transcription
  misc_feature: MA Experiment 20000182 PARAMETER Experiment Name: At_2mM_SA_P Parameter: Age (day) Value: 14
  misc_feature: MA Experiment 20000182 PARAMETER Experiment Name: At_2mM_SA_P Parameter: Organism Value: A. thaliana
  misc_feature: MA Experiment 20000182 PARAMETER Experiment Name: At_2mM_SA_P Parameter: Plant Line Value: WS
  misc_feature: MA Experiment 20000182 PARAMETER Experiment Name: At_2mM_SA_P Parameter: Timepoint (hr) Value: 6
  misc_feature: MA Experiment 20000182 PARAMETER Experiment Name: At_2mM_SA_P Parameter: Tissue Value: Aerial
  misc_feature: MA Experiment 20000182 PARAMETER Experiment Name: At_2mM_SA_P Parameter: Treatment Value: 2mM SA vs. No Treatment
  misc_feature: MA Experiment ID: 20000185 Result: Up-regulated in Transcription
  misc_feature: MA Experiment 20000185 PARAMETER Experiment Name: At_Roots__P Parameter: Age (day) Value: 7 vs. 21
  misc_feature: MA Experiment 20000185 PARAMETER Experiment Name: At_Roots__P Parameter: Organism Value: A. thaliana
  misc_feature: MA Experiment 20000185 PARAMETER Experiment Name: At_Roots__P Parameter: Tissue Value: Roots vs. Whole Plant
  misc_feature: MA Experiment ID: 20000213 Result: Up-regulated in Transcription
  misc_feature: MA Experiment 20000213 PARAMETER Experiment Name: At_4deg_Cold_P Parameter: Timepoint (hr) Value: 2
  misc_feature: MA Experiment ID: 20000234 Result: Up-regulated in Transcription
  misc_feature: MA Experiment 20000234 PARAMETER Experiment Name: At_Siliques_P Parameter: Age (day) Value: 21
  misc_feature: MA Experiment 20000234 PARAMETER Experiment Name: At_Siliques_P Parameter: Organism Value: A. thaliana
  misc_feature: MA Experiment 20000234 PARAMETER Experiment Name: At_Siliques_P Parameter: Plant Line Value: WS
  misc_feature: MA Experiment 20000234 PARAMETER Experiment Name: At_Siliques_P Parameter: Tissue Value: Less Than 5mm Siliques vs. Whole Plant
  misc_feature: MA Experiment ID: 20000235 Result: Up-regulated in Transcription
  misc_feature: MA Experiment 20000235 PARAMETER Experiment Name: At_Siliques_P Parameter: Age (day) Value: 21
  misc_feature: MA Experiment 20000235 PARAMETER Experiment Name: At_Siliques_P Parameter: Organism Value: A. thaliana
  misc_feature: MA Experiment 20000235 PARAMETER Experiment Name: At_Siliques_P Parameter: Plant Line Value: WS
  misc_feature: MA Experiment 20000235 PARAMETER Experiment Name: At_Siliques_P Parameter: Tissue Value: 5-10mm Siliques vs. Whole Plant
  misc_feature: MA Experiment ID: 20000264 Result: Up-regulated in Transcription
  misc_feature: MA Experiment 20000264 PARAMETER Experiment Name: At_Open_Flower_P Parameter: Age (day) Value: 21
  misc_feature: MA Experiment 20000264 PARAMETER Experiment Name: At_Open_Flower_P Parameter: Plant Line Value: WS
  misc_feature: MA Experiment 20000264 PARAMETER Experiment Name: At_Open_Flower_P Parameter: Tissue Value: Open Flower vs. Whole Plant
  misc_feature: MA Experiment ID: 20000265 Result: Up-regulated in Transcription
  misc_feature: MA Experiment 20000265 PARAMETER Experiment Name: At_Open_Flower_P Parameter: Age (day) Value: 21
  misc_feature: MA Experiment 20000265 PARAMETER Experiment Name: At_Open_Flower_P Parameter: Plant Line Value: WS
  misc_feature: MA Experiment 20000265 PARAMETER Experiment Name: At_Open_Flower_P Parameter: Tissue Value: Closed Flower vs. Whole Plant
  misc_feature: MA Experiment ID: 20000267 Result: Up-regulated in Transcription
  misc_feature: MA Experiment 20000267 PARAMETER Experiment Name: At_Drought_P Parameter: Age (day) Value: 7
  misc_feature: MA Experiment 20000267 PARAMETER Experiment Name: At_Drought_P Parameter: Organism Value: A. thaliana
  misc_feature: MA Experiment 20000267 PARAMETER Experiment Name: At_Drought_P Parameter: Plant Line Value: WS
  misc_feature: MA Experiment 20000267 PARAMETER Experiment Name: At_Drought_P Parameter: Timepoint (hr) Value: 6
  misc_feature: MA Experiment 20000267 PARAMETER Experiment Name: At_Drought_P Parameter: Tissue Value: Whole Plant
  misc_feature: MA Experiment 20000267 PARAMETER Experiment Name: At_Drought_P Parameter: Treatment Value: Drought vs. No Drought
  misc_feature: MA Experiment ID: 20000268 Result: Up-regulated in Transcription
  misc_feature: MA Experiment 20000268 PARAMETER Experiment Name: At_100mM_NaCl__P Parameter: Age (day) Value: 14
  misc_feature: MA Experiment 20000268 PARAMETER Experiment Name: At_100mM_NaCl__P Parameter: Organism Value: A. thaliana
  misc_feature: MA Experiment 20000268 PARAMETER Experiment Name: At_100mM_NaCl__P Parameter: Plant Line Value: WS
  misc_feature: MA Experiment 20000268 PARAMETER Experiment Name: At_100mM_NaCl__P Parameter: Timepoint (hr) Value: 6
  misc_feature: MA Experiment 20000268 PARAMETER Experiment Name: At_100mM_NaCl__P Parameter: Tissue Value: Whole Plant
  misc_feature: MA Experiment 20000268 PARAMETER Experiment Name: At_100mM_NaCl__P Parameter: Treatment Value: 100mM NaCl vs. No Treatment
  misc_feature: MA Experiment ID: 20000286 Result: Up-regulated in Transcription
  misc_feature: MA Experiment 20000286 PARAMETER Experiment Name: At_Open_Flower_P Parameter: Age (day) Value: 21
  misc_feature: MA Experiment 20000286 PARAMETER Experiment Name: At_Open_Flower_P Parameter: Plant Line Value: WS
  misc_feature: MA Experiment 20000286 PARAMETER Experiment Name: At_Open_Flower_P Parameter: Tissue Value: Half Open vs. Whole Plant
  misc_feature: MA Experiment ID: 20000439 Result: Up-regulated in Transcription
  misc_feature: MA Experiment 20000439 PARAMETER Experiment Name: At_Roots__P Parameter: Age (day) Value: 14 vs. 21
  misc_feature: MA Experiment 20000439 PARAMETER Experiment Name: At_Roots__P Parameter: Organism Value: A. thaliana
  misc_feature: MA Experiment 20000439 PARAMETER Experiment Name: At_Roots__P Parameter: Tissue Value: Roots vs. Whole Plant
  misc_feature: MA Experiment ID: 20000456 Result: Up-regulated in Transcription
  misc_feature: MA Experiment 20000456 PARAMETER Experiment Name: At_100uM_BA_P Parameter: Age (day) Value: 14
  misc_feature: MA Experiment 20000456 PARAMETER Experiment Name: At_100uM_BA_P Parameter: Organism Value: A. thaliana
  misc_feature: MA Experiment 20000456 PARAMETER Experiment Name: At_100uM_BA_P Parameter: Plant Line Value: WS
  misc_feature: MA Experiment 20000456 PARAMETER Experiment Name: At_100uM_BA_P Parameter: Timepoint (hr) Value: 6
  misc_feature: MA Experiment 20000456 PARAMETER Experiment Name: At_100uM_BA_P Parameter: Tissue Value: Aerial
  misc_feature: MA Experiment 20000456 PARAMETER Experiment Name: At_100uM_BA_P Parameter: Treatment Value: 100uM BA vs. No Treatment
  misc_feature: MA Experiment ID: 20000495 Result: Down-regulated in Transcription
  misc_feature: MA Experiment 20000495 PARAMETER Experiment Name: At_Guard_Cells_P Parameter: Harvest Date Value: 8/2/2002
  misc_feature: MA Experiment 20000495 PARAMETER Experiment Name: At_Guard_Cells_P Parameter: Organism Value: A. thaliana
  misc_feature: MA Experiment 20000495 PARAMETER Experiment Name: At_Guard_Cells_P Parameter: Tissue Value: Guard Cells vs. Leaves
  misc_feature: MA Experiment ID: 20000527 Result: Up-regulated in Transcription
  misc_feature: MA Experiment 20000527 PARAMETER Experiment Name: At_10percent_PEG_P Parameter: Age (day) Value: 20
  misc_feature: MA Experiment 20000527 PARAMETER Experiment Name: At_10percent_PEG_P Parameter: Organism Value: A. thaliana
  misc_feature: MA Experiment 20000527 PARAMETER Experiment Name: At_10percent_PEG_P Parameter: Plant Line Value: WS
  misc_feature: MA Experiment 20000527 PARAMETER Experiment Name: At_10percent_PEG_P Parameter: Timepoint (day) Value: 20
  misc_feature: MA Experiment 20000527 PARAMETER Experiment Name: At_10percent_PEG_P Parameter: Tissue Value: Whole Plant
  misc_feature: MA Experiment 20000527 PARAMETER Experiment Name: At_10percent_PEG_P Parameter: Treatment Value: 10percent PEG vs. No Treatment
  misc_feature: MA Experiment ID: 20000709 Result: Up-regulated in Transcription
  misc_feature: MA Experiment 20000709 PARAMETER Experiment Name: At_15mM_NH4NO3_L-to-H_P Parameter: Age (hr) Value: 14
  misc_feature: MA Experiment 20000709 PARAMETER Experiment Name: At_15mM_NH4NO3_L-to-H_P Parameter: Organism Value: A. thaliana
  misc_feature: MA Experiment 20000709 PARAMETER Experiment Name: At_15mM_NH4NO3_L-to-H_P Parameter: Plant Line Value: WS
  misc_feature: MA Experiment 20000709 PARAMETER Experiment Name: At_15mM_NH4NO3_L-to-H_P Parameter: Timepoint (hr) Value: 4
  misc_feature: MA Experiment 20000709 PARAMETER Experiment Name: At_15mM_NH4NO3_L-to-H_P Parameter: Tissue Value: Aerial
  misc_feature: MA Experiment 20000709 PARAMETER Experiment Name: At_15mM_NH4NO3_L-to-H_P Parameter: Treatment Value: 15mM NH4NO3 vs. 30mM Mannitol
  misc_feature: MA Experiment ID: 20000794 Result: Up-regulated in Transcription
  misc_feature: MA Experiment 20000794 PARAMETER Experiment Name: At_Petals_P Parameter: Age (day) Value: 23-25 days
  misc_feature: MA Experiment 20000794 PARAMETER Experiment Name: At_Petals_P Parameter: Plant Line Value: WS
  misc_feature: MA Experiment 20000794 PARAMETER Experiment Name: At_Petals_P Parameter: Tissue Value: Petals vs. Whole plant
  misc_feature: MA Experiment ID: 20001248 Result: Down-regulated in Transcription
  misc_feature: MA Experiment 20001248 PARAMETER Experiment Name: At_Far-red-induction_P Parameter: Age (day) Value: 7
  misc_feature: MA Experiment 20001248 PARAMETER Experiment Name: At_Far-red-induction_P Parameter: Light Value: Far-red vs. White
  misc_feature: MA Experiment 20001248 PARAMETER Experiment Name: At_Far-red-induction_P Parameter: Organism Value: A. thaliana
  misc_feature: MA Experiment 20001248 PARAMETER Experiment Name: At_Far-red-induction_P Parameter: Plant Line Value: Columbia
  misc_feature: MA Experiment 20001248 PARAMETER Experiment Name: At_Far-red-induction_P Parameter: Timepoint (hr) Value: 4
  misc_feature: MA Experiment 20001248 PARAMETER Experiment Name: At_Far-red-induction_P Parameter: Tissue Value: Whole Plant
  misc_feature: MA Experiment ID: 20001451 Result: Up-regulated in Transcription
  misc_feature: MA Experiment 20001451 PARAMETER Experiment Name: At_Far-red-induction_P Parameter: Age (day) Value: 7
  misc_feature: MA Experiment 20001451 PARAMETER Experiment Name: At_Far-red-induction_P Parameter: Light Value: Far-red vs. White
  misc_feature: MA Experiment 20001451 PARAMETER Experiment Name: At_Far-red-induction_P Parameter: Organism Value: A. thaliana
  misc_feature: MA Experiment 20001451 PARAMETER Experiment Name: At_Far-red-induction_P Parameter: Plant Line Value: Columbia
  misc_feature: MA Experiment 20001451 PARAMETER Experiment Name: At_Far-red-induction_P Parameter: Timepoint (hr) Value: 24
  misc_feature: MA Experiment 20001451 PARAMETER Experiment Name: At_Far-red-induction_P Parameter: Tissue Value: Whole Plant
  misc_feature: MA Experiment ID: 20001557 Result: Up-regulated in Transcription
  misc_feature: MA Experiment 20001557 PARAMETER Experiment Name: At_Drought_Soil_Dry_P Parameter: Age (day) Value: 27
  misc_feature: MA Experiment 20001557 PARAMETER Experiment Name: At_Drought_Soil_Dry_P Parameter: Organism Value: A. thaliana
  misc_feature: MA Experiment 20001557 PARAMETER Experiment Name: At_Drought_Soil_Dry_P Parameter: Plant Line Value: WS
  misc_feature: MA Experiment 20001557 PARAMETER Experiment Name: At_Drought_Soil_Dry_P Parameter: Post Timepoint (hr) Value: 3
  misc_feature: MA Experiment 20001557 PARAMETER Experiment Name: At_Drought_Soil_Dry_P Parameter: Post-Treatment Value: Re-Water vs. No Drought
  misc_feature: MA Experiment 20001557 PARAMETER Experiment Name: At_Drought_Soil_Dry_P Parameter: Timepoint (day) Value: 13
  misc_feature: MA Experiment 20001557 PARAMETER Experiment Name: At_Drought_Soil_Dry_P Parameter: Treatment Value: Drought vs. No Drought
  misc_feature: MA Experiment ID: 20001560 Result: Up-regulated in Transcription
  misc_feature: MA Experiment 20001560 PARAMETER Experiment Name: At_Drought_Soil_Dry_P Parameter: Age (day) Value: 28
  misc_feature: MA Experiment 20001560 PARAMETER Experiment Name: At_Drought_Soil_Dry_P Parameter: Organism Value: A. thaliana
  misc_feature: MA Experiment 20001560 PARAMETER Experiment Name: At_Drought_Soil_Dry_P Parameter: Plant Line Value: WS
  misc_feature: MA Experiment 20001560 PARAMETER Experiment Name: At_Drought_Soil_Dry_P Parameter: Post Timepoint (hr) Value: None
  misc_feature: MA Experiment 20001560 PARAMETER Experiment Name: At_Drought_Soil_Dry_P Parameter: Post-Treatment Value: None
  misc_feature: MA Experiment 20001560 PARAMETER Experiment Name: At_Drought_Soil_Dry_P Parameter: Timepoint (day) Value: 14
  misc_feature: MA Experiment 20001560 PARAMETER Experiment Name: At_Drought_Soil_Dry_P Parameter: Treatment Value: Drought vs. No Drought
  misc_feature: MA Experiment ID: 20001755 Result: Down-regulated in Transcription
  misc_feature: MA Experiment 20001755 PARAMETER Experiment Name: At_50mM_NH4NO3_L-to-H_P Parameter: Timepoint (hr) Value: 2
  misc_feature: MA Experiment 20001755 PARAMETER Experiment Name: At_50mM_NH4NO3_L-to-H_P Parameter: Tissue Value: Leaf
  misc_feature: MA Experiment 20001755 PARAMETER Experiment Name: At_50mM_NH4NO3_L-to-H_P Parameter: Treatment Value: 50mM NH4NO3 vs 100mM Mannitol
  misc_feature: MA Experiment ID: 20001756 Result: Up-regulated in Transcription
  misc_feature: MA Experiment 20001756 PARAMETER Experiment Name: At_50mM_NH4NO3_L-to-H_P Parameter: Timepoint (hr) Value: 4
  misc_feature: MA Experiment 20001756 PARAMETER Experiment Name: At_50mM_NH4NO3_L-to-H_P Parameter: Tissue Value: Leaf
  misc_feature: MA Experiment 20001756 PARAMETER Experiment Name: At_50mM_NH4NO3_L-to-H_P Parameter: Treatment Value: 50mM NH4NO3 vs 100mM Mannitol
  misc_feature: MA Experiment ID: 20001757 Result: Down-regulated in Transcription
  misc_feature: MA Experiment 20001757 PARAMETER Experiment Name: At_50mM_NH4NO3_L-to-H_P Parameter: Timepoint (hr) Value: 6
  misc_feature: MA Experiment 20001757 PARAMETER Experiment Name: At_50mM_NH4NO3_L-to-H_P Parameter: Tissue Value: Leaf
  misc_feature: MA Experiment 20001757 PARAMETER Experiment Name: At_50mM_NH4NO3_L-to-H_P Parameter: Treatment Value: 50mM NH4NO3 vs 100mM Mannitol
  misc_feature: MA Experiment ID: 20001760 Result: Up-regulated in Transcription
  misc_feature: MA Experiment 20001760 PARAMETER Experiment Name: At_50mM_NH4NO3_L-to-H_P Parameter: Timepoint (hr) Value: 2
  misc_feature: MA Experiment 20001760 PARAMETER Experiment Name: At_50mM_NH4NO3_L-to-H_P Parameter: Tissue Value: Siliques
  misc_feature: MA Experiment 20001760 PARAMETER Experiment Name: At_50mM_NH4NO3_L-to-H_P Parameter: Treatment Value: 50mM NH4NO3 vs 100mM Mannitol
  misc_feature: MA Experiment ID: 20001771 Result: Up-regulated in Transcription
  misc_feature: MA Experiment 20001771 PARAMETER Experiment Name: At_Far-red-enriched-adult_P Parameter: Age (day) Value: 28
  misc_feature: MA Experiment 20001771 PARAMETER Experiment Name: At_Far-red-enriched-adult_P Parameter: Light Value: Far-red enriched vs. White
  misc_feature: MA Experiment 20001771 PARAMETER Experiment Name: At_Far-red-enriched-adult_P Parameter: Organism Value: A. thaliana
  misc_feature: MA Experiment 20001771 PARAMETER Experiment Name: At_Far-red-enriched-adult_P Parameter: Plant Line Value: Columbia
  misc_feature: MA Experiment 20001771 PARAMETER Experiment Name: At_Far-red-enriched-adult_P Parameter: Timepoint (hr) Value: 16
  misc_feature: MA Experiment 20001771 PARAMETER Experiment Name: At_Far-red-enriched-adult_P Parameter: Tissue Value: Aerial
  misc_feature: MA Experiment ID: 20001904 Result: Up-regulated in Transcription
  misc_feature: MA Experiment 20001904 PARAMETER Experiment Name: At_Drought_Reproduction_P Parameter: Age (day) Value: 37
  misc_feature: MA Experiment 20001904 PARAMETER Experiment Name: At_Drought_Reproduction_P Parameter: Organism Value: A. thaliana
  misc_feature: MA Experiment 20001904 PARAMETER Experiment Name: At_Drought_Reproduction_P Parameter: Plant Line Value: WS
  misc_feature: MA Experiment 20001904 PARAMETER Experiment Name: At_Drought_Reproduction_P Parameter: Timepoint (day) Value: 7
  misc_feature: MA Experiment 20001904 PARAMETER Experiment Name: At_Drought_Reproduction_P Parameter: Tissue Value: Rosettes
  misc_feature: MA Experiment 20001904 PARAMETER Experiment Name: At_Drought_Reproduction_P Parameter: Treatment Value: Drought vs. No Drought
  misc_feature: MA Experiment ID: 20001906 Result: Up-regulated in Transcription
  misc_feature: MA Experiment 20001906 PARAMETER Experiment Name: At_Drought_Reproduction_P Parameter: Age (day) Value: 35
  misc_feature: MA Experiment 20001906 PARAMETER Experiment Name: At_Drought_Reproduction_P Parameter: Organism Value: A. thaliana
  misc_feature: MA Experiment 20001906 PARAMETER Experiment Name: At_Drought_Reproduction_P Parameter: Plant Line Value: WS
  misc_feature: MA Experiment 20001906 PARAMETER Experiment Name: At_Drought_Reproduction_P Parameter: Timepoint (day) Value: 5
  misc_feature: MA Experiment 20001906 PARAMETER Experiment Name: At_Drought_Reproduction_P Parameter: Tissue Value: Siliques
  misc_feature: MA Experiment 20001906 PARAMETER Experiment Name: At_Drought_Reproduction_P Parameter: Treatment Value: Drought vs. No Drought
  misc_feature: MA Experiment ID: 20001908 Result: Up-regulated in Transcription
  misc_feature: MA Experiment 20001908 PARAMETER Experiment Name: At_Drought_Reproduction_P Parameter: Age (day) Value: 40
  misc_feature: MA Experiment 20001908 PARAMETER Experiment Name: At_Drought_Reproduction_P Parameter: Organism Value: A. thaliana
  misc_feature: MA Experiment 20001908 PARAMETER Experiment Name: At_Drought_Reproduction_P Parameter: Plant Line Value: WS
  misc_feature: MA Experiment 20001908 PARAMETER Experiment Name: At_Drought_Reproduction_P Parameter: Timepoint (day) Value: 10
  misc_feature: MA Experiment 20001908 PARAMETER Experiment Name: At_Drought_Reproduction_P Parameter: Tissue Value: Siliques
  misc_feature: MA Experiment 20001908 PARAMETER Experiment Name: At_Drought_Reproduction_P Parameter: Treatment Value: Drought vs. No Drought

SEQ ID NO: 38386 - protein, 193 aa, Arabidopsis thaliana; identical to SEQ ID NO: 38289
  peptide (1)..(193): Ceres Seq. ID no. 13497709
  misc_feature (1)..(193): Homolog of NCBI NO: 38123375 NR Description: ELIP [Brassica rapa subsp. pekinensis]
  misc_feature (1)..(193): Homolog of NCBI NO: 15228866 NR Description: early light-induced protein [Arabidopsis
  misc_feature (8)..(193): Homolog of NCBI NO: 25315849 NR Description: early light-inducable protein [imported] -
  misc_feature (1)..(192): Homolog of NCBI NO: 7488128 NR Description: probable light induced protein - Arabidopsis
  misc_feature (1)..(193): Homolog of NCBI NO: 18414282 NR Description: expressed protein [Arabidopsis thaliana]
  misc_feature (1)..(193): Homolog of NCBI NO: 21618071 NR Description: light-induced protein-like protein [Arabidopsis
  misc_feature (1)..(193): Homolog of NCBI NO: 38123375 NR Description: ELIP [Brassica rapa subsp. pekinensis]
  misc_feature (1)..(193): Homolog of NCBI NO: 15228866 NR Description: early light-induced protein [Arabidopsis
  misc_feature (8)..(193): Homolog of NCBI NO: 25315849 NR Description: early light-inducable protein [imported] -
  misc_feature (1)..(192): Homolog of NCBI NO: 7488128 NR Description: probable light induced protein - Arabidopsis
  misc_feature (1)..(193): Homolog of NCBI NO: 18414282 NR Description: expressed protein [Arabidopsis thaliana]
  misc_feature (1)..(193): Homolog of NCBI NO: 21618071 NR Description: light-induced protein-like protein [Arabidopsis

SEQ ID NO: 38387 - protein, 186 aa, Arabidopsis thaliana; identical to SEQ ID NO: 38290
  peptide (1)..(186): Ceres Seq. ID no. 13497710
  misc_feature (1)..(186): Homolog of NCBI NO: 38123375 NR Description: ELIP [Brassica rapa subsp. pekinensis]
  misc_feature (1)..(186): Homolog of NCBI NO: 15228866 NR Description: early light-induced protein [Arabidopsis
  misc_feature (1)..(186): Homolog of NCBI NO: 25315849 NR Description: early light-inducable protein [imported] -
  misc_feature (1)..(185): Homolog of NCBI NO: 7488128 NR Description: probable light induced protein - Arabidopsis
  misc_feature (1)..(186): Homolog of NCBI NO: 18414282 NR Description: expressed protein [Arabidopsis thaliana]
  misc_feature (1)..(186): Homolog of NCBI NO: 21618071 NR Description: light-induced protein-like protein [Arabidopsis
  misc_feature (1)..(186): Homolog of NCBI NO: 38123375 NR Description: ELIP [Brassica rapa subsp. pekinensis]
  misc_feature (1)..(186): Homolog of NCBI NO: 15228866 NR Description: early light-induced protein [Arabidopsis
  misc_feature (1)..(186): Homolog of NCBI NO: 25315849 NR Description: early light-inducable protein [imported] -
  misc_feature (1)..(185): Homolog of NCBI NO: 7488128 NR Description: probable light induced protein - Arabidopsis
  misc_feature (1)..(186): Homolog of NCBI NO: 18414282 NR Description: expressed protein [Arabidopsis thaliana]
  misc_feature (1)..(186): Homolog of NCBI NO: 21618071 NR Description: light-induced protein-like protein [Arabidopsis

SEQ ID NO: 38388 - protein, 151 aa, Arabidopsis thaliana; identical to SEQ ID NO: 38291
  peptide (1)..(151): Ceres Seq. ID no. 13497711
  misc_feature (1)..(151): Homolog of NCBI NO: 38123375 NR Description: ELIP [Brassica rapa subsp. pekinensis]
  misc_feature (1)..(151): Homolog of NCBI NO: 15228866 NR Description: early light-induced protein [Arabidopsis
  misc_feature (1)..(151): Homolog of NCBI NO: 25315849 NR Description: early light-inducable protein [imported] -
  misc_feature (1)..(150): Homolog of NCBI NO: 7488128 NR Description: probable light induced protein - Arabidopsis
  misc_feature (1)..(151): Homolog of NCBI NO: 18414282 NR Description: expressed protein [Arabidopsis thaliana]
  misc_feature (1)..(151): Homolog of NCBI NO: 21618071 NR Description: light-induced protein-like protein [Arabidopsis
  misc_feature (1)..(151): Homolog of NCBI NO: 38123375 NR Description: ELIP [Brassica rapa subsp. pekinensis]
  misc_feature (1)..(151): Homolog of NCBI NO: 15228866 NR Description: early light-induced protein [Arabidopsis
  misc_feature (1)..(151): Homolog of NCBI NO: 25315849 NR Description: early light-inducable protein [imported] -
  misc_feature (1)..(150): Homolog of NCBI NO: 7488128 NR Description: probable light induced protein - Arabidopsis
  misc_feature (1)..(151): Homolog of NCBI NO: 18414282 NR Description: expressed protein [Arabidopsis thaliana]
  misc_feature (1)..(151): Homolog of NCBI NO: 21618071 NR Description: light-induced protein-like protein [Arabidopsis

SEQ ID NO: 38389 - DNA, 697 bp, Arabidopsis thaliana
  misc_feature (1)..(697): Ceres Seq. ID no. 12421143
  misc_feature: MA Experiment ID: 108576 Result: Up-regulated in Transcription
  misc_feature: MA Experiment 108576 PARAMETER Experiment Name: At_42deg_Heat_cDNA_P Parameter: Temperature (deg C) Value: 42 vs. 22
  misc_feature: MA Experiment 108576 PARAMETER Experiment Name: At_42deg_Heat_cDNA_P Parameter: Timepoint (hr) Value: 1
  misc_feature: MA Experiment 108576 PARAMETER Experiment Name: At_42deg_Heat_cDNA_P Parameter: Tissue Value: Aerial
  misc_feature: MA Experiment ID: 108577 Result: Up-regulated in Transcription
  misc_feature: MA Experiment 108577 PARAMETER Experiment Name: At_42deg_Heat_cDNA_P Parameter: Temperature (deg C) Value: 42 vs. 22
  misc_feature: MA Experiment 108577 PARAMETER Experiment Name: At_42deg_Heat_cDNA_P Parameter: Timepoint (hr) Value: 6
  misc_feature: MA Experiment 108577 PARAMETER Experiment Name: At_42deg_Heat_cDNA_P Parameter: Tissue Value: Aerial
  misc_feature: MA Experiment ID: 108595 Result: Up-regulated in Transcription
  misc_feature: MA Experiment 108595 PARAMETER Experiment Name: At_Ler-pi_Ovule_cDNA_P Parameter: Plant Line Value: null
  misc_feature: MA Experiment ID: 108668 Result: Up-regulated in Transcription
  misc_feature: MA Experiment 108668 PARAMETER Experiment Name: At_2mM_SA_cDNA_P Parameter: Plant Line Value: WS
  misc_feature: MA Experiment 108668 PARAMETER Experiment Name: At_2mM_SA_cDNA_P Parameter: Timepoint (hr) Value: 6
  misc_feature: MA Experiment 108668 PARAMETER Experiment Name: At_2mM_SA_cDNA_P Parameter: Treatment Value: 2mM SA vs. No Treatment
  misc_feature: MA Experiment ID: 20000089 Result: Up-regulated in Transcription
  misc_feature: MA Experiment ID: 20000093 Result: Up-regulated in Transcription
  misc_feature: MA Experiment 20000093 PARAMETER Experiment Name: At_42deg_Heat_cDNA_P Parameter: Temperature (deg C) Value: 42 vs. 22
  misc_feature: MA Experiment 20000093 PARAMETER Experiment Name: At_42deg_Heat_cDNA_P Parameter: Timepoint (hr) Value: 0.5
  misc_feature: MA Experiment 20000093 PARAMETER Experiment Name: At_42deg_Heat_cDNA_P Parameter: Tissue Value: Aerial
  misc_feature: MA Experiment ID: 20000112 Result: Up-regulated in Transcription
  misc_feature: MA Experiment 20000112 PARAMETER Experiment Name: At_42deg_Heat_cDNA_P Parameter: Temperature (deg C) Value: 42 vs. 22
  misc_feature: MA Experiment 20000112 PARAMETER Experiment Name: At_42deg_Heat_cDNA_P Parameter: Timepoint (hr) Value: 2
  misc_feature: MA Experiment 20000112 PARAMETER Experiment Name: At_42deg_Heat_cDNA_P Parameter: Tissue Value: Aerial
  misc_feature: MA Experiment ID: 20000113 Result: Up-regulated in Transcription
  misc_feature: MA Experiment 20000113 PARAMETER Experiment Name: At_42deg_Heat_cDNA_P Parameter: Temperature (deg C) Value: 42 vs. 22
  misc_feature: MA Experiment 20000113 PARAMETER Experiment Name: At_42deg_Heat_cDNA_P Parameter: Timepoint (hr) Value: 8
  misc_feature: MA Experiment 20000113 PARAMETER Experiment Name: At_42deg_Heat_cDNA_P Parameter: Tissue Value: Aerial
  misc_feature: MA Experiment ID: 20000144 Result: Up-regulated in Transcription
  misc_feature: MA Experiment 20000144 PARAMETER Experiment Name: At_42deg_Heat_cDNA_P Parameter: Temperature (deg C) Value: 42 vs. 22
  misc_feature: MA Experiment 20000144 PARAMETER Experiment Name: At_42deg_Heat_cDNA_P Parameter: Timepoint (hr) Value: 1
  misc_feature: MA Experiment 20000144 PARAMETER Experiment Name: At_42deg_Heat_cDNA_P Parameter: Tissue Value: Aerial
  misc_feature: MA Experiment ID: 20000171 Result: Up-regulated in Transcription
  misc_feature: MA Experiment 20000171 PARAMETER Experiment Name: At_42deg_Heat_P Parameter: Age (day) Value: 14
  misc_feature: MA Experiment 20000171 PARAMETER Experiment Name: At_42deg_Heat_P Parameter: Organism Value: A. thaliana
  misc_feature: MA Experiment 20000171 PARAMETER Experiment Name: At_42deg_Heat_P Parameter: Plant Line Value: WS
  misc_feature: MA Experiment 20000171 PARAMETER Experiment Name: At_42deg_Heat_P Parameter: Temperature (deg C) Value: 42 vs. 22
  misc_feature: MA Experiment 20000171 PARAMETER Experiment Name: At_42deg_Heat_P Parameter: Timepoint (hr) Value: 1
  misc_feature: MA Experiment 20000171 PARAMETER Experiment Name: At_42deg_Heat_P Parameter: Tissue Value: Aerial
  misc_feature: MA Experiment ID: 20000173 Result: Up-regulated in Transcription
  misc_feature: MA Experiment 20000173 PARAMETER Experiment Name: At_42deg_Heat_P Parameter: Age (day) Value: 14
  misc_feature: MA Experiment 20000173 PARAMETER Experiment Name: At_42deg_Heat_P Parameter: Organism Value: A. thaliana
  misc_feature: MA Experiment 20000173 PARAMETER Experiment Name: At_42deg_Heat_P Parameter: Plant Line Value: WS
  misc_feature: MA Experiment 20000173 PARAMETER Experiment Name: At_42deg_Heat_P Parameter: Temperature (deg C) Value: 42 vs. 22
  misc_feature: MA Experiment 20000173 PARAMETER Experiment Name: At_42deg_Heat_P Parameter: Timepoint (hr) Value: 6
  misc_feature: MA Experiment 20000173 PARAMETER Experiment Name: At_42deg_Heat_P Parameter: Tissue Value: Aerial
  misc_feature: MA Experiment ID: 20000182 Result: Up-regulated in Transcription
  misc_feature: MA Experiment 20000182 PARAMETER Experiment Name: At_2mM_SA_P Parameter: Age (day) Value: 14
  misc_feature: MA Experiment 20000182 PARAMETER Experiment Name: At_2mM_SA_P Parameter: Organism Value: A. thaliana
  misc_feature: MA Experiment 20000182 PARAMETER Experiment Name: At_2mM_SA_P Parameter: Plant Line Value: WS
  misc_feature: MA Experiment 20000182 PARAMETER Experiment Name: At_2mM_SA_P Parameter: Timepoint (hr) Value: 6
  misc_feature: MA Experiment 20000182 PARAMETER Experiment Name: At_2mM_SA_P Parameter: Tissue Value: Aerial
  misc_feature: MA Experiment 20000182 PARAMETER Experiment Name: At_2mM_SA_P Parameter: Treatment Value: 2mM SA vs. No Treatment
  misc_feature: MA Experiment ID: 20000227 Result: Down-regulated in Transcription
  misc_feature: MA Experiment 20000227 PARAMETER Experiment Name: At_Root-Tips-vs-Tops_P Parameter: Tissue Value: Root Tips vs. Root Tops
  misc_feature: MA Experiment ID: 20000436 Result: Up-regulated in Transcription
  misc_feature: MA Experiment 20000436 PARAMETER Experiment Name: At_Drought_P Parameter: Age (day) Value: 7
  misc_feature: MA Experiment 20000436 PARAMETER Experiment Name: At_Drought_P Parameter: Organism Value: A. thaliana
  misc_feature: MA Experiment 20000436 PARAMETER Experiment Name: At_Drought_P Parameter: Plant Line Value: WS
  misc_feature: MA Experiment 20000436 PARAMETER Experiment Name: At_Drought_P Parameter: Timepoint (hr) Value: 12
  misc_feature: MA Experiment 20000436 PARAMETER Experiment Name: At_Drought_P Parameter: Tissue Value: Whole Plant
  misc_feature: MA Experiment 20000436 PARAMETER Experiment Name: At_Drought_P Parameter: Treatment Value: Drought vs. No Drought
  misc_feature: MA Experiment ID: 20000437 Result: Up-regulated in Transcription
  misc_feature: MA Experiment 20000437 PARAMETER Experiment Name: At_Drought_P Parameter: Age (day) Value: 8
  misc_feature: MA Experiment 20000437 PARAMETER Experiment Name: At_Drought_P Parameter: Organism Value: A. thaliana
  misc_feature: MA Experiment 20000437 PARAMETER Experiment Name: At_Drought_P Parameter: Plant Line Value: WS
  misc_feature: MA Experiment 20000437 PARAMETER Experiment Name: At_Drought_P Parameter: Timepoint (hr) Value: 24
  misc_feature: MA Experiment 20000437 PARAMETER Experiment Name: At_Drought_P Parameter: Tissue Value: Whole Plant
  misc_feature: MA Experiment 20000437 PARAMETER Experiment Name: At_Drought_P Parameter: Treatment Value: Drought vs. No Drought
  misc_feature: MA Experiment ID: 20000456 Result: Up-regulated in Transcription
  misc_feature: MA Experiment 20000456 PARAMETER Experiment Name: At_100uM_BA_P Parameter: Age (day) Value: 14
  misc_feature: MA Experiment 20000456 PARAMETER Experiment Name: At_100uM_BA_P Parameter: Organism Value: A. thaliana
  misc_feature: MA Experiment 20000456 PARAMETER Experiment Name: At_100uM_BA_P Parameter: Plant Line Value: WS
  misc_feature: MA Experiment 20000456 PARAMETER Experiment Name: At_100uM_BA_P Parameter: Timepoint (hr) Value: 6
  misc_feature: MA Experiment 20000456 PARAMETER Experiment Name: At_100uM_BA_P Parameter: Tissue Value: Aerial
  misc_feature: MA Experiment 20000456 PARAMETER Experiment Name: At_100uM_BA_P Parameter: Treatment Value: 100uM BA vs. No Treatment
  misc_feature: MA Experiment ID: 20000794 Result: Down-regulated in Transcription
  misc_feature: MA Experiment 20000794 PARAMETER Experiment Name: At_Petals_P Parameter: Age (day) Value: 23-25 days
  misc_feature: MA Experiment 20000794 PARAMETER Experiment Name: At_Petals_P Parameter: Plant Line Value: WS
  misc_feature: MA Experiment 20000794 PARAMETER Experiment Name: At_Petals_P Parameter: Tissue Value: Petals vs. Whole plant
  misc_feature: MA Experiment ID: 20001248 Result: Down-regulated in Transcription
  misc_feature: MA Experiment 20001248 PARAMETER Experiment Name: At_Far-red-induction_P Parameter: Age (day) Value: 7
  misc_feature: MA Experiment 20001248 PARAMETER Experiment Name: At_Far-red-induction_P Parameter: Light Value: Far-red vs. White
  misc_feature: MA Experiment 20001248 PARAMETER Experiment Name: At_Far-red-induction_P Parameter: Organism Value: A. thaliana
  misc_feature: MA Experiment 20001248 PARAMETER Experiment Name: At_Far-red-induction_P Parameter: Plant Line Value: Columbia
  misc_feature: MA Experiment 20001248 PARAMETER Experiment Name: At_Far-red-induction_P Parameter: Timepoint (hr) Value: 4
  misc_feature: MA Experiment 20001248 PARAMETER Experiment Name: At_Far-red-induction_P Parameter: Tissue Value: Whole Plant
  misc_feature: MA Experiment ID: 20001555 Result: Up-regulated in Transcription
  misc_feature: MA Experiment 20001555 PARAMETER Experiment Name: At_Drought_Soil_Dry_P Parameter: Age (day) Value: 24
  misc_feature: MA Experiment 20001555 PARAMETER Experiment Name: At_Drought_Soil_Dry_P Parameter: Organism Value: A. thaliana
  misc_feature: MA Experiment 20001555 PARAMETER Experiment Name: At_Drought_Soil_Dry_P Parameter: Plant Line Value: WS
  misc_feature: MA Experiment 20001555 PARAMETER Experiment Name: At_Drought_Soil_Dry_P Parameter: Post Timepoint (hr) Value: None
  misc_feature: MA Experiment 20001555 PARAMETER Experiment Name: At_Drought_Soil_Dry_P Parameter: Post-Treatment Value: None
  misc_feature: MA Experiment 20001555 PARAMETER Experiment Name: At_Drought_Soil_Dry_P Parameter: Timepoint (day) Value: 10
  misc_feature: MA Experiment 20001555 PARAMETER Experiment Name: At_Drought_Soil_Dry_P Parameter: Treatment Value: Drought vs. No Drought
  misc_feature: MA Experiment ID: 20001556 Result: Up-regulated in Transcription
  misc_feature: MA Experiment 20001556 PARAMETER Experiment Name: At_Drought_Soil_Dry_P Parameter: Age (day) Value: 26
  misc_feature: MA Experiment 20001556 PARAMETER Experiment Name: At_Drought_Soil_Dry_P Parameter: Organism Value: A. thaliana
  misc_feature: MA Experiment 20001556 PARAMETER Experiment Name: At_Drought_Soil_Dry_P Parameter: Plant Line Value: WS
  misc_feature: MA Experiment 20001556 PARAMETER Experiment Name: At_Drought_Soil_Dry_P Parameter: Post Timepoint (hr) Value: None
  misc_feature: MA Experiment 20001556 PARAMETER Experiment Name: At_Drought_Soil_Dry_P Parameter: Post-Treatment Value: None
  misc_feature: MA Experiment 20001556 PARAMETER Experiment Name: At_Drought_Soil_Dry_P Parameter: Timepoint (day) Value: 12
  misc_feature: MA Experiment 20001556 PARAMETER Experiment Name: At_Drought_Soil_Dry_P Parameter: Treatment Value: Drought vs. No Drought
  misc_feature: MA Experiment ID: 20001904 Result: Up-regulated in Transcription
  misc_feature: MA Experiment 20001904 PARAMETER Experiment Name: At_Drought_Reproduction_P Parameter: Age (day) Value: 37
  misc_feature: MA Experiment 20001904 PARAMETER Experiment Name: At_Drought_Reproduction_P Parameter: Organism Value: A. thaliana
  misc_feature: MA Experiment 20001904 PARAMETER Experiment Name: At_Drought_Reproduction_P Parameter: Plant Line Value: WS
  misc_feature: MA Experiment 20001904 PARAMETER Experiment Name: At_Drought_Reproduction_P Parameter: Timepoint (day) Value: 7
  misc_feature: MA Experiment 20001904 PARAMETER Experiment Name: At_Drought_Reproduction_P Parameter: Tissue Value: Rosettes
  misc_feature: MA Experiment 20001904 PARAMETER Experiment Name: At_Drought_Reproduction_P Parameter: Treatment Value: Drought vs. No Drought
agatcaaatcagcaggaaaatcaagaaccaaaagtctcccgaaaagcaacgaacaatgtctctcattccaagcatttttggaggacgcagatcaaacgtctttgatccgttctcgcaagacttatgggatccattcgaaggattcttcacgccatcttctgcgttggcaaacgcttcaaccgctcgtgatgtggcagcgtttacaaacgcaagagtggattggaaggaaacgccggaggcacatgtgttcaaagcggacttgccaggcctgaagaaggaagaagtcaaggttgaggttgaagacaagaacgttctgcagattagcggagagaggagcaaggagaacgaagagaagaacgataagtggcaccgtgtggagagagctagtgggaagtttatgagaaggtttaggttaccggagaatgcaaagatggaagaagtgaaggcaacaatggagaatggtgtgcttacggttgtggttccgaaagcgcctgagaagaagcctcaagtcaagtccatcgatatctccggggctaattgaatatgaagatgaagatgaaatatttggtgtgtcaaataaaaagcttgtgtgcttaagtttgtgtttttttcttggcttgttgtgttatgaatttgtggctttttctaatattaaatgaatgtaagatctcattataatgaataaacaaatgtttcc

SEQ ID NO: 38390 - protein, 179 aa, Arabidopsis thaliana
  peptide (1)..(179): Ceres Seq. ID no. 12421144
  misc_feature (19)..(177): Homolog of NCBI NO: 11276924 NR Description: heat-shock protein, low molecular weight
  misc_feature (19)..(177): Homolog of NCBI NO: 15294150 NR Description: AT3g46230/F12M12_200 [Arabidopsis thaliana]
  misc_feature (19)..(177): Homolog of NCBI NO: 8250119 NR Description: HSP17.7-a protein [Brassica oleracea]
  misc_feature (19)..(177): Homolog of NCBI NO: 15231372 NR Description: heat shock protein 17
  misc_feature (19)..(177): Homolog of NCBI NO: 81639 NR Description: heat shock protein 17 - Arabidopsis thaliana
  misc_feature (19)..(177): Homolog of NCBI NO: 7441319 NR Description: heat-shock protein 17.6, low molecular weight -
  misc_feature (19)..(177): Homolog of NCBI NO: 15220832 NR Description: 17.6 kDa heat shock protein (AA 1-156); protein
  misc_feature (18)..(177): Homolog of NCBI NO: 8671873 NR Description: Contains similarity to 17.6 KD class I heat shock from Arabidopsis thaliana gi|P13853 and contains Hsp20/alpha PF|00011 and signal peptidase I PF|00461 domains. ESTs
  misc_feature (19)..(179): Homolog of NCBI NO: 21618106 NR Description: heat shock protein 18 [Arabidopsis thaliana]
  misc_feature (19)..(179): Homolog of NCBI NO: 15238509 NR Description: heat shock protein 18
DQISRKIKNQKSPEKQRTMSLIPSIFGGRRSNVFDPFSQDLWDPFEGFFTPSSALANASTARDVAAFTNARVDWKETPEAHVFKADLPGLKKEEVKVEVEDKNVLQISGERSKENEEKNDKWHRVERASGKFMRRFRLPENAKMEEVKATMENGVLTVVVPKAPEKKPQVKSIDISGAN

SEQ ID NO: 38391 - protein, 161 aa, Arabidopsis thaliana
  peptide (1)..(161): Ceres Seq. ID no. 12421145
  misc_feature (1)..(159): Homolog of NCBI NO: 11276924 NR Description: heat-shock protein, low molecular weight
  misc_feature (1)..(159): Homolog of NCBI NO: 15294150 NR Description: AT3g46230/F12M12_200 [Arabidopsis thaliana]
  misc_feature (1)..(159): Homolog of NCBI NO: 8250119 NR Description: HSP17.7-a protein [Brassica oleracea]
  misc_feature (1)..(159): Homolog of NCBI NO: 15231372 NR Description: heat shock protein 17
  misc_feature (1)..(159): Homolog of NCBI NO: 81639 NR Description: heat shock protein 17 - Arabidopsis thaliana
  misc_feature (1)..(159): Homolog of NCBI NO: 7441319 NR Description: heat-shock protein 17.6, low molecular weight -
  misc_feature (1)..(159): Homolog of NCBI NO: 15220832 NR Description: 17.6 kDa heat shock protein (AA 1-156); protein
  misc_feature (1)..(159): Homolog of NCBI NO: 8671873 NR Description: Contains similarity to 17.6 KD class I heat shock from Arabidopsis thaliana gi|P13853 and contains Hsp20/alpha PF|00011 and signal peptidase I PF|00461 domains. ESTs
  misc_feature (1)..(161): Homolog of NCBI NO: 21618106 NR Description: heat shock protein 18 [Arabidopsis thaliana]
  misc_feature (1)..(161): Homolog of NCBI NO: 15238509 NR Description: heat shock protein 18
MSLIPSIFGGRRSNVFDPFSQDLWDPFEGFFTPSSALANASTARDVAAFTNARVDWKETPEAHVFKADLPGLKKEEVKVEVEDKNVLQISGERSKENEEKNDKWHRVERASGKFMRRFRLPENAKMEEVKATMENGVLTVVVPKAPEKKPQVKSIDISGAN

SEQ ID NO: 38392 - protein, 89 aa, Arabidopsis thaliana
  peptide (1)..(89): Ceres Seq. ID no. 12421146
IKSAGKSRTKSLPKSNEQCLSFQAFLEDADQTSLIRSRKTYGIHSKDSSRHLLRWQTLQPLVMWQRLQTQEWIGRKRRRHMCSKRTCQA

SEQ ID NO: 38393 - DNA, 678 bp, Arabidopsis thaliana
  misc_feature (1)..(678): Ceres Seq. ID no. 12326799
  misc_feature: MA Experiment ID: 108434 Result: Up-regulated in Transcription
  misc_feature: MA Experiment 108434 PARAMETER Experiment Name: At_Root_Tips_cDNA_P Parameter: Tissue Value: Root Tips
  misc_feature: MA Experiment ID: 20000184 Result: Down-regulated in Transcription
  misc_feature: MA Experiment 20000184 PARAMETER Experiment Name: At_Shoots__P Parameter: Age (day) Value: 7
  misc_feature: MA Experiment 20000184 PARAMETER Experiment Name: At_Shoots__P Parameter: Tissue Value: Shoots vs. Whole Plant
  misc_feature: MA Experiment ID: 20000224 Result: Up-regulated in Transcription
  misc_feature: MA Experiment ID: 20001451 Result: Up-regulated in Transcription
  misc_feature: MA Experiment 20001451 PARAMETER Experiment Name: At_Far-red-induction_P Parameter: Age (day) Value: 7
  misc_feature: MA Experiment 20001451 PARAMETER Experiment Name: At_Far-red-induction_P Parameter: Light Value: Far-red vs. White
  misc_feature: MA Experiment 20001451 PARAMETER Experiment Name: At_Far-red-induction_P Parameter: Organism Value: A. thaliana
  misc_feature: MA Experiment 20001451 PARAMETER Experiment Name: At_Far-red-induction_P Parameter: Plant Line Value: Columbia
  misc_feature: MA Experiment 20001451 PARAMETER Experiment Name: At_Far-red-induction_P Parameter: Timepoint (hr) Value: 24
  misc_feature: MA Experiment 20001451 PARAMETER Experiment Name: At_Far-red-induction_P Parameter: Tissue Value: Whole Plant
  misc_feature: MA Experiment ID: 20001560 Result: Up-regulated in Transcription
  misc_feature: MA Experiment 20001560 PARAMETER Experiment Name: At_Drought_Soil_Dry_P Parameter: Age (day) Value: 28
  misc_feature: MA Experiment 20001560 PARAMETER Experiment Name: At_Drought_Soil_Dry_P Parameter: Organism Value: A. thaliana
  misc_feature: MA Experiment 20001560 PARAMETER Experiment Name: At_Drought_Soil_Dry_P Parameter: Plant Line Value: WS
  misc_feature: MA Experiment 20001560 PARAMETER Experiment Name: At_Drought_Soil_Dry_P Parameter: Post Timepoint (hr) Value: None
  misc_feature: MA Experiment 20001560 PARAMETER Experiment Name: At_Drought_Soil_Dry_P Parameter: Post-Treatment Value: None
  misc_feature: MA Experiment 20001560 PARAMETER Experiment Name: At_Drought_Soil_Dry_P Parameter: Timepoint (day) Value: 14
  misc_feature: MA Experiment 20001560 PARAMETER Experiment Name: At_Drought_Soil_Dry_P Parameter: Treatment Value: Drought vs. No Drought
gacgcagatcatcatcagattcttgtctctctctgttatctgagtgataagaagtattttcagtgcttgaggatctgcaaaagatatccatctgcggtttaacaatggttctattacagttggatccattcctcaatgaactcacgagcatgtttgagaaaagcaaagagaagggttctgtgtgggttactttgaaaagatcatctctcaagtctaaggtgcagaagaggaaactgagctcagttggagaatccattgaatacagatgccttattcgagcaaccgatggaaagaaaactgtttctacttcggttggtgctaaggatcaccagagatttcaagcatcatatgccaccattcttaaggcccacatgactgctttgaagaagagggaaaggaaagaccggaagaaatcgacagaggcagagaagaaagaaagcacttcaaccactaaatctaagaaactttgatttctccttttgtgtttctcattgatttgcaattgctgcttaagagttgaattttgaaagctattgaaagatctaaaagattttgacttgtgttataatagagattttggtttgcatttgcttttccctcgagaatgttcatcgtgtataaataaaccaattccatacaaatgtacgaacataaatccaattcaaagaaactgattct

SEQ ID NO: 38394 - protein, 121 aa, Arabidopsis thaliana
  peptide (1)..(121): Ceres Seq. ID no. 12326800
  misc_feature (4)..(93): Pfam Name: Signal recognition particle 14kD protein Pfam Description: Signal recognition particle 14kD protein
  misc_feature (2)..(106): Homolog of NCBI NO: 11513833 NR Description: Chain B, Core Of The Alu Domain Of The Mammalian
  misc_feature (1)..(108): Homolog of NCBI NO: 2507409 NR Description: SIGNAL RECOGNITION PARTICLE 14 KD PROTEIN (SRP14)
  misc_feature (1)..(107): Homolog of NCBI NO: 31543653 NR Description: signal recognition particle 14kDa (homologous Alu
  misc_feature (1)..(107): Homolog of NCBI NO: 586035 NR Description: Signal recognition particle 14 kDa protein
  misc_feature (1)..(107): Homolog of NCBI NO: 1082198 NR Description: Alu RNA-binding protein - human
  misc_feature (1)..(108): Homolog of NCBI NO: 6678133 NR Description: signal recognition particle (homologous Alu RNA
  misc_feature (1)..(111): Homolog of NCBI NO: 5107800 NR Description: Signal Recognition Particle Alu Rna Binding
  misc_feature (1)..(120): Homolog of NCBI NO: 6094345 NR Description: SIGNAL RECOGNITION PARTICLE 14 KD PROTEIN (SRP14)
  misc_feature (1)..(121): Homolog of NCBI NO: 6175053 NR Description: Signal recognition particle 14 kDa protein
  misc_feature (1)..(121): Homolog of NCBI NO: 15224325 NR Description: putative signal recognition particle protein
MVLLQLDPFLNELTSMFEKSKEKGSVWVTLKRSSLKSKVQKRKLSSVGESIEYRCLIRATDGKKTVSTSVGAKDHQRFQASYATILKAHMTALKKRERKDRKKSTEAEKKESTSTTKSKKL

SEQ ID NO: 38395 - protein, 106 aa, Arabidopsis thaliana
  peptide (1)..(106): Ceres Seq. ID no. 12326801
  misc_feature (1)..(78): Pfam Name: Signal recognition particle 14kD protein Pfam Description: Signal recognition particle 14kD protein
  misc_feature (1)..(91): Homolog of NCBI NO: 11513833 NR Description: Chain B, Core Of The Alu Domain Of The Mammalian
  misc_feature (1)..(93): Homolog of NCBI NO: 2507409 NR Description: SIGNAL RECOGNITION PARTICLE 14 KD PROTEIN (SRP14)
  misc_feature (1)..(92): Homolog of NCBI NO: 31543653 NR Description: signal recognition particle 14kDa (homologous Alu
  misc_feature (1)..(92): Homolog of NCBI NO: 586035 NR Description: Signal recognition particle 14 kDa protein
  misc_feature (1)..(92): Homolog of NCBI NO: 1082198 NR Description: Alu RNA-binding protein - human
  misc_feature (1)..(93): Homolog of NCBI NO: 6678133 NR Description: signal recognition particle (homologous Alu RNA
  misc_feature (1)..(96): Homolog of NCBI NO: 5107800 NR Description: Signal Recognition Particle Alu Rna Binding
  misc_feature (1)..(105): Homolog of NCBI NO: 6094345 NR Description: SIGNAL RECOGNITION PARTICLE 14 KD PROTEIN (SRP14)
  misc_feature (1)..(106): Homolog of NCBI NO: 6175053 NR Description: Signal recognition particle 14 kDa protein
  misc_feature (1)..(106): Homolog of NCBI NO: 15224325 NR Description: putative signal recognition particle protein
MFEKSKEKGSVWVTLKRSSLKSKVQKRKLSSVGESIEYRCLIRATDGKKTVSTSVGAKDHQRFQASYATILKAHMTALKKRERKDRKKSTEAEKKESTSTTKSKKL

SEQ ID NO: 38396 - DNA, 805 bp, Arabidopsis thaliana
  misc_feature (1)..(805): Ceres Seq. ID no. 13592732
  misc_feature: MA Experiment ID: 20000173 Result: Up-regulated in Transcription
  misc_feature: MA Experiment 20000173 PARAMETER Experiment Name: At_42deg_Heat_P Parameter: Age (day) Value: 14
  misc_feature: MA Experiment 20000173 PARAMETER Experiment Name: At_42deg_Heat_P Parameter: Organism Value: A. thaliana
  misc_feature: MA Experiment 20000173 PARAMETER Experiment Name: At_42deg_Heat_P Parameter: Plant Line Value: WS
  misc_feature: MA Experiment 20000173 PARAMETER Experiment Name: At_42deg_Heat_P Parameter: Temperature (deg C) Value: 42 vs. 22
  misc_feature: MA Experiment 20000173 PARAMETER Experiment Name: At_42deg_Heat_P Parameter: Timepoint (hr) Value: 6
  misc_feature: MA Experiment 20000173 PARAMETER Experiment Name: At_42deg_Heat_P Parameter: Tissue Value: Aerial
  misc_feature: MA Experiment ID: 20001557 Result: Down-regulated in Transcription
  misc_feature: MA Experiment 20001557 PARAMETER Experiment Name: At_Drought_Soil_Dry_P Parameter: Age (day) Value: 27
  misc_feature: MA Experiment 20001557 PARAMETER Experiment Name: At_Drought_Soil_Dry_P Parameter: Organism Value: A. thaliana
  misc_feature: MA Experiment 20001557 PARAMETER Experiment Name: At_Drought_Soil_Dry_P Parameter: Plant Line Value: WS
  misc_feature: MA Experiment 20001557 PARAMETER Experiment Name: At_Drought_Soil_Dry_P Parameter: Post Timepoint (hr) Value: 3
  misc_feature: MA Experiment 20001557 PARAMETER Experiment Name: At_Drought_Soil_Dry_P Parameter: Post-Treatment Value: Re-Water vs. No Drought
  misc_feature: MA Experiment 20001557 PARAMETER Experiment Name: At_Drought_Soil_Dry_P Parameter: Timepoint (day) Value: 13
  misc_feature: MA Experiment 20001557 PARAMETER Experiment Name: At_Drought_Soil_Dry_P Parameter: Treatment Value: Drought vs. No Drought
acttaaacgtcgccgtttccgtgttcgaagcttcgtgaaaatcttcaatctcgcgagagagaagaagaagaagaagaagaagaagaagcgatgttcctggtggattggttctatggagttctggcaactctgggactatggcagaaagaagcgaagattctgtttctaggtctcgacaacgccggcaaaaccaccttgcttcacatgttaaaggacgagagactggtccagcatcagccgacacagcatccgacatcgaaagagcttagtatcggcaaaatcaagttcaaagccttcgatttgggaggtcatcagattgctcgtagagtctggaaggactattacgctaaggttgatgcagtggtatacctagttgatgcatatgacaaagagaggtttgcagaatcaaagaaagagcttgacgctcttctctctgatgaatccctagcaaatgtccctttcctcatccttggaaacaaaatcgacattccgtacgctgcatcagaagacgagctgcgttatcatctaggcctcaccagtttcaccactgggaaaggtaaagtgaatctagcaggaacaaatgttcgtcctcttgaggtgttcatgtgcagcattgtcagaaagatgggttacggcgaaggatttaaatgggtttctcaatatatcgactagatcaatcatatttaagtcttatctatctatactgtgtgattggtatctgtacgtgttataacctaatgtataattacgattaatgtgtgtatacaacaagatttgacggcttttaaattatcaattttgtgtt

SEQ ID NO: 38397 - protein, 193 aa, Arabidopsis thaliana
  peptide (1)..(193): Ceres Seq. ID no. 13592733
  misc_feature (5)..(192): Pfam Name: ADP-ribosylation factor family Pfam Description: ADP-ribosylation factor family
  misc_feature (1)..(192): Homolog of NCBI NO: 34902852 NR Description: unnamed protein product [Oryza sativa (japonica
  misc_feature (1)..(193): Homolog of NCBI NO: 3334322 NR Description: GTP-binding protein SAR1B
  misc_feature (1)..(192): Homolog of NCBI NO: 1549222 NR Description: NtSar1 protein [Nicotiana tabacum]
  misc_feature (1)..(192): Homolog of NCBI NO: 34894960 NR Description: putative GTP-binding protein
  misc_feature (1)..(193): Homolog of NCBI NO: 15223516 NR Description: GTP-binding protein SAR1B [Arabidopsis thaliana]
  misc_feature (1)..(192): Homolog of NCBI NO: 25294173 NR Description: small GTP-binding protein Sar1BNt [imported] -
  misc_feature (1)..(193): Homolog of NCBI NO: 25294172 NR Description: ras-like small monomeric GTP-binding protein
  misc_feature (1)..(192): Homolog of NCBI NO: 3334321 NR Description: GTP-binding protein SAR1A
  misc_feature (1)..(192): Homolog of NCBI NO: 15235226 NR Description: GTP-binding protein SAR1A [Arabidopsis thaliana]
  misc_feature (1)..(193): Homolog of NCBI NO: 15228793 NR Description: GTP-binding protein SAR1A, putative [Arabidopsis
MFLVDWFYGVLATLGLWQKEAKILFLGLDNAGKTTLLHMLKDERLVQHQPTQHPTSKELSIGKIKFKAFDLGGHQIARRVWKDYYAKVDAVVYLVDAYDKERFAESKKELDALLSDESLANVPFLILGNKIDIPYAASEDELRYHLGLTSFTTGKGKVNLAGTNVRPLEVFMCSIVRKMGYGEGFKWVSQYID

SEQ ID NO: 38398 - protein, 155 aa, Arabidopsis thaliana
  peptide (1)..(155): Ceres Seq. ID no. 13592734
  misc_feature (1)..(154): Pfam Name: ADP-ribosylation factor family Pfam Description: ADP-ribosylation factor family
  misc_feature (1)..(154): Homolog of NCBI NO: 34902852 NR Description: unnamed protein product [Oryza sativa (japonica
  misc_feature (1)..(155): Homolog of NCBI NO: 3334322 NR Description: GTP-binding protein SAR1B
  misc_feature (1)..(154): Homolog of NCBI NO: 1549222 NR Description: NtSar1 protein [Nicotiana tabacum]
  misc_feature (1)..(154): Homolog of NCBI NO: 34894960 NR Description: putative GTP-binding protein
  misc_feature (1)..(155): Homolog of NCBI NO: 15223516 NR Description: GTP-binding protein SAR1B [Arabidopsis thaliana]
  misc_feature (1)..(154): Homolog of NCBI NO: 25294173 NR Description: small GTP-binding protein Sar1BNt [imported] -
  misc_feature (1)..(155): Homolog of NCBI NO: 25294172 NR Description: ras-like small monomeric GTP-binding protein
  misc_feature (1)..(154): Homolog of NCBI NO: 3334321 NR Description: GTP-binding protein SAR1A
  misc_feature (1)..(154): Homolog of NCBI NO: 15235226 NR Description: GTP-binding protein SAR1A [Arabidopsis thaliana]
  misc_feature (1)..(155): Homolog of NCBI NO: 15228793 NR Description: GTP-binding protein SAR1A, putative [Arabidopsis
MLKDERLVQHQPTQHPTSKELSIGKIKFKAFDLGGHQIARRVWKDYYAKVDAVVYLVDAYDKERFAESKKELDALLSDESLANVPFLILGNKIDIPYAASEDELRYHLGLTSFTTGKGKVNLAGTNVRPLEVFMCSIVRKMGYGEGFKWVSQYID

SEQ ID NO: 38399 - DNA, 664 bp, Arabidopsis thaliana
  misc_feature (1)..(664): Ceres Seq. ID no. 12738931
  misc_feature: MA Experiment ID: 20001807 Result: Up-regulated in Transcription
  misc_feature: MA Experiment 20001807 PARAMETER Experiment Name: At_50mM_NH4NO3_L-to-H_Sub_P Parameter: Timepoint (hr) Value: 6
  misc_feature: MA Experiment 20001807 PARAMETER Experiment Name: At_50mM_NH4NO3_L-to-H_Sub_P Parameter: Tissue Value: Leaf
  misc_feature: MA Experiment 20001807 PARAMETER Experiment Name: At_50mM_NH4NO3_L-to-H_Sub_P Parameter: Treatment Value: 50mM NH4NO3 vs 100mM Mannitol
cccactctgtgcattaggtttcattttagcggcagacgagagagctaaagcaaggagcaaccctaaccatggcgactcaaccagctactgaatctgtgcaatgcttcggaaggaagaagaccgcagtggccgtcactcactgcaagcgtggatctggtttgatcaagctcaacggttgcccaatcgagcttttccagcctgagatcctccgattcaagatcttcgagccggttcttctcctcggaaagcaccgtttcgctggtgtgaacatgaggatccgtgtcaacggtggtggtcacacatcccaggtttacgccatccgtcagagtatcgcgaaggctcttgttgcgtactaccagaagtatgtggatgagcagtcgaagaaggagattaaggatatcttggtgaggtatgataggactctgcttgtggcggatccgaggaggtgtgagccgaagaagtttggtggtcgtggtgctcgttctcgttaccagaagagttaccgttaaacaaagctggtttgtgttttgtttttcaatttggaatcatcgtaaggtttttgtgggagtatggacttgtgagactctttagattttataatttctgctttattatgcttgttggattatggtgattctccaagaaacttatgttttgttatgtc

SEQ ID NO: 38400 - protein, 146 aa, Arabidopsis thaliana
  peptide (1)..(146): Ceres Seq. ID no. 12738932
  misc_feature (14)..(146): Pfam Name: Ribosomal protein S9/S16 Pfam Description: Ribosomal protein S9/S16
  misc_feature (1)..(146): Homolog of NCBI NO: 15294045 NR Description: 40S ribosomal protein S16 [Ictalurus punctatus]
  misc_feature (1)..(146): Homolog of NCBI NO: 4506691 NR Description: ribosomal protein S16; 40S ribosomal protein S16
  misc_feature (1)..(146): Homolog of NCBI NO: 39850096 NR Description: Unknown (protein for IMAGE:6887619) [Rattus
  misc_feature (6)..(146): Homolog of NCBI NO: 17369864 NR Description: 40S ribosomal protein S16
  misc_feature (4)..(146): Homolog of NCBI NO: 1173209 NR Description: 40S RIBOSOMAL PROTEIN S16
  misc_feature (1)..(146): Homolog of NCBI NO: 3122800 NR Description: 40S RIBOSOMAL PROTEIN S16
  misc_feature (1)..(146): Homolog of NCBI NO: 15229252 NR Description: putative 40S ribosomal protein S16; protein id:
  misc_feature (2)..(146): Homolog of NCBI NO: 6984222 NR Description: 40S ribosomal protein S16 [Euphorbia esula]
  misc_feature (1)..(146): Homolog of NCBI NO: 15226676 NR Description: 40S ribosomal protein S16
  misc_feature (1)..(146): Homolog of NCBI NO: 15238809 NR Description: 40S RIBOSOMAL PROTEIN S16
MATQPATESVQCFGRKKTAVAVTHCKRGSGLIKLNGCPIELFQPEILRFKIFEPVLLLGKHRFAGVNMRIRVNGGGHTSQVYAIRQSIAKALVAYYQKYVDEQSKKEIKDILVRYDRTLLVADPRRCEPKKFGGRGARSRYQKSYR

SEQ ID NO: 38401 - protein, 79 aa, Arabidopsis thaliana; identical to SEQ ID NO: 21210
  peptide (1)..(79): Ceres Seq. ID no. 12738933
  misc_feature (1)..(79): Pfam Name: Ribosomal protein S9/S16 Pfam Description: Ribosomal protein S9/S16
  misc_feature (1)..(79): Homolog of NCBI NO: 15294045 NR Description: 40S ribosomal protein S16 [Ictalurus punctatus]
  misc_feature (1)..(79): Homolog of NCBI NO: 4506691 NR Description: ribosomal protein S16; 40S ribosomal protein S16
  misc_feature (1)..(79): Homolog of NCBI NO: 39850096 NR Description: Unknown (protein for IMAGE:6887619) [Rattus
  misc_feature (1)..(79): Homolog of NCBI NO: 17369864 NR Description: 40S ribosomal protein S16
  misc_feature (1)..(79): Homolog of NCBI NO: 1173209 NR Description: 40S RIBOSOMAL PROTEIN S16
  misc_feature (1)..(79): Homolog of NCBI NO: 3122800 NR Description: 40S RIBOSOMAL PROTEIN S16
  misc_feature (1)..(79): Homolog of NCBI NO: 15229252 NR Description: putative 40S ribosomal protein S16; protein id:
  misc_feature (1)..(79): Homolog of NCBI NO: 6984222 NR Description: 40S ribosomal protein S16 [Euphorbia esula]
  misc_feature (1)..(79): Homolog of NCBI NO: 15226676 NR Description: 40S ribosomal protein S16
  misc_feature (1)..(79): Homolog of NCBI NO: 15238809 NR Description: 40S RIBOSOMAL PROTEIN S16

SEQ ID NO: 38402 - DNA, 903 bp, Arabidopsis thaliana
  misc_feature (1)..(903): Ceres Seq. ID no. 12337733
  misc_feature: MA Experiment ID: 108461 Result: Up-regulated in Transcription
  misc_feature: MA Experiment 108461 PARAMETER Experiment Name: At_Germinating_Seeds_cDNA_P Parameter: Age (day) Value: 1 vs. 0
  misc_feature: MA Experiment 108461 PARAMETER Experiment Name: At_Germinating_Seeds_cDNA_P Parameter: Tissue Value: Germinating Seeds
  misc_feature: MA Experiment ID: 108462 Result: Up-regulated in Transcription
  misc_feature: MA Experiment 108462 PARAMETER Experiment Name: At_Germinating_Seeds_cDNA_P Parameter: Age (day) Value: 2 vs. 0
  misc_feature: MA Experiment 108462 PARAMETER Experiment Name: At_Germinating_Seeds_cDNA_P Parameter: Tissue Value: Germinating Seeds
  misc_feature: MA Experiment ID: 108463 Result: Up-regulated in Transcription
  misc_feature: MA Experiment 108463 PARAMETER Experiment Name: At_Germinating_Seeds_cDNA_P Parameter: Age (day) Value: 3 vs. 0
  misc_feature: MA Experiment 108463 PARAMETER Experiment Name: At_Germinating_Seeds_cDNA_P Parameter: Tissue Value: Germinating Seeds
  misc_feature: MA Experiment ID: 108464 Result: Up-regulated in Transcription
  misc_feature: MA Experiment 108464 PARAMETER Experiment Name: At_Germinating_Seeds_cDNA_P Parameter: Age (day) Value: 4 vs. 0
  misc_feature: MA Experiment 108464 PARAMETER Experiment Name: At_Germinating_Seeds_cDNA_P Parameter: Tissue Value: Germinating Seeds
  misc_feature: MA Experiment ID: 108488 Result: Down-regulated in Transcription
  misc_feature: MA Experiment ID: 108573 Result: Up-regulated in Transcription
  misc_feature: MA Experiment 108573 PARAMETER Experiment Name: At_Drought_cDNA_P Parameter: Timepoint (hr) Value: 6
  misc_feature: MA Experiment 108573 PARAMETER Experiment Name: At_Drought_cDNA_P Parameter: Tissue Value: Aerial
  misc_feature: MA Experiment 108573 PARAMETER Experiment Name: At_Drought_cDNA_P Parameter: Treatment Value: Drought vs. No Drought
  misc_feature: MA Experiment ID: 108605 Result: Up-regulated in Transcription
  misc_feature: MA Experiment 108605 PARAMETER Experiment Name: At_100uM_ABA_cDNA_P Parameter: Timepoint (hr) Value: 6
  misc_feature: MA Experiment 108605 PARAMETER Experiment Name: At_100uM_ABA_cDNA_P Parameter: Tissue Value: Aerial
  misc_feature: MA Experiment 108605 PARAMETER Experiment Name: At_100uM_ABA_cDNA_P Parameter: Treatment Value: 100uM ABA vs. No Treatment
  misc_feature: MA Experiment ID: 108607 Result: Up-regulated in Transcription
  misc_feature: MA Experiment 108607 PARAMETER Experiment Name: At_100uM_ABA_cDNA_P Parameter: Timepoint (hr) Value: 4
  misc_feature: MA Experiment 108607 PARAMETER Experiment Name: At_100uM_ABA_cDNA_P Parameter: Tissue Value: Aerial
  misc_feature: MA Experiment 108607 PARAMETER Experiment Name: At_100uM_ABA_cDNA_P Parameter: Treatment Value: 100uM ABA vs. No Treatment
  misc_feature: MA Experiment ID: 20000071 Result: Up-regulated in Transcription
  misc_feature: MA Experiment 20000071 PARAMETER Experiment Name: At_100uM_ABA_Mutants_cDNA_P Parameter: Plant Line Value: CS8104
  misc_feature: MA Experiment 20000071 PARAMETER Experiment Name: At_100uM_ABA_Mutants_cDNA_P Parameter: Timepoint (hr) Value: 6
  misc_feature: MA Experiment 20000071 PARAMETER Experiment Name: At_100uM_ABA_Mutants_cDNA_P Parameter: Tissue Value: Aerial
  misc_feature: MA Experiment 20000071 PARAMETER Experiment Name: At_100uM_ABA_Mutants_cDNA_P Parameter: Treatment Value: 100uM ABA vs. No Treatment
  misc_feature: MA Experiment ID: 20000072 Result: Up-regulated in Transcription
  misc_feature: MA Experiment 20000072 PARAMETER Experiment Name: At_100uM_ABA_Mutants_cDNA_P Parameter: Plant Line Value: CS8105
  misc_feature: MA Experiment 20000072 PARAMETER Experiment Name: At_100uM_ABA_Mutants_cDNA_P Parameter: Timepoint (hr) Value: 6
  misc_feature: MA Experiment 20000072 PARAMETER Experiment Name: At_100uM_ABA_Mutants_cDNA_P Parameter: Tissue Value: Aerial
  misc_feature: MA Experiment 20000072 PARAMETER Experiment Name: At_100uM_ABA_Mutants_cDNA_P Parameter: Treatment Value: 100uM ABA vs. No Treatment
  misc_feature: MA Experiment ID: 20000117 Result: Up-regulated in Transcription
  misc_feature: MA Experiment 20000117 PARAMETER Experiment Name: At_100uM_ABA_Mutants_cDNA_P Parameter: Plant Line Value: Columbia
  misc_feature: MA Experiment 20000117 PARAMETER Experiment Name: At_100uM_ABA_Mutants_cDNA_P Parameter: Timepoint (hr) Value: 6
  misc_feature: MA Experiment 20000117 PARAMETER Experiment Name: At_100uM_ABA_Mutants_cDNA_P Parameter: Tissue Value: Aerial
  misc_feature: MA Experiment 20000117 PARAMETER Experiment Name: At_100uM_ABA_Mutants_cDNA_P Parameter: Treatment Value: 100uM ABA vs. No Treatment
  misc_feature: MA Experiment ID: 20000169 Result: Up-regulated in Transcription
  misc_feature: MA Experiment 20000169 PARAMETER Experiment Name: At_100uM_ABA_P Parameter: Age (day) Value: 14
  misc_feature: MA Experiment 20000169 PARAMETER Experiment Name: At_100uM_ABA_P Parameter: Organism Value: A. thaliana
  misc_feature: MA Experiment 20000169 PARAMETER Experiment Name: At_100uM_ABA_P Parameter: Plant Line Value: WS
  misc_feature: MA Experiment 20000169 PARAMETER Experiment Name: At_100uM_ABA_P Parameter: Timepoint (hr) Value: 6
  misc_feature: MA Experiment 20000169 PARAMETER Experiment Name: At_100uM_ABA_P Parameter: Tissue Value: Aerial
  misc_feature: MA Experiment 20000169 PARAMETER Experiment Name: At_100uM_ABA_P Parameter: Treatment Value: 100uM ABA vs. No Treatment
  misc_feature: MA Experiment ID: 20000180 Result: Up-regulated in Transcription
  misc_feature: MA Experiment 20000180 PARAMETER Experiment Name: At_Germinating_Seeds_P Parameter: Age (hr) Value: 24 vs. 0
  misc_feature: MA Experiment 20000180 PARAMETER Experiment Name: At_Germinating_Seeds_P Parameter: Tissue Value: Germinating Seeds
  misc_feature: MA Experiment ID: 20000224 Result: Down-regulated in Transcription
  misc_feature: MA Experiment ID: 20000227 Result: Down-regulated in Transcription
  misc_feature: MA Experiment 20000227 PARAMETER Experiment Name: At_Root-Tips-vs-Tops_P Parameter: Tissue Value: Root Tips vs. Root Tops
  misc_feature: MA Experiment ID: 20000234 Result: Down-regulated in Transcription
  misc_feature: MA Experiment 20000234 PARAMETER Experiment Name: At_Siliques_P Parameter: Age (day) Value: 21
  misc_feature: MA Experiment 20000234 PARAMETER Experiment Name: At_Siliques_P Parameter: Organism Value: A. thaliana
  misc_feature: MA Experiment 20000234 PARAMETER Experiment Name: At_Siliques_P Parameter: Plant Line Value: WS
  misc_feature: MA Experiment 20000234 PARAMETER Experiment Name: At_Siliques_P Parameter: Tissue Value: Less Than 5mm Siliques vs. Whole Plant
  misc_feature: MA Experiment ID: 20000265 Result: Down-regulated in Transcription
  misc_feature: MA Experiment 20000265 PARAMETER Experiment Name: At_Open_Flower_P Parameter: Age (day) Value: 21
  misc_feature: MA Experiment 20000265 PARAMETER Experiment Name: At_Open_Flower_P Parameter: Plant Line Value: WS
  misc_feature: MA Experiment 20000265 PARAMETER Experiment Name: At_Open_Flower_P Parameter: Tissue Value: Closed Flower vs. Whole Plant
  misc_feature: MA Experiment ID: 20000286 Result: Down-regulated in Transcription
  misc_feature: MA Experiment 20000286 PARAMETER Experiment Name: At_Open_Flower_P Parameter: Age (day) Value: 21
  misc_feature: MA Experiment 20000286 PARAMETER Experiment Name: At_Open_Flower_P Parameter: Plant Line Value: WS
  misc_feature: MA Experiment 20000286 PARAMETER Experiment Name: At_Open_Flower_P Parameter: Tissue Value: Half Open vs. Whole Plant
  misc_feature: MA Experiment ID: 20001450 Result: Up-regulated in Transcription
  misc_feature: MA Experiment 20001450 PARAMETER Experiment Name: At_Far-red-induction_P Parameter: Age (day) Value: 7
  misc_feature: MA Experiment 20001450 PARAMETER Experiment Name: At_Far-red-induction_P Parameter: Light Value: Far-red vs. White
  misc_feature: MA Experiment 20001450 PARAMETER Experiment Name: At_Far-red-induction_P Parameter: Organism Value: A. thaliana
  misc_feature: MA Experiment 20001450 PARAMETER Experiment Name: At_Far-red-induction_P Parameter: Plant Line Value: Columbia
  misc_feature: MA Experiment 20001450 PARAMETER Experiment Name: At_Far-red-induction_P Parameter: Timepoint (hr) Value: 8
  misc_feature: MA Experiment 20001450 PARAMETER Experiment Name: At_Far-red-induction_P Parameter: Tissue Value: Whole Plant
  misc_feature: MA Experiment ID: 20001451 Result: Up-regulated in Transcription
  misc_feature: MA Experiment 20001451 PARAMETER Experiment Name: At_Far-red-induction_P Parameter: Age (day) Value: 7
  misc_feature: MA Experiment 20001451 PARAMETER Experiment Name: At_Far-red-induction_P Parameter: Light Value: Far-red vs. White
  misc_feature: MA Experiment 20001451 PARAMETER Experiment Name: At_Far-red-induction_P Parameter: Organism Value: A. thaliana
  misc_feature: MA Experiment 20001451 PARAMETER Experiment Name: At_Far-red-induction_P Parameter: Plant Line Value: Columbia
  misc_feature: MA Experiment 20001451 PARAMETER Experiment Name: At_Far-red-induction_P Parameter: Timepoint (hr) Value: 24
  misc_feature: MA Experiment 20001451 PARAMETER Experiment Name: At_Far-red-induction_P Parameter: Tissue Value: Whole Plant
  misc_feature: MA Experiment ID: 20001557 Result: Down-regulated in Transcription
  misc_feature: MA Experiment 20001557 PARAMETER Experiment Name: At_Drought_Soil_Dry_P Parameter: Age (day) Value: 27
  misc_feature: MA Experiment 20001557 PARAMETER Experiment Name: At_Drought_Soil_Dry_P Parameter: Organism Value: A. thaliana
  misc_feature: MA Experiment 20001557 PARAMETER Experiment Name: At_Drought_Soil_Dry_P Parameter: Plant Line Value: WS
  misc_feature: MA Experiment 20001557 PARAMETER Experiment Name: At_Drought_Soil_Dry_P Parameter: Post Timepoint (hr) Value: 3
  misc_feature: MA Experiment 20001557 PARAMETER Experiment Name: At_Drought_Soil_Dry_P Parameter: Post-Treatment Value: Re-Water vs. No Drought
  misc_feature: MA Experiment 20001557 PARAMETER Experiment Name: At_Drought_Soil_Dry_P Parameter: Timepoint (day) Value: 13
  misc_feature: MA Experiment 20001557 PARAMETER Experiment Name: At_Drought_Soil_Dry_P Parameter: Treatment Value: Drought vs. No Drought
  misc_feature: MA Experiment ID: 20001558 Result: Down-regulated in Transcription
  misc_feature: MA Experiment 20001558 PARAMETER Experiment Name: At_Drought_Soil_Dry_P Parameter: Age (day) Value: 27
  misc_feature: MA Experiment 20001558 PARAMETER Experiment Name: At_Drought_Soil_Dry_P Parameter: Organism Value: A. thaliana
  misc_feature: MA Experiment 20001558 PARAMETER Experiment Name: At_Drought_Soil_Dry_P Parameter: Plant Line Value: WS
  misc_feature: MA Experiment 20001558 PARAMETER Experiment Name: At_Drought_Soil_Dry_P Parameter: Post Timepoint (hr) Value: 6
  misc_feature: MA Experiment 20001558 PARAMETER Experiment Name: At_Drought_Soil_Dry_P Parameter: Post-Treatment Value: Re-Water vs. No Drought
  misc_feature: MA Experiment 20001558 PARAMETER Experiment Name: At_Drought_Soil_Dry_P Parameter: Timepoint (day) Value: 13
  misc_feature: MA Experiment 20001558 PARAMETER Experiment Name: At_Drought_Soil_Dry_P Parameter: Treatment Value: Drought vs. No Drought
aaaaaaaaccaatcatttgctcgaaaaggaatcatgggtcttaaagctggaacctttgtgcttctcttgttgggtttgatcttggtctctgacgctagatctttcgttgactccaccatctcagagaaagtttccaacaaggaagacgtttgcactctgtgtgaggaatatgttactgatgctctcagctaccttgagaaaaatgtcacacaagcggagatcatcgaagatcttcatgatcggtgttcccaattgcgcggatattcgcagcagtgcataagtttggtggattactatgttcctcttttcttcttacaactagagtcgtttcaacctcattatttctgcaagaggatgaatctttgtggcaaagttgtagctcttgtcgaagaagctcgtcaggacagttgcggtgtatgccacaggactgtttcagagattctcatcaaactacaagatcctgacacacagctggatatcgttgaactgcttatcaagggatgcaaatcgctcaagaactacgagaagaagtgcaagacgttggtgtttgaatatggacctctgatactcgtaaatgcagaggaattcctagtgaaaaaagacgtctgcacactcttgcgcgcatgcccccctgagaaatcggttctaaggcagccggagttggctgattcttgaatgttcaaaacgttgctataacaggattttaattccttatgggttatacaagtaggaacacgagctgctccatgagaatggttgcagactttgtgtagtgtctatatgtatggattcaaacacatcctccaaaatgtccctttgcctttgtgtaaataatgatcgctacaacaattgtacctctactatgatatcactgtattctatttgaggtttgtcacattttat

SEQ ID NO: 38403 - protein, 224 aa, Arabidopsis thaliana
  peptide (1)..(224): Ceres Seq. ID no. 12337734
  misc_feature (48)..(86): Pfam Name: Saposin-like type B, region 1 Pfam Description: Saposin-like type B, region 1
  misc_feature (137)..(216): Homolog of NCBI NO: 31227989 NR Description: ENSANGP00000021208 [Anopheles gambiae]
  misc_feature (31)..(124): Homolog of NCBI NO: 31227989 NR Description: ENSANGP00000021208 [Anopheles gambiae]
  misc_feature (53)..(215): Homolog of NCBI NO: 6942199 NR Description: putative protein [Vitis riparia]
  misc_feature (50)..(209): Homolog of NCBI NO: 34896130 NR Description: P0701D05.19 [Oryza sativa (japonica
  misc_feature (17)..(210): Homolog of NCBI NO: 15241065 NR Description: putative protein
  misc_feature (12)..(224): Homolog of NCBI NO: 15231028 NR Description: putative protein
KKNQSFARKGIMGLKAGTFVLLLLGLILVSDARSFVDSTISEKVSNKEDVCTLCEEYVTDALSYLEKNVTQAEIIEDLHDRCSQLRGYSQQCISLVDYYVPLFFLQLESFQPHYFCKRMNLCGKVVALVEEARQDSCGVCHRTVSEILIKLQDPDTQLDIVELLIKGCKSLKNYEKKCKTLVFEYGPLILVNAEEFLVKKDVCTLLRACPPEKSVLRQPELADS

SEQ ID NO: 38404 - protein, 213 aa, Arabidopsis thaliana
  peptide (1)..(213): Ceres Seq. ID no. 12337735
  misc_feature (37)..(75): Pfam Name: Saposin-like type B, region 1 Pfam Description: Saposin-like type B, region 1
  misc_feature (126)..(205): Homolog of NCBI NO: 31227989 NR Description: ENSANGP00000021208 [Anopheles gambiae]
  misc_feature (20)..(113): Homolog of NCBI NO: 31227989 NR Description: ENSANGP00000021208 [Anopheles gambiae]
  misc_feature (42)..(204): Homolog of NCBI NO: 6942199 NR Description: putative protein [Vitis riparia]
  misc_feature (39)..(198): Homolog of NCBI NO: 34896130 NR Description: P0701D05.19 [Oryza sativa (japonica
  misc_feature (6)..(199): Homolog of NCBI NO: 15241065 NR Description: putative protein
  misc_feature (1)..(213): Homolog of NCBI NO: 15231028 NR Description: putative protein
MGLKAGTFVLLLLGLILVSDARSFVDSTISEKVSNKEDVCTLCEEYVTDALSYLEKNVTQAEIIEDLHDRCSQLRGYSQQCISLVDYYVPLFFLQLESFQPHYFCKRMNLCGKVVALVEEARQDSCGVCHRTVSEILIKLQDPDTQLDIVELLIKGCKSLKNYEKKCKTLVFEYGPLILVNAEEFLVKKDVCTLLRACPPEKSVLRQPELADS

SEQ ID NO: 38405 - DNA, 702 bp, Arabidopsis thaliana
  misc_feature (1)..(702): Ceres Seq. ID no. 13488314
  misc_feature: MA Experiment ID: 108435 Result: Down-regulated in Transcription
  misc_feature: MA Experiment 108435 PARAMETER Experiment Name: At_stm_Mutants_cDNA_P Parameter: Plant Line Value: wt Landsburg vs stm
  misc_feature: MA Experiment 108435 PARAMETER Experiment Name: At_stm_Mutants_cDNA_P Parameter: Tissue Value: Shoot Apical Meristem Region
  misc_feature: MA Experiment ID: 108488 Result: Up-regulated in Transcription
  misc_feature: MA Experiment ID: 20000069 Result: Down-regulated in Transcription
  misc_feature: MA Experiment 20000069 PARAMETER Experiment Name: At_100uM_ABA_Mutants_cDNA_P Parameter: Plant Line Value: CS23
  misc_feature: MA Experiment 20000069 PARAMETER Experiment Name: At_100uM_ABA_Mutants_cDNA_P Parameter: Timepoint (hr) Value: 6
  misc_feature: MA Experiment 20000069 PARAMETER Experiment Name: At_100uM_ABA_Mutants_cDNA_P Parameter: Tissue Value: Aerial
  misc_feature: MA Experiment 20000069 PARAMETER Experiment Name: At_100uM_ABA_Mutants_cDNA_P Parameter: Treatment Value: 100uM ABA vs. No Treatment
  misc_feature: MA Experiment ID: 20000086 Result: Down-regulated in Transcription
  misc_feature: MA Experiment 20000086 PARAMETER Experiment Name: At_100uM_ABA_Mutants_cDNA_P Parameter: Plant Line Value: CS22
  misc_feature: MA Experiment 20000086 PARAMETER Experiment Name: At_100uM_ABA_Mutants_cDNA_P Parameter: Timepoint (hr) Value: 6
  misc_feature: MA Experiment 20000086 PARAMETER Experiment Name: At_100uM_ABA_Mutants_cDNA_P Parameter: Tissue Value: Aerial
  misc_feature: MA Experiment 20000086 PARAMETER Experiment Name: At_100uM_ABA_Mutants_cDNA_P Parameter: Treatment Value: 100uM ABA vs. No Treatment
  misc_feature: MA Experiment ID: 20000117 Result: Down-regulated in Transcription
  misc_feature: MA Experiment 20000117 PARAMETER Experiment Name: At_100uM_ABA_Mutants_cDNA_P Parameter: Plant Line Value: Columbia
  misc_feature: MA Experiment 20000117 PARAMETER Experiment Name: At_100uM_ABA_Mutants_cDNA_P Parameter: Timepoint (hr) Value: 6
  misc_feature: MA Experiment 20000117 PARAMETER Experiment Name: At_100uM_ABA_Mutants_cDNA_P Parameter: Tissue Value: Aerial
  misc_feature: MA Experiment 20000117 PARAMETER Experiment Name: At_100uM_ABA_Mutants_cDNA_P Parameter: Treatment Value: 100uM ABA vs. No Treatment
  misc_feature: MA Experiment ID: 20000184 Result: Up-regulated in Transcription
  misc_feature: MA Experiment 20000184 PARAMETER Experiment Name: At_Shoots__P Parameter: Age (day) Value: 7
  misc_feature: MA Experiment 20000184 PARAMETER Experiment Name: At_Shoots__P Parameter: Tissue Value: Shoots vs. Whole Plant
  misc_feature: MA Experiment ID: 20000234 Result: Up-regulated in Transcription
  misc_feature: MA Experiment 20000234 PARAMETER Experiment Name: At_Siliques_P Parameter: Age (day) Value: 21
  misc_feature: MA Experiment 20000234 PARAMETER Experiment Name: At_Siliques_P Parameter: Organism Value: A. thaliana
  misc_feature: MA Experiment 20000234 PARAMETER Experiment Name: At_Siliques_P Parameter: Plant Line Value: WS
  misc_feature: MA Experiment 20000234 PARAMETER Experiment Name: At_Siliques_P Parameter: Tissue Value: Less Than 5mm Siliques vs. Whole Plant
  misc_feature: MA Experiment ID: 20000235 Result: Up-regulated in Transcription
  misc_feature: MA Experiment 20000235 PARAMETER Experiment Name: At_Siliques_P Parameter: Age (day) Value: 21
  misc_feature: MA Experiment 20000235 PARAMETER Experiment Name: At_Siliques_P Parameter: Organism Value: A. thaliana
  misc_feature: MA Experiment 20000235 PARAMETER Experiment Name: At_Siliques_P Parameter: Plant Line Value: WS
  misc_feature: MA Experiment 20000235 PARAMETER Experiment Name: At_Siliques_P Parameter: Tissue Value: 5-10mm Siliques vs. Whole Plant
  misc_feature: MA Experiment ID: 20000436 Result: Down-regulated in Transcription
  misc_feature: MA Experiment 20000436 PARAMETER Experiment Name: At_Drought_P Parameter: Age (day) Value: 7
  misc_feature: MA Experiment 20000436 PARAMETER Experiment Name: At_Drought_P Parameter: Organism Value: A. thaliana
  misc_feature: MA Experiment 20000436 PARAMETER Experiment Name: At_Drought_P Parameter: Plant Line Value: WS
  misc_feature: MA Experiment 20000436 PARAMETER Experiment Name: At_Drought_P Parameter: Timepoint (hr) Value: 12
  misc_feature: MA Experiment 20000436 PARAMETER Experiment Name: At_Drought_P Parameter: Tissue Value: Whole Plant
  misc_feature: MA Experiment 20000436 PARAMETER Experiment Name: At_Drought_P Parameter: Treatment Value: Drought vs. No Drought
  misc_feature: MA Experiment ID: 20000437 Result: Down-regulated in Transcription
  misc_feature: MA Experiment 20000437 PARAMETER Experiment Name: At_Drought_P Parameter: Age (day) Value: 8
  misc_feature: MA Experiment 20000437 PARAMETER Experiment Name: At_Drought_P Parameter: Organism Value: A. thaliana
  misc_feature: MA Experiment 20000437 PARAMETER Experiment Name: At_Drought_P Parameter: Plant Line Value: WS
  misc_feature: MA Experiment 20000437 PARAMETER Experiment Name: At_Drought_P Parameter: Timepoint (hr) Value: 24
  misc_feature: MA Experiment 20000437 PARAMETER Experiment Name: At_Drought_P Parameter: Tissue Value: Whole Plant
  misc_feature: MA Experiment 20000437 PARAMETER Experiment Name: At_Drought_P Parameter: Treatment Value: Drought vs. No Drought
  misc_feature: MA Experiment ID: 20000438 Result: Up-regulated in Transcription
  misc_feature: MA Experiment 20000438 PARAMETER Experiment Name: At_Shoots__P Parameter: Age (day) Value: 14
  misc_feature: MA Experiment 20000438 PARAMETER Experiment Name: At_Shoots__P Parameter: Tissue Value: Shoots vs. Whole Plant
  misc_feature: MA Experiment ID: 20000794 Result: Down-regulated in Transcription
  misc_feature: MA Experiment 20000794 PARAMETER Experiment Name: At_Petals_P Parameter: Age (day) Value: 23-25 days
  misc_feature: MA Experiment 20000794 PARAMETER Experiment Name: At_Petals_P Parameter: Plant Line Value: WS
  misc_feature: MA Experiment 20000794 PARAMETER Experiment Name: At_Petals_P Parameter: Tissue Value: Petals vs. Whole plant
  misc_feature: MA Experiment ID: 20001248 Result: Down-regulated in Transcription
  misc_feature: MA Experiment 20001248 PARAMETER Experiment Name: At_Far-red-induction_P Parameter: Age (day) Value: 7
  misc_feature: MA Experiment 20001248 PARAMETER Experiment Name: At_Far-red-induction_P Parameter: Light Value: Far-red vs. White
  misc_feature: MA Experiment 20001248 PARAMETER Experiment Name: At_Far-red-induction_P Parameter: Organism Value: A. thaliana
  misc_feature: MA Experiment 20001248 PARAMETER Experiment Name: At_Far-red-induction_P Parameter: Plant Line Value: Columbia
  misc_feature: MA Experiment 20001248 PARAMETER Experiment Name: At_Far-red-induction_P Parameter: Timepoint (hr) Value: 4
  misc_feature: MA Experiment 20001248 PARAMETER Experiment Name: At_Far-red-induction_P Parameter: Tissue Value: Whole Plant
  misc_feature: MA Experiment ID: 20001557 Result: Down-regulated in Transcription
  misc_feature: MA Experiment 20001557 PARAMETER Experiment Name: At_Drought_Soil_Dry_P Parameter: Age (day) Value: 27
  misc_feature: MA Experiment 20001557 PARAMETER Experiment Name: At_Drought_Soil_Dry_P Parameter: Organism Value: A. thaliana
  misc_feature: MA Experiment 20001557 PARAMETER Experiment Name: At_Drought_Soil_Dry_P Parameter: Plant Line Value: WS
  misc_feature: MA Experiment 20001557 PARAMETER Experiment Name: At_Drought_Soil_Dry_P Parameter: Post Timepoint (hr) Value: 3
  misc_feature: MA Experiment 20001557 PARAMETER Experiment Name: At_Drought_Soil_Dry_P Parameter: Post-Treatment Value: Re-Water vs. No Drought
  misc_feature: MA Experiment 20001557 PARAMETER Experiment Name: At_Drought_Soil_Dry_P Parameter: Timepoint (day) Value: 13
  misc_feature: MA Experiment 20001557 PARAMETER Experiment Name: At_Drought_Soil_Dry_P Parameter: Treatment Value: Drought vs. No Drought
  misc_feature: MA Experiment ID: 20001559 Result: Down-regulated in Transcription
  misc_feature: MA Experiment 20001559 PARAMETER Experiment Name: At_Drought_Soil_Dry_P Parameter: Age (day) Value: 28
  misc_feature: MA Experiment 20001559 PARAMETER Experiment Name: At_Drought_Soil_Dry_P Parameter: Organism Value: A. thaliana
  misc_feature: MA Experiment 20001559 PARAMETER Experiment Name: At_Drought_Soil_Dry_P Parameter: Plant Line Value: WS
  misc_feature: MA Experiment 20001559 PARAMETER Experiment Name: At_Drought_Soil_Dry_P Parameter: Post Timepoint (hr) Value: 29
  misc_feature: MA Experiment 20001559 PARAMETER Experiment Name: At_Drought_Soil_Dry_P Parameter: Post-Treatment Value: Re-Water vs. No Drought
  misc_feature: MA Experiment 20001559 PARAMETER Experiment Name: At_Drought_Soil_Dry_P Parameter: Timepoint (day) Value: 14
  misc_feature: MA Experiment 20001559 PARAMETER Experiment Name: At_Drought_Soil_Dry_P Parameter: Treatment Value: Drought vs. No Drought
  misc_feature: MA Experiment ID: 20001757 Result: Up-regulated in Transcription
  misc_feature: MA Experiment 20001757 PARAMETER Experiment Name: At_50mM_NH4NO3_L-to-H_P Parameter: Timepoint (hr) Value: 6
  misc_feature: MA Experiment 20001757 PARAMETER Experiment Name: At_50mM_NH4NO3_L-to-H_P Parameter: Tissue Value: Leaf
  misc_feature: MA Experiment 20001757 PARAMETER Experiment Name: At_50mM_NH4NO3_L-to-H_P Parameter: Treatment Value: 50mM NH4NO3 vs 100mM Mannitol
  misc_feature: MA Experiment ID: 20001904 Result: Down-regulated in Transcription
  misc_feature: MA Experiment 20001904 PARAMETER Experiment Name: At_Drought_Reproduction_P Parameter: Age (day) Value: 37
  misc_feature: MA Experiment 20001904 PARAMETER Experiment Name: At_Drought_Reproduction_P Parameter: Organism Value: A. thaliana
  misc_feature: MA Experiment 20001904 PARAMETER Experiment Name: At_Drought_Reproduction_P Parameter: Plant Line Value: WS
  misc_feature: MA Experiment 20001904 PARAMETER Experiment Name: At_Drought_Reproduction_P Parameter: Timepoint (day) Value: 7
  misc_feature: MA Experiment 20001904 PARAMETER Experiment Name: At_Drought_Reproduction_P Parameter: Tissue Value: Rosettes
  misc_feature: MA Experiment 20001904 PARAMETER Experiment Name: At_Drought_Reproduction_P Parameter: Treatment Value: Drought vs. No Drought
  misc_feature: MA Experiment ID: 20001906 Result: Down-regulated in Transcription
  misc_feature: MA Experiment 20001906 PARAMETER Experiment Name: At_Drought_Reproduction_P Parameter: Age (day) Value: 35
  misc_feature: MA Experiment 20001906 PARAMETER Experiment Name: At_Drought_Reproduction_P Parameter: Organism Value: A. thaliana
  misc_feature: MA Experiment 20001906 PARAMETER Experiment Name: At_Drought_Reproduction_P Parameter: Plant Line Value: WS
  misc_feature: MA Experiment 20001906 PARAMETER Experiment Name: At_Drought_Reproduction_P Parameter: Timepoint (day) Value: 5
  misc_feature: MA Experiment 20001906 PARAMETER Experiment Name: At_Drought_Reproduction_P Parameter: Tissue Value: Siliques
  misc_feature: MA Experiment 20001906 PARAMETER Experiment Name: At_Drought_Reproduction_P Parameter: Treatment Value: Drought vs. No Drought
attttgttttgcgtttctgaatttgtggccattatcttctcacactctcttctcttagctcacagaggaaagaaaaatggcgaattccatttcatcaatatctctgcctcgatgtttcatcttcaacaatggtagtcacaaatcaaggccatggccaagctcaagcagtttctttctcaacaaatcatcaaagcatcatcctcatccactactctctctttcttcttcgccgtcttccgtcgtagaaactgataatgacgacgacaacgacctcactttcagtggttgcagagcgtgtgggaaagaagagaaagagagtgggtgtaatggtgacggacggattcaaggtggcattgcaactgtccccggtttcggttggtggccaattaaggcttacaggccttgtcccgcgtttgttgaggccggaggtagataccgccgcatagggcagagcatggacgaggttgcatttggtcgtggtgactctaaatcctccacttctgtagacaccagtgattcactactacgccagacaaagccaacaagttctagcaaaagttcaaacaagtgatatatagcccagtttttcaagtccaagaagaactttttttggaaatgtgtaatgatgattgggcctaaacatattatcggcccatttataattttacggctcaatagttaagaaaccctaaagaaggtttt

SEQ ID NO: 38406 - protein, 164 aa, Arabidopsis thaliana
  peptide (1)..(164): Ceres Seq. ID no. 13488315
  misc_feature (64)..(142): Homolog of NCBI NO: 34904394 NR Description: unnamed protein product [Oryza sativa (japonica
  misc_feature (1)..(151): Homolog of NCBI NO: 9757952 NR Description: dbj|BAA92898.1~gene_id:MJC20.18~similar to
  misc_feature (1)..(164): Homolog of NCBI NO: 18422170 NR Description: expressed protein [Arabidopsis thaliana]
MANSISSISLPRCFIFNNGSHKSRPWPSSSSFFLNKSSKHHPHPLLSLSSSPSSVVETDNDDDNDLTFSGCRACGKEEKESGCNGDGRIQGGIATVPGFGWWPIKAYRPCPAFVEAGGRYRRIGQSMDEVAFGRGDSKSSTSVDTSDSLLRQTKPTSSSKSSNK

SEQ ID NO: 38407 - DNA, 907 bp, Arabidopsis thaliana
  misc_feature (1)..(907): Ceres Seq. ID no. 13488344
  misc_feature: MA Experiment ID: 108576 Result: Up-regulated in Transcription
  misc_feature: MA Experiment 108576 PARAMETER Experiment Name: At_42deg_Heat_cDNA_P Parameter: Temperature (deg C) Value: 42 vs. 22
  misc_feature: MA Experiment 108576 PARAMETER Experiment Name: At_42deg_Heat_cDNA_P Parameter: Timepoint (hr) Value: 1
  misc_feature: MA Experiment 108576 PARAMETER Experiment Name: At_42deg_Heat_cDNA_P Parameter: Tissue Value: Aerial
  misc_feature: MA Experiment ID: 20000438 Result: Down-regulated in Transcription
  misc_feature: MA Experiment 20000438 PARAMETER Experiment Name: At_Shoots__P Parameter: Age (day) Value: 14
  misc_feature: MA Experiment 20000438 PARAMETER Experiment Name: At_Shoots__P Parameter: Tissue Value: Shoots vs. Whole Plant
  misc_feature: MA Experiment ID: 20000794 Result: Up-regulated in Transcription
  misc_feature: MA Experiment 20000794 PARAMETER Experiment Name: At_Petals_P Parameter: Age (day) Value: 23-25 days
  misc_feature: MA Experiment 20000794 PARAMETER Experiment Name: At_Petals_P Parameter: Plant Line Value: WS
  misc_feature: MA Experiment 20000794 PARAMETER Experiment Name: At_Petals_P Parameter: Tissue Value: Petals vs. Whole plant
  misc_feature: MA Experiment ID: 20001911 Result: Down-regulated in Transcription
  misc_feature: MA Experiment 20001911 PARAMETER Experiment Name: At_Drought_Reproduction_P Parameter: Age (day) Value: 40
  misc_feature: MA Experiment 20001911 PARAMETER Experiment Name: At_Drought_Reproduction_P Parameter: Organism Value: A. thaliana
  misc_feature: MA Experiment 20001911 PARAMETER Experiment Name: At_Drought_Reproduction_P Parameter: Plant Line Value: WS
  misc_feature: MA Experiment 20001911 PARAMETER Experiment Name: At_Drought_Reproduction_P Parameter: Timepoint (day) Value: 10
  misc_feature: MA Experiment 20001911 PARAMETER Experiment Name: At_Drought_Reproduction_P Parameter: Tissue Value: Flowers
  misc_feature: MA Experiment 20001911 PARAMETER Experiment Name: At_Drought_Reproduction_P Parameter: Treatment Value: Drought vs. No Drought
cctctttaagagtcacttgactttaatatttctctttttgtttctttctccttttctctgttttttcttttcttttctctttgcgattcgctgagagcatgcctgaatgtcaagagaaagggagagatttgaagagatagggaagaagatcaaaagagaagcagatgcttggcctcatcaaatggctggaattagaagaccaatgtcgggtcctcccggaaccctcaataccattacgccttgtgctgcctgcaagcttttgcgccgtagatgtgctcaagaatgtcccttttcgccatatttctccccacacgagcctcataagttcgcttccgtccacaaagtctttggagctagtaacgtctccaagatgctaatggaagtacctgagagccagagagcagatgccgcgaatagccttgtgtatgaagcaaacgtgaggctaagagatccggtgtacggatgcatgggagccatctcagctctacaacaacaagtccaagctttacaagccgagctcacggccgtaagatccgagattcttaagtacaagcaacgagaagctgtcgccactttgatcgtaccttccaactcccaagttgccggatttcacaactccggcggtgtttccgtgattgcaccaccaccacaaagaccaacaactccaccacaacctacaacggctcatcctccttctccatcttcttgtgttttctctcaaccaaccacaagagacttagaatacggcaacattgaaagtgagaacaactacttcggttaaatttttattgtatcattctacaaacacatacaaatacatataattaatttatttcgataatttgtgatccggtgactaataaattaaattaaattaaattaatataagtgaacaaggttggtcttg

SEQ ID NO: 38408 - protein, 224 aa, Arabidopsis thaliana
  peptide (1)..(224): Ceres Seq. ID no. 13488345
  misc_feature (42)..(148): Homolog of NCBI NO: 21618134 NR Description: unknown [Arabidopsis thaliana]
  misc_feature (41)..(149): Homolog of NCBI NO: 15218746 NR Description: lateral organ boundaries (LOB) domain protein 6
  misc_feature (35)..(146): Homolog of NCBI NO: 21592574 NR Description: unknown [Arabidopsis thaliana]
  misc_feature (44)..(153): Homolog of NCBI NO: 15221679 NR Description: lateral organ boundaries (LOB) domain family
  misc_feature (35)..(146): Homolog of NCBI NO: 18402268 NR Description: lateral organ boundaries (LOB) domain family
  misc_feature (6)..(181): Homolog of NCBI NO: 34907878 NR Description: P0031D02.27 [Oryza sativa (japonica
  misc_feature (6)..(207): Homolog of NCBI NO: 25408064 NR Description: hypothetical protein At2g30340 [imported] -
  misc_feature (1)..(207): Homolog of NCBI NO: 30684548 NR Description: lateral organ boundaries (LOB) domain protein 13
  misc_feature (1)..(224): Homolog of NCBI NO: 21618113 NR Description: LOB DOMAIN 13 [Arabidopsis thaliana]
  misc_feature (1)..(224): Homolog of NCBI NO: 18405401 NR Description: lateral organ boundaries (LOB) domain family
MSRERERFEEIGKKIKREADAWPHQMAGIRRPMSGPPGTLNTITPCAACKLLRRRCAQECPFSPYFSPHEPHKFASVHKVFGASNVSKMLMEVPESQRADAANSLVYEANVRLRDPVYGCMGAISALQQQVQALQAELTAVRSEILKYKQREAVATLIVPSNSQVAGFHNSGGVSVIAPPPQRPTTPPQPTTAHPPSPSSCVFSQPTTRDLEYGNIESENNYFG

SEQ ID NO: 38409 - protein, 199 aa, Arabidopsis thaliana
  peptide (1)..(199): Ceres Seq. ID no. 13488346
  misc_feature (17)..(123): Homolog of NCBI NO: 21618134 NR Description: unknown [Arabidopsis thaliana]
  misc_feature (16)..(124): Homolog of NCBI NO: 15218746 NR Description: lateral organ boundaries (LOB) domain protein 6
  misc_feature (10)..(121): Homolog of NCBI NO: 21592574 NR Description: unknown [Arabidopsis thaliana]
  misc_feature (19)..(128): Homolog of NCBI NO: 15221679 NR Description: lateral organ boundaries (LOB) domain family
  misc_feature (10)..(121): Homolog of NCBI NO: 18402268 NR Description: lateral organ boundaries (LOB) domain family
  misc_feature (1)..(156): Homolog of NCBI NO: 34907878 NR Description: P0031D02.27 [Oryza sativa (japonica
  misc_feature (1)..(182): Homolog of NCBI NO: 25408064 NR Description: hypothetical protein At2g30340 [imported] -
  misc_feature (1)..(182): Homolog of NCBI NO: 30684548 NR Description: lateral organ boundaries (LOB) domain protein 13
  misc_feature (1)..(199): Homolog of NCBI NO: 21618113 NR Description: LOB DOMAIN 13 [Arabidopsis thaliana]
  misc_feature (1)..(199): Homolog of NCBI NO: 18405401 NR Description: lateral organ boundaries (LOB) domain family
MAGIRRPMSGPPGTLNTITPCAACKLLRRRCAQECPFSPYFSPHEPHKFASVHKVFGASNVSKMLMEVPESQRADAANSLVYEANVRLRDPVYGCMGAISALQQQVQALQAELTAVRSEILKYKQREAVATLIVPSNSQVAGFHNSGGVSVIAPPPQRPTTPPQPTTAHPPSPSSCVFSQPTTRDLEYGNIESENNYFG

SEQ ID NO: 38410 - protein, 192 aa, Arabidopsis thaliana
  peptide (1)..(192): Ceres Seq. ID no. 13488347
  misc_feature (10)..(116): Homolog of NCBI NO: 21618134 NR Description: unknown [Arabidopsis thaliana]
  misc_feature (9)..(117): Homolog of NCBI NO: 15218746 NR Description: lateral organ boundaries (LOB) domain protein 6
  misc_feature (3)..(114): Homolog of NCBI NO: 21592574 NR Description: unknown [Arabidopsis thaliana]
  misc_feature (12)..(121): Homolog of NCBI NO: 15221679 NR Description: lateral organ boundaries (LOB) domain family
  misc_feature (3)..(114): Homolog of NCBI NO: 18402268 NR Description: lateral organ boundaries (LOB) domain family
  misc_feature (1)..(149): Homolog of NCBI NO: 34907878 NR Description: P0031D02.27 [Oryza sativa (japonica
  misc_feature (1)..(175): Homolog of NCBI NO: 25408064 NR Description: hypothetical protein At2g30340 [imported] -
  misc_feature (1)..(175): Homolog of NCBI NO: 30684548 NR Description: lateral organ boundaries (LOB) domain protein 13
  misc_feature (1)..(192): Homolog of NCBI NO: 21618113 NR Description: LOB DOMAIN 13 [Arabidopsis thaliana]
  misc_feature (1)..(192): Homolog of NCBI NO: 18405401 NR Description: lateral organ boundaries (LOB) domain family
MSGPPGTLNTITPCAACKLLRRRCAQECPFSPYFSPHEPHKFASVHKVFGASNVSKMLMEVPESQRADAANSLVYEANVRLRDPVYGCMGAISALQQQVQALQAELTAVRSEILKYKQREAVATLIVPSNSQVAGFHNSGGVSVIAPPPQRPTTPPQPTTAHPPSPSSCVFSQPTTRDLEYGNIESENNYFG

SEQ ID NO: 38411 - DNA, 819 bp, Arabidopsis thaliana
  misc_feature (1)..(819): Ceres Seq. ID no. 12420502
  misc_feature: MA Experiment ID: 108577 Result: Down-regulated in Transcription
  misc_feature: MA Experiment 108577 PARAMETER Experiment Name: At_42deg_Heat_cDNA_P Parameter: Temperature (deg C) Value: 42 vs. 22
  misc_feature: MA Experiment 108577 PARAMETER Experiment Name: At_42deg_Heat_cDNA_P Parameter: Timepoint (hr) Value: 6
  misc_feature: MA Experiment 108577 PARAMETER Experiment Name: At_42deg_Heat_cDNA_P Parameter: Tissue Value: Aerial
  misc_feature: MA Experiment ID: 108595 Result: Down-regulated in Transcription
  misc_feature: MA Experiment 108595 PARAMETER Experiment Name: At_Ler-pi_Ovule_cDNA_P Parameter: Plant Line Value: null
  misc_feature: MA Experiment ID: 20000173 Result: Down-regulated in Transcription
  misc_feature: MA Experiment 20000173 PARAMETER Experiment Name: At_42deg_Heat_P Parameter: Age (day) Value: 14
  misc_feature: MA Experiment 20000173 PARAMETER Experiment Name: At_42deg_Heat_P Parameter: Organism Value: A. thaliana
  misc_feature: MA Experiment 20000173 PARAMETER Experiment Name: At_42deg_Heat_P Parameter: Plant Line Value: WS
  misc_feature: MA Experiment 20000173 PARAMETER Experiment Name: At_42deg_Heat_P Parameter: Temperature (deg C) Value: 42 vs. 22
  misc_feature: MA Experiment 20000173 PARAMETER Experiment Name: At_42deg_Heat_P Parameter: Timepoint (hr) Value: 6
  misc_feature: MA Experiment 20000173 PARAMETER Experiment Name: At_42deg_Heat_P Parameter: Tissue Value: Aerial
  misc_feature: MA Experiment ID: 20000179 Result: Up-regulated in Transcription
  misc_feature: MA Experiment 20000179 PARAMETER Experiment Name: At_Germinating_Seeds_P Parameter: Age (hr) Value: 6 vs. 0
  misc_feature: MA Experiment 20000179 PARAMETER Experiment Name: At_Germinating_Seeds_P Parameter: Tissue Value: Germinating Seeds
  misc_feature: MA Experiment ID: 20000180 Result: Up-regulated in Transcription
  misc_feature: MA Experiment 20000180 PARAMETER Experiment Name: At_Germinating_Seeds_P Parameter: Age (hr) Value: 24 vs. 0
  misc_feature: MA Experiment 20000180 PARAMETER Experiment Name: At_Germinating_Seeds_P Parameter: Tissue Value: Germinating Seeds
  misc_feature: MA Experiment ID: 20001451 Result: Down-regulated in Transcription
  misc_feature: MA Experiment 20001451 PARAMETER Experiment Name: At_Far-red-induction_P Parameter: Age (day) Value: 7
  misc_feature: MA Experiment 20001451 PARAMETER Experiment Name: At_Far-red-induction_P Parameter: Light Value: Far-red vs. White
  misc_feature: MA Experiment 20001451 PARAMETER Experiment Name: At_Far-red-induction_P Parameter: Organism Value: A. thaliana
  misc_feature: MA Experiment 20001451 PARAMETER Experiment Name: At_Far-red-induction_P Parameter: Plant Line Value: Columbia
  misc_feature: MA Experiment 20001451 PARAMETER Experiment Name: At_Far-red-induction_P Parameter: Timepoint (hr) Value: 24
  misc_feature: MA Experiment 20001451 PARAMETER Experiment Name: At_Far-red-induction_P Parameter: Tissue Value: Whole Plant
ccgacagagagagagaagcagatcgtatcatcacgagacgaccatcggaataacagagaaagagagaaaaagagagagagagagagagaggatgtctggtgtggttgctcttggtcatgcgagctcgtggggcgcagcgctggtaaggatctcgccgtatactttctccgcaatcggaatcgccatctcgatcggtgtctcagtcctcggtgccgcctggggaatttacattacgggaagtagtttgatcggtgcggctatagaagctcctcgtattacttcgaagaatctcatcagtgtcatcttttgcgaagctgttgctatatatggagttattgttgcaatcatactgcaaacaaagttggagagtgtcccatcttcaaagatgtatgatgctgagtctcttagagctggatatgcaatctttgcatctggaattatagttggattcgccaaccttgtatgcgggttatgtgtaggaatcattggaagcagttgtgcattgtccgatgctcagaactccacactttttgtaaagattcttgtgatcgagatattcgggagtgctctcgggttgtttggagttattgtgggaattattatgtctgcacaagcgacatggccaacgaaatagatatatatatatccggtctgtatatgttgtggtctacttgcaaatctggaaaaacatggcttcttgattatcttcattgttatatcgttccaatgtctagacgaaaatcttgtgtgaaaactgagaaccacttttggatccccaattttttgtatttgtttaaaacttttgaataagtccttttg

SEQ ID NO: 38412 - protein, 210 aa, Arabidopsis thaliana
  peptide (1)..(210): Ceres Seq. ID no. 12420503
  misc_feature (139)..(204): Pfam Name: ATP synthase subunit C Pfam Description: ATP synthase subunit C
  misc_feature (47)..(204): Homolog of NCBI NO: 30585227 NR Description: Homo sapiens ATPase, H+ transporting, lysosomal
  misc_feature (47)..(204): Homolog of NCBI NO: 15991795 NR Description: ATPase, H+ transporting, V0 subunit B
  misc_feature (47)..(204): Homolog of NCBI NO: 4757816 NR Description: ATPase, H+ transporting, lysosomal 21kD, V0
  misc_feature (38)..(200): Homolog of NCBI NO: 29840984 NR Description: similar to NM_033617 ATPase, H+ transporting,
  misc_feature (38)..(206): Homolog of NCBI NO: 6321815 NR Description: vacuolar ATPase V0 domain subunit c''; Ppa1p
  misc_feature (40)..(210): Homolog of NCBI NO: 34912550 NR Description: putative H+-transporting ATPase
  misc_feature (37)..(210): Homolog of NCBI NO: 38640797 NR Description: V-ATPase subunit c'' proteolipid [Xerophyta
  misc_feature (31)..(210): Homolog of NCBI NO: 29423617 NR Description: vacuolar membrane ATPase subunit c'' [Citrus
  misc_feature (31)..(210): Homolog of NCBI NO: 15224764 NR Description: putative vacuolar ATP synthase proteolipid subunit
  misc_feature (31)..(210): Homolog of NCBI NO: 15236838 NR Description: H+-transporting ATPase - like protein
RQRERSRSYHHETTIGITEKERKRERERERMSGVVALGHASSWGAALVRISPYTFSAIGIAISIGVSVLGAAWGIYITGSSLIGAAIEAPRITSKNLISVIFCEAVAIYGVIVAIILQTKLESVPSSKMYDAESLRAGYAIFASGIIVGFANLVCGLCVGIIGSSCALSDAQNSTLFVKILVIEIFGSALGLFGVIVGIIMSAQATWPTK

SEQ ID NO: 38413 - protein, 180 aa, Arabidopsis thaliana
  peptide (1)..(180): Ceres Seq. ID no. 12420504
  misc_feature (109)..(174): Pfam Name: ATP synthase subunit C Pfam Description: ATP synthase subunit C
  misc_feature (17)..(174): Homolog of NCBI NO: 30585227 NR Description: Homo sapiens ATPase, H+ transporting, lysosomal
  misc_feature (17)..(174): Homolog of NCBI NO: 15991795 NR Description: ATPase, H+ transporting, V0 subunit B
  misc_feature (17)..(174): Homolog of NCBI NO: 4757816 NR Description: ATPase, H+ transporting, lysosomal 21kD, V0
  misc_feature (8)..(170): Homolog of NCBI NO: 29840984 NR Description: similar to NM_033617 ATPase, H+ transporting,
  misc_feature (8)..(176): Homolog of NCBI NO: 6321815 NR Description: vacuolar ATPase V0 domain subunit c''; Ppa1p
  misc_feature (10)..(180): Homolog of NCBI NO: 34912550 NR Description: putative H+-transporting ATPase
  misc_feature (7)..(180): Homolog of NCBI NO: 38640797 NR Description: V-ATPase subunit c'' proteolipid [Xerophyta
  misc_feature (1)..(180): Homolog of NCBI NO: 29423617 NR Description: vacuolar membrane ATPase subunit c'' [Citrus
  misc_feature (1)..(180): Homolog of NCBI NO: 15224764 NR Description: putative vacuolar ATP synthase proteolipid subunit
  misc_feature (1)..(180): Homolog of NCBI NO: 15236838 NR Description: H+-transporting ATPase - like protein
MSGVVALGHASSWGAALVRISPYTFSAIGIAISIGVSVLGAAWGIYITGSSLIGAAIEAPRITSKNLISVIFCEAVAIYGVIVAIILQTKLESVPSSKMYDAESLRAGYAIFASGIIVGFANLVCGLCVGIIGSSCALSDAQNSTLFVKILVIEIFGSALGLFGVIVGIIMSAQATWPTK

SEQ ID NO: 38414 - protein, 115 aa, Arabidopsis thaliana
  peptide (1)..(115): Ceres Seq. ID no. 12420505
MRVMCRNHWKQLCIVRCSELHTFCKDSCDRDIRECSRVVWSYCGNYYVCTSDMANEIDIYISGLYMLWSTCKSGKTWLLDYLHCYIVPMSRRKSCVKTENHFWIPNFLYLFKTFE

SEQ ID NO: 38415 - DNA, 515 bp, Arabidopsis thaliana
  misc_feature (1)..(515): Ceres Seq. ID no. 12579436
  misc_feature: MA Experiment ID: 108434 Result: Up-regulated in Transcription
  misc_feature: MA Experiment 108434 PARAMETER Experiment Name: At_Root_Tips_cDNA_P Parameter: Tissue Value: Root Tips
  misc_feature: MA Experiment ID: 108435 Result: Up-regulated in Transcription
  misc_feature: MA Experiment 108435 PARAMETER Experiment Name: At_stm_Mutants_cDNA_P Parameter: Plant Line Value: wt Landsburg vs stm
  misc_feature: MA Experiment 108435 PARAMETER Experiment Name: At_stm_Mutants_cDNA_P Parameter: Tissue Value: Shoot Apical Meristem Region
  misc_feature: MA Experiment ID: 108462 Result: Down-regulated in Transcription
  misc_feature: MA Experiment 108462 PARAMETER Experiment Name: At_Germinating_Seeds_cDNA_P Parameter: Age (day) Value: 2 vs. 0
  misc_feature: MA Experiment 108462 PARAMETER Experiment Name: At_Germinating_Seeds_cDNA_P Parameter: Tissue Value: Germinating Seeds
  misc_feature: MA Experiment ID: 108463 Result: Down-regulated in Transcription
  misc_feature: MA Experiment 108463 PARAMETER Experiment Name: At_Germinating_Seeds_cDNA_P Parameter: Age (day) Value: 3 vs. 0
  misc_feature: MA Experiment 108463 PARAMETER Experiment Name: At_Germinating_Seeds_cDNA_P Parameter: Tissue Value: Germinating Seeds
  misc_feature: MA Experiment ID: 108464 Result: Down-regulated in Transcription
  misc_feature: MA Experiment 108464 PARAMETER Experiment Name: At_Germinating_Seeds_cDNA_P Parameter: Age (day) Value: 4 vs. 0
  misc_feature: MA Experiment 108464 PARAMETER Experiment Name: At_Germinating_Seeds_cDNA_P Parameter: Tissue Value: Germinating Seeds
  misc_feature: MA Experiment ID: 108489 Result: Up-regulated in Transcription
  misc_feature: MA Experiment ID: 108561 Result: Down-regulated in Transcription
  misc_feature: MA Experiment 108561 PARAMETER Experiment Name: At_100uM_ABA_cDNA_P Parameter: Timepoint (hr) Value: 6
  misc_feature: MA Experiment 108561 PARAMETER Experiment Name: At_100uM_ABA_cDNA_P Parameter: Tissue Value: Aerial
  misc_feature: MA Experiment 108561 PARAMETER Experiment Name: At_100uM_ABA_cDNA_P Parameter: Treatment Value: 100uM ABA vs. No Treatment
  misc_feature: MA Experiment ID: 108573 Result: Down-regulated in Transcription
  misc_feature: MA Experiment 108573 PARAMETER Experiment Name: At_Drought_cDNA_P Parameter: Timepoint (hr) Value: 6
  misc_feature: MA Experiment 108573 PARAMETER Experiment Name: At_Drought_cDNA_P Parameter: Tissue Value: Aerial
  misc_feature: MA Experiment 108573 PARAMETER Experiment Name: At_Drought_cDNA_P Parameter: Treatment Value: Drought vs. No Drought
  misc_feature: MA Experiment ID: 20000451 Result: Up-regulated in Transcription
  misc_feature: MA Experiment 20000451 PARAMETER Experiment Name: At_CS6879_Shoots-Roots_P Parameter: Age (day) Value: 14
  misc_feature: MA Experiment 20000451 PARAMETER Experiment Name: At_CS6879_Shoots-Roots_P Parameter: Organism Value: A. thaliana
  misc_feature: MA Experiment 20000451 PARAMETER Experiment Name: At_CS6879_Shoots-Roots_P Parameter: Plant Line Value: CS6879 vs. WS
  misc_feature: MA Experiment 20000451 PARAMETER Experiment Name: At_CS6879_Shoots-Roots_P Parameter: Tissue Value: Roots
  misc_feature: MA Experiment ID: 20001558 Result: Up-regulated in Transcription
  misc_feature: MA Experiment 20001558 PARAMETER Experiment Name: At_Drought_Soil_Dry_P Parameter: Age (day) Value: 27
  misc_feature: MA Experiment 20001558 PARAMETER Experiment Name: At_Drought_Soil_Dry_P Parameter: Organism Value: A. thaliana
  misc_feature: MA Experiment 20001558 PARAMETER Experiment Name: At_Drought_Soil_Dry_P Parameter: Plant Line Value: WS
  misc_feature: MA Experiment 20001558 PARAMETER Experiment Name: At_Drought_Soil_Dry_P Parameter: Post Timepoint (hr) Value: 6
  misc_feature: MA Experiment 20001558 PARAMETER Experiment Name: At_Drought_Soil_Dry_P Parameter: Post-Treatment Value: Re-Water vs. No Drought
  misc_feature: MA Experiment 20001558 PARAMETER Experiment Name: At_Drought_Soil_Dry_P Parameter: Timepoint (day) Value: 13
  misc_feature: MA Experiment 20001558 PARAMETER Experiment Name: At_Drought_Soil_Dry_P Parameter: Treatment Value: Drought vs. No Drought
  misc_feature: MA Experiment ID: 20001560 Result: Up-regulated in Transcription
  misc_feature: MA Experiment 20001560 PARAMETER Experiment Name: At_Drought_Soil_Dry_P Parameter: Age (day) Value: 28
  misc_feature: MA Experiment 20001560 PARAMETER Experiment Name: At_Drought_Soil_Dry_P Parameter: Organism Value: A. thaliana
  misc_feature: MA Experiment 20001560 PARAMETER Experiment Name: At_Drought_Soil_Dry_P Parameter: Plant Line Value: WS
  misc_feature: MA Experiment 20001560 PARAMETER Experiment Name: At_Drought_Soil_Dry_P Parameter: Post Timepoint (hr) Value: None
  misc_feature: MA Experiment 20001560 PARAMETER Experiment Name: At_Drought_Soil_Dry_P Parameter: Post-Treatment Value: None
  misc_feature: MA Experiment 20001560 PARAMETER Experiment Name: At_Drought_Soil_Dry_P Parameter: Timepoint (day) Value: 14
  misc_feature: MA Experiment 20001560 PARAMETER Experiment Name: At_Drought_Soil_Dry_P Parameter: Treatment Value: Drought vs. No Drought
  misc_feature: MA Experiment ID: 20001757 Result: Up-regulated in Transcription
  misc_feature: MA Experiment 20001757 PARAMETER Experiment Name: At_50mM_NH4NO3_L-to-H_P Parameter: Timepoint (hr) Value: 6
  misc_feature: MA Experiment 20001757 PARAMETER Experiment Name: At_50mM_NH4NO3_L-to-H_P Parameter: Tissue Value: Leaf
  misc_feature: MA Experiment 20001757 PARAMETER Experiment Name: At_50mM_NH4NO3_L-to-H_P Parameter: Treatment Value: 50mM NH4NO3 vs 100mM Mannitol
  misc_feature: Phenotype: WHOLE PLANT Size-Small
  misc_feature: Phenotype: WHOLE PLANT Size-Small
  misc_feature: Phenotype: ROSETTE LEAVES Other
  misc_feature: Phenotype: WHOLE PLANT Other
  misc_feature: Phenotype: INFLORESCENCE Height-Short
  misc_feature: Phenotype: INFLORESCENCE Other
  misc_feature: Phenotype: ROSETTE LEAVES Shape-Serrate
  misc_feature: Phenotype: ROSETTE LEAVES Other
  misc_feature: Phenotype: INFLORESCENCE Flowering Time-Late Flowering
  misc_feature: Phenotype: WHOLE PLANT Size-Small
attttcgttttcactttctccgaacatccaaaagcttgtagcttgctcctcaaatcttcttgaaaaatgaaggttgccgctgctttcctcctcgccgttttgggcggaaacgctaatccttcagccgagaatatcaaagatatcatcggagctgttggtgctgatgttgatggagagagcattgagcttctattgaaagaagtgagtggtaaggacattgctgagctgattgcttctggtagggagaaattagcgtctgtgccatctggtggtggtgtggctgtttcagctgctccatcaagcggtggtggtggtgctgctgctgctgcccctgcggagaagaaagaagccaagaaggaagagaaagaagagtctgatgatgacatgggattcagtctcttcgagtaaggtttttgtccccacggaaaggagtcgagatttgattttttgttctcttagtggttctggtttttgctcctctttgtaaccttggtctagttagcgggttttttatt

SEQ ID NO: 38416 - protein, 113 aa, Arabidopsis thaliana
  peptide (1)..(113): Ceres Seq. ID no. 12579437
  misc_feature (17)..(112): Pfam Name: 60s Acidic ribosomal protein Pfam Description: 60s Acidic ribosomal protein
  misc_feature (1)..(113): Homolog of NCBI NO: 34906408 NR Description: putative 60S acidic ribosomal protein P2A
  misc_feature (1)..(113): Homolog of NCBI NO: 1173073 NR Description: 60S ACIDIC RIBOSOMAL PROTEIN P2A (P2)
  misc_feature (1)..(113): Homolog of NCBI NO: 4204372 NR Description: acidic ribosomal protein P2a-2 [Zea mays]
  misc_feature (1)..(113): Homolog of NCBI NO: 32400796 NR Description: acidic ribosomal protein [Triticum aestivum]
  misc_feature (1)..(113): Homolog of NCBI NO: 730583 NR Description: 60S acidic ribosomal protein P2
  misc_feature (1)..(113): Homolog of NCBI NO: 21593095 NR Description: 60S acidic ribosomal protein P2 [Arabidopsis
  misc_feature (1)..(113): Homolog of NCBI NO: 15226230 NR Description: 60S acidic ribosomal protein P2
  misc_feature (1)..(113): Homolog of NCBI NO: 24473796 NR Description: 60s acidic ribosomal protein [Prunus dulcis]
  misc_feature (1)..(113): Homolog of NCBI NO: 15226231 NR Description: 60S acidic ribosomal protein P2
  misc_feature (1)..(113): Homolog of NCBI NO: 15230454 NR Description: acidic ribosomal protein P2 -like; protein id:
MKVAAAFLLAVLGGNANPSAENIKDIIGAVGADVDGESIELLLKEVSGKDIAELIASGREKLASVPSGGGVAVSAAPSSGGGGAAAAAPAEKKEAKKEEKEESDDDMGFSLFE

SEQ ID NO: 38417 - DNA, 658 bp, Arabidopsis thaliana
  misc_feature (1)..(658): Ceres Seq. ID no. 12602522
  misc_feature: MA Experiment ID: 20000173 Result: Down-regulated in Transcription
  misc_feature: MA Experiment 20000173 PARAMETER Experiment Name: At_42deg_Heat_P Parameter: Age (day) Value: 14
  misc_feature: MA Experiment 20000173 PARAMETER Experiment Name: At_42deg_Heat_P Parameter: Organism Value: A. thaliana
  misc_feature: MA Experiment 20000173 PARAMETER Experiment Name: At_42deg_Heat_P Parameter: Plant Line Value: WS
  misc_feature: MA Experiment 20000173 PARAMETER Experiment Name: At_42deg_Heat_P Parameter: Temperature (deg C) Value: 42 vs. 22
  misc_feature: MA Experiment 20000173 PARAMETER Experiment Name: At_42deg_Heat_P Parameter: Timepoint (hr) Value: 6
  misc_feature: MA Experiment 20000173 PARAMETER Experiment Name: At_42deg_Heat_P Parameter: Tissue Value: Aerial
  misc_feature: MA Experiment ID: 20000265 Result: Up-regulated in Transcription
  misc_feature: MA Experiment 20000265 PARAMETER Experiment Name: At_Open_Flower_P Parameter: Age (day) Value: 21
  misc_feature: MA Experiment 20000265 PARAMETER Experiment Name: At_Open_Flower_P Parameter: Plant Line Value: WS
  misc_feature: MA Experiment 20000265 PARAMETER Experiment Name: At_Open_Flower_P Parameter: Tissue Value: Closed Flower vs. Whole Plant
  misc_feature: MA Experiment ID: 20000437 Result: Down-regulated in Transcription
  misc_feature: MA Experiment 20000437 PARAMETER Experiment Name: At_Drought_P Parameter: Age (day) Value: 8
  misc_feature: MA Experiment 20000437 PARAMETER Experiment Name: At_Drought_P Parameter: Organism Value: A. thaliana
  misc_feature: MA Experiment 20000437 PARAMETER Experiment Name: At_Drought_P Parameter: Plant Line Value: WS
  misc_feature: MA Experiment 20000437 PARAMETER Experiment Name: At_Drought_P Parameter: Timepoint (hr) Value: 24
  misc_feature: MA Experiment 20000437 PARAMETER Experiment Name: At_Drought_P Parameter: Tissue Value: Whole Plant
  misc_feature: MA Experiment 20000437 PARAMETER Experiment Name: At_Drought_P Parameter: Treatment Value: Drought vs. No Drought
  misc_feature: MA Experiment ID: 20000495 Result: Down-regulated in Transcription
  misc_feature: MA Experiment 20000495 PARAMETER Experiment Name: At_Guard_Cells_P Parameter: Harvest Date Value: 8/2/2002
  misc_feature: MA Experiment 20000495 PARAMETER Experiment Name: At_Guard_Cells_P Parameter: Organism Value: A. thaliana
  misc_feature: MA Experiment 20000495 PARAMETER Experiment Name: At_Guard_Cells_P Parameter: Tissue Value: Guard Cells vs. Leaves
  misc_feature: MA Experiment ID: 20001560 Result: Up-regulated in Transcription
  misc_feature: MA Experiment 20001560 PARAMETER Experiment Name: At_Drought_Soil_Dry_P Parameter: Age (day) Value: 28
  misc_feature: MA Experiment 20001560 PARAMETER Experiment Name: At_Drought_Soil_Dry_P Parameter: Organism Value: A. thaliana
  misc_feature: MA Experiment 20001560 PARAMETER Experiment Name: At_Drought_Soil_Dry_P Parameter: Plant Line Value: WS
  misc_feature: MA Experiment 20001560 PARAMETER Experiment Name: At_Drought_Soil_Dry_P Parameter: Post Timepoint (hr) Value: None
  misc_feature: MA Experiment 20001560 PARAMETER Experiment Name: At_Drought_Soil_Dry_P Parameter: Post-Treatment Value: None
  misc_feature: MA Experiment 20001560 PARAMETER Experiment Name: At_Drought_Soil_Dry_P Parameter: Timepoint (day) Value: 14
  misc_feature: MA Experiment 20001560 PARAMETER Experiment Name: At_Drought_Soil_Dry_P Parameter: Treatment Value: Drought vs. No Drought
gaactttaggggttatcgattctttttgattcgttgtcattcgattatagaatttgtattagaaatcggaattttcgatcaatggggaggagaatattgaacgatgcattgagaacgatcgtgaatgctgagaagcgagggaaagcttcggtggagttgaaacctgtctctaccgtaatgtcttcgtttctcaaaatcatgaaagagaaagggtacatcaagaacttccaagtccatgatccacacagagttggaagaataactgttgatctacaaggaagggttaatgattgcaaagctctcacttataggcaggacgttaaggcaaatgagatcgggcaatacacagaacgcacacttccaacgcgccagtggggttatatagtgattacaactcccgatggcattttggatcatgaagaagctattaaacggaatgtgggtggtcaggttcttggtttctttcattgaactgcaatacggaaagaaactctgatggagggactttgatatgtcaaaccctgccataacatgtcatttgtctggctttttcgacattgtttgtttgtttgtttgttttcttgcactgcagtttcagcaagatggagaattagagaacaaaatttatttctattatgacaacatttcgaatggtatt

SEQ ID NO: 38418 - protein, 129 aa, Arabidopsis thaliana
  peptide (1)..(129): Ceres Seq. ID no. 12602523
  misc_feature (6)..(129): Pfam Name: Ribosomal protein S8 Pfam Description: Ribosomal protein S8
  misc_feature (1)..(128): Homolog of NCBI NO: 34854258 NR Description: similar to 40S ribosomal protein S15a [Rattus
  misc_feature (5)..(129): Homolog of NCBI NO: 15231316 NR Description: cytoplasmic ribosomal protein S15a -like
  misc_feature (5)..(129): Homolog of NCBI NO: 15225502 NR Description: 40S ribosomal protein S15A; protein id:
  misc_feature (5)..(129): Homolog of NCBI NO: 6683481 NR Description: wrp15a [Citrullus lanatus]
  misc_feature (5)..(129): Homolog of NCBI NO: 15223001 NR Description: ribosomal protein S15
  misc_feature (5)..(129): Homolog of NCBI NO: 133793 NR Description: 40S RIBOSOMAL PROTEIN S15A (PPCB8)
  misc_feature (5)..(129): Homolog of NCBI NO: 13560779 NR Description: cytoplasmic ribosomal protein S15a [Daucus carota]
  misc_feature (5)..(129): Homolog of NCBI NO: 28411802 NR Description: ribosomal protein S15 [Oryza sativa (japonica
  misc_feature (1)..(129): Homolog of NCBI NO: 15233571 NR Description: ribosomal protein S15a homolog
  misc_feature (1)..(129): Homolog of NCBI NO: 15224834 NR Description: 40S ribosomal protein S15A; protein id:
MGRRILNDALRTIVNAEKRGKASVELKPVSTVMSSFLKIMKEKGYIKNFQVHDPHRVGRITVDLQGRVNDCKALTYRQDVKANEIGQYTERTLPTRQWGYIVITTPDGILDHEEAIKRNVGGQVLGFFH

SEQ ID NO: 38419 - protein, 97 aa, Arabidopsis thaliana
  peptide (1)..(97): Ceres Seq. ID no. 12602524
  misc_feature (1)..(97): Pfam Name: Ribosomal protein S8 Pfam Description: Ribosomal protein S8
  misc_feature (1)..(96): Homolog of NCBI NO: 34854258 NR Description: similar to 40S ribosomal protein S15a [Rattus
  misc_feature (1)..(97): Homolog of NCBI NO: 15231316 NR Description: cytoplasmic ribosomal protein S15a -like
  misc_feature (1)..(97): Homolog of NCBI NO: 15225502 NR Description: 40S ribosomal protein S15A; protein id:
  misc_feature (1)..(97): Homolog of NCBI NO: 6683481 NR Description: wrp15a [Citrullus lanatus]
  misc_feature (1)..(97): Homolog of NCBI NO: 15223001 NR Description: ribosomal protein S15
  misc_feature (1)..(97): Homolog of NCBI NO: 133793 NR Description: 40S RIBOSOMAL PROTEIN S15A (PPCB8)
  misc_feature (1)..(97): Homolog of NCBI NO: 13560779 NR Description: cytoplasmic ribosomal protein S15a [Daucus carota]
  misc_feature (1)..(97): Homolog of NCBI NO: 28411802 NR Description: ribosomal protein S15 [Oryza sativa (japonica
  misc_feature (1)..(97): Homolog of NCBI NO: 15233571 NR Description: ribosomal protein S15a homolog
  misc_feature (1)..(97): Homolog of NCBI NO: 15224834 NR Description: 40S ribosomal protein S15A; protein id:
MSSFLKIMKEKGYIKNFQVHDPHRVGRITVDLQGRVNDCKALTYRQDVKANEIGQYTERTLPTRQWGYIVITTPDGILDHEEAIKRNVGGQVLGFFH

SEQ ID NO: 38420 - protein, 90 aa, Arabidopsis thaliana
  peptide (1)..(90): Ceres Seq. ID no. 12602525
  misc_feature (1)..(90): Pfam Name: Ribosomal protein S8 Pfam Description: Ribosomal protein S8
  misc_feature (1)..(89): Homolog of NCBI NO: 34854258 NR Description: similar to 40S ribosomal protein S15a [Rattus
  misc_feature (1)..(90): Homolog of NCBI NO: 15231316 NR Description: cytoplasmic ribosomal protein S15a -like
  misc_feature (1)..(90): Homolog of NCBI NO: 15225502 NR Description: 40S ribosomal protein S15A; protein id:
  misc_feature (1)..(90): Homolog of NCBI NO: 6683481 NR Description: wrp15a [Citrullus lanatus]
  misc_feature (1)..(90): Homolog of NCBI NO: 15223001 NR Description: ribosomal protein S15
  misc_feature (1)..(90): Homolog of NCBI NO: 133793 NR Description: 40S RIBOSOMAL PROTEIN S15A (PPCB8)
  misc_feature (1)..(90): Homolog of NCBI NO: 13560779 NR Description: cytoplasmic ribosomal protein S15a [Daucus carota]
  misc_feature (1)..(90): Homolog of NCBI NO: 28411802 NR Description: ribosomal protein S15 [Oryza sativa (japonica
  misc_feature (1)..(90): Homolog of NCBI NO: 15233571 NR Description: ribosomal protein S15a homolog
  misc_feature (1)..(90): Homolog of NCBI NO: 15224834 NR Description: 40S ribosomal protein S15A; protein id:
MKEKGYIKNFQVHDPHRVGRITVDLQGRVNDCKALTYRQDVKANEIGQYTERTLPTRQWGYIVITTPDGILDHEEAIKRNVGGQVLGFFH

SEQ ID NO: 38421 - DNA, 592 bp, Arabidopsis thaliana
  misc_feature (1)..(592): Ceres Seq. ID no. 12394119
  misc_feature: MA Experiment ID: 108433 Result: Up-regulated in Transcription
  misc_feature: MA Experiment 108433 PARAMETER Experiment Name: At_rhl_Mutant2_cDNA_P Parameter: Age (day) Value: 7
  misc_feature: MA Experiment 108433 PARAMETER Experiment Name: At_rhl_Mutant2_cDNA_P Parameter: Organism Value: A. thaliana
  misc_feature: MA Experiment 108433 PARAMETER Experiment Name: At_rhl_Mutant2_cDNA_P Parameter: Plant Line Value: rhl Mutant vs. wt landsburg
  misc_feature: MA Experiment 108433 PARAMETER Experiment Name: At_rhl_Mutant2_cDNA_P Parameter: Tissue Value: Roots
  misc_feature: MA Experiment ID: 108585 Result: Up-regulated in Transcription
  misc_feature: MA Experiment 108585 PARAMETER Experiment Name: At_5mM_NaNP_cDNA_P Parameter: Timepoint (hr) Value: 6
  misc_feature: MA Experiment 108585 PARAMETER Experiment Name: At_5mM_NaNP_cDNA_P Parameter: Tissue Value: Aerial
  misc_feature: MA Experiment 108585 PARAMETER Experiment Name: At_5mM_NaNP_cDNA_P Parameter: Treatment Value: null
  misc_feature: MA Experiment ID: 20000180 Result: Down-regulated in Transcription
  misc_feature: MA Experiment 20000180 PARAMETER Experiment Name: At_Germinating_Seeds_P Parameter: Age (hr) Value: 24 vs. 0
  misc_feature: MA Experiment 20000180 PARAMETER Experiment Name: At_Germinating_Seeds_P Parameter: Tissue Value: Germinating Seeds
  misc_feature: MA Experiment ID: 20000224 Result: Down-regulated in Transcription
  misc_feature: MA Experiment ID: 20000234 Result: Up-regulated in Transcription
  misc_feature: MA Experiment 20000234 PARAMETER Experiment Name: At_Siliques_P Parameter: Age (day) Value: 21
  misc_feature: MA Experiment 20000234 PARAMETER Experiment Name: At_Siliques_P Parameter: Organism Value: A. thaliana
  misc_feature: MA Experiment 20000234 PARAMETER Experiment Name: At_Siliques_P Parameter: Plant Line Value: WS
  misc_feature: MA Experiment 20000234 PARAMETER Experiment Name: At_Siliques_P Parameter: Tissue Value: Less Than 5mm Siliques vs. Whole Plant
  misc_feature: MA Experiment ID: 20000235 Result: Up-regulated in Transcription
  misc_feature: MA Experiment 20000235 PARAMETER Experiment Name: At_Siliques_P Parameter: Age (day) Value: 21
  misc_feature: MA Experiment 20000235 PARAMETER Experiment Name: At_Siliques_P Parameter: Organism Value: A. thaliana
  misc_feature: MA Experiment 20000235 PARAMETER Experiment Name: At_Siliques_P Parameter: Plant Line Value: WS
  misc_feature: MA Experiment 20000235 PARAMETER Experiment Name: At_Siliques_P Parameter: Tissue Value: 5-10mm Siliques vs. Whole Plant
  misc_feature: MA Experiment ID: 20000451 Result: Down-regulated in Transcription
  misc_feature: MA Experiment 20000451 PARAMETER Experiment Name: At_CS6879_Shoots-Roots_P Parameter: Age (day) Value: 14
  misc_feature: MA Experiment 20000451 PARAMETER Experiment Name: At_CS6879_Shoots-Roots_P Parameter: Organism Value: A. thaliana
  misc_feature: MA Experiment 20000451 PARAMETER Experiment Name: At_CS6879_Shoots-Roots_P Parameter: Plant Line Value: CS6879 vs. WS
  misc_feature: MA Experiment 20000451 PARAMETER Experiment Name: At_CS6879_Shoots-Roots_P Parameter: Tissue Value: Roots
attgttgtgaatttctgtgagattgagaatgcaggcggaggagataatatgccgtgtttcagacgaagagatcatcgagaattacctgaggccaaagataaacggtgaaacatcttcaatcccgagatatgttgtggaattggcagaggagctgtacactgtagagccttggctgcttcctcgacaaacagctccaattctcaaccctggcgagtggttctactttgggaaacgcaatcgaaagtatagtaacttggaaggtgttcattgcaagggatcgtggatactcgaagacggttgcatcgcagtcctgtccaaggagacgggtgaggaaattggtggaacgacgagatttaggtattactataggaacaagggggataaagagagtcgtctgaagatgagcaattggtttatgagagagtaacgtctctattacaaatccaggagagtcttcaatggacgtcaggttttctgcattatcacttgtaatgatgaacattttatcgaataattctctctgcttttttctaagataccattgtttaagatcctaattatgagtttgaatctataattataactctttgcc

SEQ ID NO: 38422 - protein, 132 aa, Arabidopsis thaliana
  peptide (1)..(132): Ceres Seq. ID no. 12394120
  misc_feature (11)..(132): Pfam Name: No apical meristem (NAM) protein Pfam Description: No apical meristem (NAM) protein
  misc_feature (11)..(132): Homolog of NCBI NO: 15218843 NR Description: jasmonic acid, putative; protein id: At1g65910.1
  misc_feature (9)..(132): Homolog of NCBI NO: 7486659 NR Description: hypothetical protein F8D20.90 - Arabidopsis
  misc_feature (2)..(132): Homolog of NCBI NO: 15238786 NR Description: putative protein; protein id: At5g18300.1
  misc_feature (1)..(132): Homolog of NCBI NO: 18407972 NR Description: Expressed protein
MQAEEIICRVSDEEIIENYLRPKINGETSSIPRYVVELAEELYTVEPWLLPRQTAPILNPGEWFYFGKRNRKYSNLEGVHCKGSWILEDGCIAVLSKETGEEIGGTTRFRYYYRNKGDKESRLKMSNWFMRE

SEQ ID NO: 38423 - DNA, 1504 bp, Arabidopsis thaliana
  misc_feature (1)..(1504): Ceres Seq. ID no. 13592972
  misc_feature: MA Experiment ID: 20001451 Result: Down-regulated in Transcription
  misc_feature: MA Experiment 20001451 PARAMETER Experiment Name: At_Far-red-induction_P Parameter: Age (day) Value: 7
  misc_feature: MA Experiment 20001451 PARAMETER Experiment Name: At_Far-red-induction_P Parameter: Light Value: Far-red vs. White
  misc_feature: MA Experiment 20001451 PARAMETER Experiment Name: At_Far-red-induction_P Parameter: Organism Value: A. thaliana
  misc_feature: MA Experiment 20001451 PARAMETER Experiment Name: At_Far-red-induction_P Parameter: Plant Line Value: Columbia
  misc_feature: MA Experiment 20001451 PARAMETER Experiment Name: At_Far-red-induction_P Parameter: Timepoint (hr) Value: 24
  misc_feature: MA Experiment 20001451 PARAMETER Experiment Name: At_Far-red-induction_P Parameter: Tissue Value: Whole Plant
aagctgaaatctagtttattttttctatttactaaaacctcccaaggaccaaagaacatcgacaaaggaagacgacgaagaagatttcgagcttcgacaaatcatgcggattcttactgctcgcatagctaaccatttttgcagggcacgaaacgcgaatcctcgatctcgaaatttctcctcgtcgaacaagaaagatgaccttacattggaggaagaagctgagaggaaaataggttggtgtctcaaaattttctttgcgggcacagcaacgtatattggataccagtttttcccttacttaggtgataacttaattcatcaatcaatatcgcttttacatgtgaaggatcctttgtttaagagaatgggagcttctcggctttcccgtttcgctattgatgatgaaaggaggatgaaggttgtagagatgggtggggctcaagagctactacatatgttgggaagtgctaaagatgacaagacaaggaaagaagccctaaaggctcttgctgctctctctaaatcaggtgaagctgctaaattcctaggctctaatggagcactctctatcgtcaaatcgactccaaattccttggaagattcagacatttcaacatacaagtcaaacatactcgagaagctagttgagaaaaacctcgctgtctcttccaactgaactacctttttacggacaaggataggtcaagaatcataagagcatgtccattgcagggaccttgcaagttttttaagaaaatccttatgaataatagcaaaaaattaaatcagaatggtgtaataaaccaaggtgcgaaccttgtttaaggtatttttgggtgtattaggtgcgctgacgtggctgtatattattggatgacaacttttcccgtgtttttttttctttcccattcccaaactatttttttctttctctcctctctcctctcctgttttctccgaatttcgacttcgacggatcaaattcttcatcgtctctttttttatcatgtctctcttctcatacgatccacaagattcgtgatcgaagaggtgtcagaaaatccaccggaagagctactcttaccggctttgctgaggtcaacgatgtggcgctgtttttcggtggattggttagaatgttgatgctcataggatcctgcttgtgggttcgtctgctggttgaatttgattgcaagttaaagtctggtgcttttgatctggtaattgcttcttacaagttgatctgtaacaattgatttcgaattcagtatatggatttgtatacagattctgggctttgctttatgttcaaatttgtgtttgatcttttggtttttaagataaaaatgtgactcttttggtgcttattcacttgtatgtcatgttatggtctatgttctctaagtggttttagcttagataacttgtatgtctgttttctttactttaagttcaatatgacttgtatcacttcggctttaatgatattgttgtttaaaag

SEQ ID NO: 38424 - protein, 191 aa, Arabidopsis thaliana
  peptide (1)..(191): Ceres Seq. ID no. 13592973
  misc_feature (89)..(191): Homolog of NCBI NO: 11281187 NR Description: hypothetical protein F18O21.170 - Arabidopsis
  misc_feature (22)..(183): Homolog of NCBI NO: 40538927 NR Description: expressed protein [Oryza sativa (japonica
  misc_feature (1)..(191): Homolog of NCBI NO: 30694398 NR Description: expressed protein [Arabidopsis thaliana]
  misc_feature (89)..(191): Homolog of NCBI NO: 11281187 NR Description: hypothetical protein F18O21.170 - Arabidopsis
  misc_feature (22)..(183): Homolog of NCBI NO: 40538927 NR Description: expressed protein [Oryza sativa (japonica
  misc_feature (1)..(191): Homolog of NCBI NO: 30694398 NR Description: expressed protein [Arabidopsis thaliana]
MRILTARIANHFCRARNANPRSRNFSSSNKKDDLTLEEEAERKIGWCLKIFFAGTATYIGYQFFPYLGDNLIHQSISLLHVKDPLFKRMGASRLSRFAIDDERRMKVVEMGGAQELLHMLGSAKDDKTRKEALKALAALSKSGEAAKFLGSNGALSIVKSTPNSLEDSDISTYKSNILEKLVEKNLAVSSN

SEQ ID NO: 38425 - protein, 103 aa, Arabidopsis thaliana
  peptide (1)..(103): Ceres Seq. ID no. 13592974
  misc_feature (1)..(103): Homolog of NCBI NO: 11281187 NR Description: hypothetical protein F18O21.170 - Arabidopsis
  misc_feature (1)..(95): Homolog of NCBI NO: 40538927 NR Description: expressed protein [Oryza sativa (japonica
  misc_feature (1)..(103): Homolog of NCBI NO: 30694398 NR Description: expressed protein [Arabidopsis thaliana]
  misc_feature (1)..(103): Homolog of NCBI NO: 11281187 NR Description: hypothetical protein F18O21.170 - Arabidopsis
  misc_feature (1)..(95): Homolog of NCBI NO: 40538927 NR Description: expressed protein [Oryza sativa (japonica
  misc_feature (1)..(103): Homolog of NCBI NO: 30694398 NR Description: expressed protein [Arabidopsis thaliana]
MGASRLSRFAIDDERRMKVVEMGGAQELLHMLGSAKDDKTRKEALKALAALSKSGEAAKFLGSNGALSIVKSTPNSLEDSDISTYKSNILEKLVEKNLAVSSN

SEQ ID NO: 38426 - DNA, 904 bp, Arabidopsis thaliana
  misc_feature (1)..(904): Ceres Seq. ID no. 12562653
  misc_feature: MA Experiment ID: 20000436 Result: Up-regulated in Transcription
  misc_feature: MA Experiment 20000436 PARAMETER Experiment Name: At_Drought_P Parameter: Age (day) Value: 7
  misc_feature: MA Experiment 20000436 PARAMETER Experiment Name: At_Drought_P Parameter: Organism Value: A. thaliana
  misc_feature: MA Experiment 20000436 PARAMETER Experiment Name: At_Drought_P Parameter: Plant Line Value: WS
  misc_feature: MA Experiment 20000436 PARAMETER Experiment Name: At_Drought_P Parameter: Timepoint (hr) Value: 12
  misc_feature: MA Experiment 20000436 PARAMETER Experiment Name: At_Drought_P Parameter: Tissue Value: Whole Plant
  misc_feature: MA Experiment 20000436 PARAMETER Experiment Name: At_Drought_P Parameter: Treatment Value: Drought vs. No Drought
  misc_feature: MA Experiment ID: 20000573 Result: Down-regulated in Transcription
  misc_feature: MA Experiment 20000573 PARAMETER Experiment Name: At_100uM_ABA_Mutants__P Parameter: Organism Value: A. thaliana
  misc_feature: MA Experiment 20000573 PARAMETER Experiment Name: At_100uM_ABA_Mutants__P Parameter: Plant Line Value: CS22 vs. Ler wt
  misc_feature: MA Experiment 20000573 PARAMETER Experiment Name: At_100uM_ABA_Mutants__P Parameter: Timepoint (hr) Value: N/A
  misc_feature: MA Experiment 20000573 PARAMETER Experiment Name: At_100uM_ABA_Mutants__P Parameter: Tissue Value: Whole Plant
  misc_feature: MA Experiment 20000573 PARAMETER Experiment Name: At_100uM_ABA_Mutants__P Parameter: Treatment Value: None
  misc_feature: MA Experiment ID: 20001248 Result: Down-regulated in Transcription
  misc_feature: MA Experiment 20001248 PARAMETER Experiment Name: At_Far-red-induction_P Parameter: Age (day) Value: 7
  misc_feature: MA Experiment 20001248 PARAMETER Experiment Name: At_Far-red-induction_P Parameter: Light Value: Far-red vs. White
  misc_feature: MA Experiment 20001248 PARAMETER Experiment Name: At_Far-red-induction_P Parameter: Organism Value: A. thaliana
  misc_feature: MA Experiment 20001248 PARAMETER Experiment Name: At_Far-red-induction_P Parameter: Plant Line Value: Columbia
  misc_feature: MA Experiment 20001248 PARAMETER Experiment Name: At_Far-red-induction_P Parameter: Timepoint (hr) Value: 4
  misc_feature: MA Experiment 20001248 PARAMETER Experiment Name: At_Far-red-induction_P Parameter: Tissue Value: Whole Plant
  misc_feature: MA Experiment ID: 20001557 Result: Down-regulated in Transcription
  misc_feature: MA Experiment 20001557 PARAMETER Experiment Name: At_Drought_Soil_Dry_P Parameter: Age (day) Value: 27
  misc_feature: MA Experiment 20001557 PARAMETER Experiment Name: At_Drought_Soil_Dry_P Parameter: Organism Value: A. thaliana
  misc_feature: MA Experiment 20001557 PARAMETER Experiment Name: At_Drought_Soil_Dry_P Parameter: Plant Line Value: WS
  misc_feature: MA Experiment 20001557 PARAMETER Experiment Name: At_Drought_Soil_Dry_P Parameter: Post Timepoint (hr) Value: 3
  misc_feature: MA Experiment 20001557 PARAMETER Experiment Name: At_Drought_Soil_Dry_P Parameter: Post-Treatment Value: Re-Water vs. No Drought
  misc_feature: MA Experiment 20001557 PARAMETER Experiment Name: At_Drought_Soil_Dry_P Parameter: Timepoint (day) Value: 13
  misc_feature: MA Experiment 20001557 PARAMETER Experiment Name: At_Drought_Soil_Dry_P Parameter: Treatment Value: Drought vs. No Drought
  misc_feature: MA Experiment ID: 20001558 Result: Down-regulated in Transcription
  misc_feature: MA Experiment 20001558 PARAMETER Experiment Name: At_Drought_Soil_Dry_P Parameter: Age (day) Value: 27
  misc_feature: MA Experiment 20001558 PARAMETER Experiment Name: At_Drought_Soil_Dry_P Parameter: Organism Value: A. thaliana
  misc_feature: MA Experiment 20001558 PARAMETER Experiment Name: At_Drought_Soil_Dry_P Parameter: Plant Line Value: WS
  misc_feature: MA Experiment 20001558 PARAMETER Experiment Name: At_Drought_Soil_Dry_P Parameter: Post Timepoint (hr) Value: 6
  misc_feature: MA Experiment 20001558 PARAMETER Experiment Name: At_Drought_Soil_Dry_P Parameter: Post-Treatment Value: Re-Water vs. No Drought
  misc_feature: MA Experiment 20001558 PARAMETER Experiment Name: At_Drought_Soil_Dry_P Parameter: Timepoint (day) Value: 13
  misc_feature: MA Experiment 20001558 PARAMETER Experiment Name: At_Drought_Soil_Dry_P Parameter: Treatment Value: Drought vs. No Drought
  misc_feature: MA Experiment ID: 20001911 Result: Up-regulated in Transcription
  misc_feature: MA Experiment 20001911 PARAMETER Experiment Name: At_Drought_Reproduction_P Parameter: Age (day) Value: 40
  misc_feature: MA Experiment 20001911 PARAMETER Experiment Name: At_Drought_Reproduction_P Parameter: Organism Value: A. thaliana
  misc_feature: MA Experiment 20001911 PARAMETER Experiment Name: At_Drought_Reproduction_P Parameter: Plant Line Value: WS
  misc_feature: MA Experiment 20001911 PARAMETER Experiment Name: At_Drought_Reproduction_P Parameter: Timepoint (day) Value: 10
  misc_feature: MA Experiment 20001911 PARAMETER Experiment Name: At_Drought_Reproduction_P Parameter: Tissue Value: Flowers
  misc_feature: MA Experiment 20001911 PARAMETER Experiment Name: At_Drought_Reproduction_P Parameter: Treatment Value: Drought vs. No Drought
atgaagaactaatgatatatacaaacaattcttaatacataaaaatcttctacaaatattgatttaagaagctctaaaatcatacaagtcatggatgaagaagcagcgattgatcgtttaccattagaccttcttgcatatatattttcgttggctacttctttcaccgttttggcccaggcaagtggtgtttgcaagaaatggagaaaagctgtaaatcaatcgatggcgagaagagaaactctgagctttgctggttggaaaatggacgatgattccacttctcgtctcgttcatcttgctttcaacctcaaagaactcgacatatctcgaagcagatggggttgtcatataactgataatggtctttaccaaatagcttctgcaagatgtgtatccaatttaaactctgtctctttatggggcatgaccgccattactgattctggtgttgttcaactgatttcaagaacttcctcactgcaacacctaaacataggaggaacatttataaccgatgagtctcttttcgcaattgcagaacgctgccatcagcttaagacaatcggaatgtggtgttgccgtcatgtgacagagagaggccttcttgttcttgtaaacaaatgcagaaaactcgaatccatcaacttatggggaactagagttcctgtagattgcttcattgctttacttaccatcagtcctgctcttcagatcaaacccatggaattgcttctcaatgctcagaatccaccaccgttgctgcatgctgtctagtgttgctcatcatatttcttgtttgttgtgtacatagtaattcatacaattgaatctgcatatatcttatgtgttctctcatcaatcaacaacatatatatataaatattcagtaaagtttctattg

SEQ ID NO: 38427 - protein, 228 aa, Arabidopsis thaliana
  peptide (1)..(228): Ceres Seq. ID no. 12562654
  misc_feature (58)..(189): Homolog of NCBI NO: 21554029 NR Description: F-box protein AtFBL5 [Arabidopsis thaliana]
  misc_feature (58)..(189): Homolog of NCBI NO: 18394987 NR Description: F-box protein family
  misc_feature (44)..(208): Homolog of NCBI NO: 34907434 NR Description: P0018C10.44 [Oryza sativa (japonica
  misc_feature (52)..(189): Homolog of NCBI NO: 15450960 NR Description: putative protein [Arabidopsis thaliana]
  misc_feature (7)..(208): Homolog of NCBI NO: 6456110 NR Description: F-box protein FBX13 [Mus musculus]
  misc_feature (52)..(189): Homolog of NCBI NO: 18410977 NR Description: putative protein
  misc_feature (88)..(215): Homolog of NCBI NO: 15237286 NR Description: putative protein
  misc_feature (156)..(222): Homolog of NCBI NO: 34898376 NR Description: Hypothetical protein [Oryza sativa (japonica
  misc_feature (2)..(128): Homolog of NCBI NO: 34898378 NR Description: Hypothetical protein [Oryza sativa (japonica
  misc_feature (1)..(228): Homolog of NCBI NO: 15240225 NR Description: F-box protein family
MDEEAAIDRLPLDLLAYIFSLATSFTVLAQASGVCKKWRKAVNQSMARRETLSFAGWKMDDDSTSRLVHLAFNLKELDISRSRWGCHITDNGLYQIASARCVSNLNSVSLWGMTAITDSGVVQLISRTSSLQHLNIGGTFITDESLFAIAERCHQLKTIGMWCCRHVTERGLLVLVNKCRKLESINLWGTRVPVDCFIALLTISPALQIKPMELLLNAQNPPPLLHAV

SEQ ID NO: 38428 - protein, 183 aa, Arabidopsis thaliana
  peptide (1)..(183): Ceres Seq. ID no. 12562655
  misc_feature (13)..(144): Homolog of NCBI NO: 21554029 NR Description: F-box protein AtFBL5 [Arabidopsis thaliana]
  misc_feature (13)..(144): Homolog of NCBI NO: 18394987 NR Description: F-box protein family
  misc_feature (1)..(163): Homolog of NCBI NO: 34907434 NR Description: P0018C10.44 [Oryza sativa (japonica
  misc_feature (7)..(144): Homolog of NCBI NO: 15450960 NR Description: putative protein [Arabidopsis thaliana]
  misc_feature (1)..(163): Homolog of NCBI NO: 6456110 NR Description: F-box protein FBX13 [Mus musculus]
  misc_feature (7)..(144): Homolog of NCBI NO: 18410977 NR Description: putative protein
  misc_feature (43)..(170): Homolog of NCBI NO: 15237286 NR Description: putative protein
  misc_feature (111)..(177): Homolog of NCBI NO: 34898376 NR Description: Hypothetical protein [Oryza sativa (japonica
  misc_feature (1)..(83): Homolog of NCBI NO: 34898378 NR Description: Hypothetical protein [Oryza sativa (japonica
  misc_feature (1)..(183): Homolog of NCBI NO: 15240225 NR Description: F-box protein family
MARRETLSFAGWKMDDDSTSRLVHLAFNLKELDISRSRWGCHITDNGLYQIASARCVSNLNSVSLWGMTAITDSGVVQLISRTSSLQHLNIGGTFITDESLFAIAERCHQLKTIGMWCCRHVTERGLLVLVNKCRKLESINLWGTRVPVDCFIALLTISPALQIKPMELLLNAQNPPPLLHAV

SEQ ID NO: 38429 - protein, 170 aa, Arabidopsis thaliana
  peptide (1)..(170): Ceres Seq. ID no. 12562656
  misc_feature (1)..(131): Homolog of NCBI NO: 21554029 NR Description: F-box protein AtFBL5 [Arabidopsis thaliana]
  misc_feature (1)..(131): Homolog of NCBI NO: 18394987 NR Description: F-box protein family
  misc_feature (1)..(150): Homolog of NCBI NO: 34907434 NR Description: P0018C10.44 [Oryza sativa (japonica
  misc_feature (1)..(131): Homolog of NCBI NO: 15450960 NR Description: putative protein [Arabidopsis thaliana]
  misc_feature (1)..(150): Homolog of NCBI NO: 6456110 NR Description: F-box protein FBX13 [Mus musculus]
  misc_feature (1)..(131): Homolog of NCBI NO: 18410977 NR Description: putative protein
  misc_feature (30)..(157): Homolog of NCBI NO: 15237286 NR Description: putative protein
  misc_feature (98)..(164): Homolog of NCBI NO: 34898376 NR Description: Hypothetical protein [Oryza sativa (japonica
  misc_feature (1)..(70): Homolog of NCBI NO: 34898378 NR Description: Hypothetical protein [Oryza sativa (japonica
  misc_feature (1)..(170): Homolog of NCBI NO: 15240225 NR Description: F-box protein family
MDDDSTSRLVHLAFNLKELDISRSRWGCHITDNGLYQIASARCVSNLNSVSLWGMTAITDSGVVQLISRTSSLQHLNIGGTFITDESLFAIAERCHQLKTIGMWCCRHVTERGLLVLVNKCRKLESINLWGTRVPVDCFIALLTISPALQIKPMELLLNAQNPPPLLHAV

SEQ ID NO: 38430 - DNA, 911 bp, Arabidopsis thaliana
  misc_feature (1)..(911): Ceres Seq. ID no. 13574943
  misc_feature: MA Experiment ID: 20000180 Result: Up-regulated in Transcription
  misc_feature: MA Experiment 20000180 PARAMETER Experiment Name: At_Germinating_Seeds_P Parameter: Age (hr) Value: 24 vs. 0
  misc_feature: MA Experiment 20000180 PARAMETER Experiment Name: At_Germinating_Seeds_P Parameter: Tissue Value: Germinating Seeds
  misc_feature: MA Experiment ID: 20000184 Result: Up-regulated in Transcription
  misc_feature: MA Experiment 20000184 PARAMETER Experiment Name: At_Shoots__P Parameter: Age (day) Value: 7
  misc_feature: MA Experiment 20000184 PARAMETER Experiment Name: At_Shoots__P Parameter: Tissue Value: Shoots vs. Whole Plant
  misc_feature: MA Experiment ID: 20000185 Result: Up-regulated in Transcription
  misc_feature: MA Experiment 20000185 PARAMETER Experiment Name: At_Roots__P Parameter: Age (day) Value: 7 vs. 21
  misc_feature: MA Experiment 20000185 PARAMETER Experiment Name: At_Roots__P Parameter: Organism Value: A. thaliana
  misc_feature: MA Experiment 20000185 PARAMETER Experiment Name: At_Roots__P Parameter: Tissue Value: Roots vs. Whole Plant
  misc_feature: MA Experiment ID: 20000269 Result: Up-regulated in Transcription
  misc_feature: MA Experiment 20000269 PARAMETER Experiment Name: At_1mM_KNO3_L-vs-H_Roots_P Parameter: Age (day) Value: 7,10,12
  misc_feature: MA Experiment 20000269 PARAMETER Experiment Name: At_1mM_KNO3_L-vs-H_Roots_P Parameter: Organism Value: A. thaliana
  misc_feature: MA Experiment 20000269 PARAMETER Experiment Name: At_1mM_KNO3_L-vs-H_Roots_P Parameter: Plant Line Value: WS
  misc_feature: MA Experiment 20000269 PARAMETER Experiment Name: At_1mM_KNO3_L-vs-H_Roots_P Parameter: Timepoint (day) Value: 7,10,12
  misc_feature: MA Experiment 20000269 PARAMETER Experiment Name: At_1mM_KNO3_L-vs-H_Roots_P Parameter: Tissue Value: Roots
  misc_feature: MA Experiment 20000269 PARAMETER Experiment Name: At_1mM_KNO3_L-vs-H_Roots_P Parameter: Treatment Value: 1mM KNO3 vs. 50mM KNO3
  misc_feature: MA Experiment ID: 20000439 Result: Up-regulated in Transcription
  misc_feature: MA Experiment 20000439 PARAMETER Experiment Name: At_Roots__P Parameter: Age (day) Value: 14 vs. 21
  misc_feature: MA Experiment 20000439 PARAMETER Experiment Name: At_Roots__P Parameter: Organism Value: A. thaliana
  misc_feature: MA Experiment 20000439 PARAMETER Experiment Name: At_Roots__P Parameter: Tissue Value: Roots vs. Whole Plant
  misc_feature: MA Experiment ID: 20000527 Result: Down-regulated in Transcription
  misc_feature: MA Experiment 20000527 PARAMETER Experiment Name: At_10percent_PEG_P Parameter: Age (day) Value: 20
  misc_feature: MA Experiment 20000527 PARAMETER Experiment Name: At_10percent_PEG_P Parameter: Organism Value: A. thaliana
  misc_feature: MA Experiment 20000527 PARAMETER Experiment Name: At_10percent_PEG_P Parameter: Plant Line Value: WS
  misc_feature: MA Experiment 20000527 PARAMETER Experiment Name: At_10percent_PEG_P Parameter: Timepoint (day) Value: 20
  misc_feature: MA Experiment 20000527 PARAMETER Experiment Name: At_10percent_PEG_P Parameter: Tissue Value: Whole Plant
  misc_feature: MA Experiment 20000527 PARAMETER Experiment Name: At_10percent_PEG_P Parameter: Treatment Value: 10percent PEG vs. No Treatment
  misc_feature: MA Experiment ID: 20001557 Result: Up-regulated in Transcription
  misc_feature: MA Experiment 20001557 PARAMETER Experiment Name: At_Drought_Soil_Dry_P Parameter: Age (day) Value: 27
  misc_feature: MA Experiment 20001557 PARAMETER Experiment Name: At_Drought_Soil_Dry_P Parameter: Organism Value: A. thaliana
  misc_feature: MA Experiment 20001557 PARAMETER Experiment Name: At_Drought_Soil_Dry_P Parameter: Plant Line Value: WS
  misc_feature: MA Experiment 20001557 PARAMETER Experiment Name: At_Drought_Soil_Dry_P Parameter: Post Timepoint (hr) Value: 3
  misc_feature: MA Experiment 20001557 PARAMETER Experiment Name: At_Drought_Soil_Dry_P Parameter: Post-Treatment Value: Re-Water vs. No Drought
  misc_feature: MA Experiment 20001557 PARAMETER Experiment Name: At_Drought_Soil_Dry_P Parameter: Timepoint (day) Value: 13
  misc_feature: MA Experiment 20001557 PARAMETER Experiment Name: At_Drought_Soil_Dry_P Parameter: Treatment Value: Drought vs. No Drought
ccacgcgtccgctttatctatcttcgtacattatatataatgggatcaaccgtggccgccgctctcctcctcttcctagcggcagtccctgccgtctttgccgcaactttcaaggtcggcgatatttctggctggaccagtaatcttgattacacggtttggctcactggaaagactttcagagtcggtgacactctagagttcgtatatggtctttcacactcggtgtccgtggtggataaagctggctacgataactgcgacagtagcggagccacacagaactttgccgatggagacactaagatcgatcttaccacagttggaacaatgcacttcctttgccctacttttggtcactgcaagaacggcatgaaactcgccgttcctgtcctcgccgccgctccatctccttcgactccttcttcgcctccctccactccttcgactccttcttccccgccctccactccgtctaccccttcttcgcccccctcccctccttcgcctccttctccatcgctcccccctagctctctgcctccatctgcatctccgccgaccaatggcacgccggattcagagacattgacgcctccgccagctccattgccgccttcgctgtctccaaacgcggcatctaagggagtcatgagctatggaataattggagtcacgatgatattgatgtacgctgttatgacctaaataacagggtggaaacagagcattgttttgctccatgtcttttttggtcggcggcctttggaaatactacaccactacgtgctcttttgtgtgtaacggaatttttttgccattgacaatttttccttcttccttctttttttaattacttgtaggggttgataaacgttatagccatctccaagctattttatcttattctt

SEQ ID NO: 38431 - protein, 235 aa, Arabidopsis thaliana
  peptide (1)..(235): Ceres Seq. ID no. 13574944
  misc_feature (45)..(125): Pfam Name: Plastocyanin-like domain Pfam Description: Plastocyanin-like domain
  misc_feature (17)..(185): Homolog of NCBI NO: 15241298 NR Description: plastocyanin-like domain containing protein
  misc_feature (13)..(214): Homolog of NCBI NO: 15238868 NR Description: hypothetical protein [Arabidopsis thaliana]
  misc_feature (14)..(135): Homolog of NCBI NO: 25282796 NR Description: uclacyanin II [imported] - Arabidopsis thaliana
  misc_feature (13)..(179): Homolog of NCBI NO: 14140127 NR Description: uclacyanin 3-like protein [Oryza sativa]
  misc_feature (14)..(190): Homolog of NCBI NO: 25453521 NR Description: blue copper-binding protein II [imported] -
  misc_feature (14)..(190): Homolog of NCBI NO: 21554060 NR Description: phytocyanin [Arabidopsis thaliana]
  misc_feature (14)..(190): Homolog of NCBI NO: 15224960 NR Description: uclacyanin II [Arabidopsis thaliana]
  misc_feature (14)..(190): Homolog of NCBI NO: 25453522 NR Description: blue copper-binding protein II [imported] -
  misc_feature (14)..(167): Homolog of NCBI NO: 15232287 NR Description: plastocyanin-like domain containing protein
  misc_feature (14)..(235): Homolog of NCBI NO: 15232289 NR Description: uclacyanin 3 [Arabidopsis thaliana]
PRVRFIYLRTLYIMGSTVAAALLLFLAAVPAVFAATFKVGDISGWTSNLDYTVWLTGKTFRVGDTLEFVYGLSHSVSVVDKAGYDNCDSSGATQNFADGDTKIDLTTVGTMHFLCPTFGHCKNGMKLAVPVLAAAPSPSTPSSPPSTPSTPSSPPSTPSTPSSPPSPPSPPSPSLPPSSLPPSASPPTNGTPDSETLTPPPAPLPPSLSPNAASKGVMSYGIIGVTMILMYAVMT

SEQ ID NO: 38432 - protein, 222 aa, Arabidopsis thaliana
  peptide (1)..(222): Ceres Seq. ID no. 13574945
  misc_feature (32)..(112): Pfam Name: Plastocyanin-like domain Pfam Description: Plastocyanin-like domain
  misc_feature (4)..(172): Homolog of NCBI NO: 15241298 NR Description: plastocyanin-like domain containing protein
  misc_feature (1)..(201): Homolog of NCBI NO: 15238868 NR Description: hypothetical protein [Arabidopsis thaliana]
  misc_feature (1)..(122): Homolog of NCBI NO: 25282796 NR Description: uclacyanin II [imported] - Arabidopsis thaliana
  misc_feature (1)..(166): Homolog of NCBI NO: 14140127 NR Description: uclacyanin 3-like protein [Oryza sativa]
  misc_feature (1)..(177): Homolog of NCBI NO: 25453521 NR Description: blue copper-binding protein II [imported] -
  misc_feature (1)..(177): Homolog of NCBI NO: 21554060 NR Description: phytocyanin [Arabidopsis thaliana]
  misc_feature (1)..(177): Homolog of NCBI NO: 15224960 NR Description: uclacyanin II [Arabidopsis thaliana]
  misc_feature (1)..(177): Homolog of NCBI NO: 25453522 NR Description: blue copper-binding protein II [imported] -
  misc_feature (1)..(154): Homolog of NCBI NO: 15232287 NR Description: plastocyanin-like domain containing protein
  misc_feature (1)..(222): Homolog of NCBI NO: 15232289 NR Description: uclacyanin 3 [Arabidopsis thaliana]
MGSTVAAALLLFLAAVPAVFAATFKVGDISGWTSNLDYTVWLTGKTFRVGDTLEFVYGLSHSVSVVDKAGYDNCDSSGATQNFADGDTKIDLTTVGTMHFLCPTFGHCKNGMKLAVPVLAAAPSPSTPSSPPSTPSTPSSPPSTPSTPSSPPSPPSPPSPSLPPSSLPPSASPPTNGTPDSETLTPPPAPLPPSLSPNAASKGVMSYGIIGVTMILMYAVMT

SEQ ID NO: 38433 - protein, 125 aa, Arabidopsis thaliana
  peptide (1)..(125): Ceres Seq. ID no. 13574946
  misc_feature (20)..(93): Pfam Name: Extensin-like region Pfam Description: Extensin-like region
  misc_feature (1)..(75): Homolog of NCBI NO: 15241298 NR Description: plastocyanin-like domain containing protein
  misc_feature (1)..(104): Homolog of NCBI NO: 15238868 NR Description: hypothetical protein [Arabidopsis thaliana]
  misc_feature (1)..(25): Homolog of NCBI NO: 25282796 NR Description: uclacyanin II [imported] - Arabidopsis thaliana
  misc_feature (1)..(69): Homolog of NCBI NO: 14140127 NR Description: uclacyanin 3-like protein [Oryza sativa]
  misc_feature (1)..(80): Homolog of NCBI NO: 25453521 NR Description: blue copper-binding protein II [imported] -
  misc_feature (1)..(80): Homolog of NCBI NO: 21554060 NR Description: phytocyanin [Arabidopsis thaliana]
  misc_feature (1)..(80): Homolog of NCBI NO: 15224960 NR Description: uclacyanin II [Arabidopsis thaliana]
  misc_feature (1)..(80): Homolog of NCBI NO: 25453522 NR Description: blue copper-binding protein II [imported] -
  misc_feature (1)..(57): Homolog of NCBI NO: 15232287 NR Description: plastocyanin-like domain containing protein
  misc_feature (1)..(125): Homolog of NCBI NO: 15232289 NR Description: uclacyanin 3 [Arabidopsis thaliana]
MHFLCPTFGHCKNGMKLAVPVLAAAPSPSTPSSPPSTPSTPSSPPSTPSTPSSPPSPPSPPSPSLPPSSLPPSASPPTNGTPDSETLTPPPAPLPPSLSPNAASKGVMSYGIIGVTMILMYAVMT

SEQ ID NO: 38434 - DNA, 1622 bp, Arabidopsis thaliana
  misc_feature (1)..(1622): Ceres Seq. ID no. 12738553
  misc_feature: MA Experiment ID: 108434 Result: Down-regulated in Transcription
  misc_feature: MA Experiment 108434 PARAMETER Experiment Name: At_Root_Tips_cDNA_P Parameter: Tissue Value: Root Tips
  misc_feature: MA Experiment ID: 108464 Result: Up-regulated in Transcription
  misc_feature: MA Experiment 108464 PARAMETER Experiment Name: At_Germinating_Seeds_cDNA_P Parameter: Age (day) Value: 4 vs. 0
  misc_feature: MA Experiment 108464 PARAMETER Experiment Name: At_Germinating_Seeds_cDNA_P Parameter: Tissue Value: Germinating Seeds
  misc_feature: MA Experiment ID: 108469 Result: Up-regulated in Transcription
  misc_feature: MA Experiment ID: 108488 Result: Down-regulated in Transcription
  misc_feature: MA Experiment ID: 108489 Result: Up-regulated in Transcription
  misc_feature: MA Experiment ID: 108573 Result: Up-regulated in Transcription
  misc_feature: MA Experiment 108573 PARAMETER Experiment Name: At_Drought_cDNA_P Parameter: Timepoint (hr) Value: 6
  misc_feature: MA Experiment 108573 PARAMETER Experiment Name: At_Drought_cDNA_P Parameter: Tissue Value: Aerial
  misc_feature: MA Experiment 108573 PARAMETER Experiment Name: At_Drought_cDNA_P Parameter: Treatment Value: Drought vs. No Drought
  misc_feature: MA Experiment ID: 108574 Result: Up-regulated in Transcription
  misc_feature: MA Experiment 108574 PARAMETER Experiment Name: At_Wounding__cDNA_P Parameter: Timepoint (hr) Value: 1
  misc_feature: MA Experiment 108574 PARAMETER Experiment Name: At_Wounding__cDNA_P Parameter: Tissue Value: Aerial
  misc_feature: MA Experiment 108574 PARAMETER Experiment Name: At_Wounding__cDNA_P Parameter: Treatment Value: Wounding vs. No Wounding
  misc_feature: MA Experiment ID: 108595 Result: Up-regulated in Transcription
  misc_feature: MA Experiment 108595 PARAMETER Experiment Name: At_Ler-pi_Ovule_cDNA_P Parameter: Plant Line Value: null
  misc_feature: MA Experiment ID: 108667 Result: Up-regulated in Transcription
  misc_feature: MA Experiment 108667 PARAMETER Experiment Name: At_2mM_SA_cDNA_P Parameter: Plant Line Value: WS
  misc_feature: MA Experiment 108667 PARAMETER Experiment Name: At_2mM_SA_cDNA_P Parameter: Timepoint (hr) Value: 1
  misc_feature: MA Experiment 108667 PARAMETER Experiment Name: At_2mM_SA_cDNA_P Parameter: Treatment Value: 2mM SA vs. No Treatment
  misc_feature: MA Experiment ID: 20000314 Result: Down-regulated in Transcription
  misc_feature: MA Experiment 20000314 PARAMETER Experiment Name: At_14day_Shoots-Roots_Sub_P Parameter: Age (day) Value: 14
  misc_feature: MA Experiment 20000314 PARAMETER Experiment Name: At_14day_Shoots-Roots_Sub_P Parameter: Organism Value: A. thaliana
  misc_feature: MA Experiment 20000314 PARAMETER Experiment Name: At_14day_Shoots-Roots_Sub_P Parameter: Plant Line Value: WS
  misc_feature: MA Experiment 20000314 PARAMETER Experiment Name: At_14day_Shoots-Roots_Sub_P Parameter: Tissue Value: Roots vs. Whole Plant
  misc_feature: MA Experiment ID: 20000329 Result: Up-regulated in Transcription
  misc_feature: MA Experiment 20000329 PARAMETER Experiment Name: At_4deg_Cold_Sub_P Parameter: Age (day) Value: 14
  misc_feature: MA Experiment 20000329 PARAMETER Experiment Name: At_4deg_Cold_Sub_P Parameter: Organism Value: A. thaliana
  misc_feature: MA Experiment 20000329 PARAMETER Experiment Name: At_4deg_Cold_Sub_P Parameter: Plant Line Value: WS
  misc_feature: MA Experiment 20000329 PARAMETER Experiment Name: At_4deg_Cold_Sub_P Parameter: Temperature (deg C) Value: 4 vs. 22
  misc_feature: MA Experiment 20000329 PARAMETER Experiment Name: At_4deg_Cold_Sub_P Parameter: Timepoint (hr) Value: 6
  misc_feature: MA Experiment 20000329 PARAMETER Experiment Name: At_4deg_Cold_Sub_P Parameter: Tissue Value: Aerial
ttcaaaggataaatacgcatggcttcgcgatgacgagttcgcacgccaagctatagctgggatcaacccggtcaacatagaacgagtcacgtcttatccaccggtcagcaatcttgaccctgaaatctacggaccaggtcttcactccgctctcacggaagaccacatcatcggtcaacttgatggcttaaccgtacaacaagcgttagagatgaaccgtttgtttatggtggactaccatgacatatacttaccgtttctagatagaatcaacgcgcttgatggacgcaaggcttacgcgactcgaaccatattgttcttgacccgactcggtacactcaagcctatcgccatcgagctaagcctcccttctcaatcaagctcaaaccaaaagtccaagcgcgtggtcacacctccagtagacgcaacctccaactggatgtggcagctagccaaggcccacgttgggtccaatgacgctggtgtccaccagcttgtgaatcattggttacgtactcatgcgtgtttggaaccgtttatattagctgctcatagacaattaagcgcaatgcatccgatattcaaattattagaccctcacatgaggtacactttggagatcaatgccgtggcacgacagactttgattagtgcggacggtgtgatcgagtcgtgcttcactgctggtcaatacggtctagagattagttccgctgcgtataagaacaaatggcggtttgatatggaaggtctccctgctgatctcatccgaagggggatggctgttccagacccaacacaaccacatgggcttaaattacttgttgaagactacccatgccaacgacggtctcttattatggtccgcaatccaaacttgggtccgaacctacgtggaacgttattacgcaaactcgaacctaatccaaaccgatactgagctccaagcctggtactctgagtcaatcaacgtaggtcacgctgatcaccgcgacgccgagtggtggccgaagctttccaccgtcgaagatctcgtctccgtcatcaccaccatcatctggctcgcctccgcacaacacgcggcactcaacttcggacaatatccttacggtggctacgtcccgaaccgaccaccgctaatgcgtcggttgattcccgacgagtcagatcccgagttcacgagttttatcgaagatcctcaaaagtattttttctcgtcgatgccgagtttattgcaaacgacgaagtttatggcggtggttgatacattgtcgacacattcgccggatgaggagtatatcggagagagacaacaaccgtcgatatggactggagatgctgagatcgtagatgcgttttatggattctcggcggaaatcggacggatagagaaggagattgacaagaggaatcgtgatcctagctgtaggaatcgctgtggcgcgggagtgttaccgtatgagttgatggctccgagttctgaaccgggtgttacgtgtagaggagtgcctaatagtgtatctatttagaattattcaatttttcaaagtatagagaattttataagtatataattagattttgacgcagtatggtttatttgccgatattgtaaaattctt

SEQ ID NO: 38435 - protein, 312 aa, Arabidopsis thaliana
  peptide (1)..(312): Ceres Seq. ID no. 12738554
  misc_feature (1)..(287): Pfam Name: Lipoxygenase Pfam Description: Lipoxygenase
  misc_feature (1)..(279): Homolog of NCBI NO: 7433165 NR Description: lipoxygenase (EC 1.13.11.12) loxD - tomato
  misc_feature (1)..(279): Homolog of NCBI NO: 7433167 NR Description: probable lipoxygenase (EC 1.13.11.12) (clone H3)
  misc_feature (1)..(287): Homolog of NCBI NO: 14589309 NR Description: lipoxygenase [Sesbania rostrata]
  misc_feature (1)..(279): Homolog of NCBI NO: 28911945 NR Description: lipoxygenase [Nicotiana attenuata]
  misc_feature (1)..(279): Homolog of NCBI NO: 32454714 NR Description: lipoxygenase [Nicotiana attenuata]
  misc_feature (1)..(310): Homolog of NCBI NO: 18394479 NR Description: lipoxygenase
  misc_feature (1)..(310): Homolog of NCBI NO: 9665131 NR Description: lipoxygenase [Arabidopsis thaliana]
  misc_feature (1)..(310): Homolog of NCBI NO: 6002055 NR Description: lipoxygenase [Arabidopsis thaliana]
  misc_feature (1)..(287): Homolog of NCBI NO: 15218506 NR Description: putative lipoxygenase
  misc_feature (1)..(287): Homolog of NCBI NO: 12323766 NR Description: putative lipoxygenase, 5' partial; 101105-97928
SKDKYAWLRDDEFARQAIAGINPVNIERVTSYPPVSNLDPEIYGPGLHSALTEDHIIGQLDGLTVQQALEMNRLFMVDYHDIYLPFLDRINALDGRKAYATRTILFLTRLGTLKPIAIELSLPSQSSSNQKSKRVVTPPVDATSNWMWQLAKAHVGSNDAGVHQLVNHWLRTHACLEPFILAAHRQLSAMHPIFKLLDPHMRYTLEINAVARQTLISADGVIESCFTAGQYGLEISSAAYKNKWRFDMEGLPADLIRRGMAVPDPTQPHGLKLLVEDYPCQRRSLIMVRNPNLGPNLRGTLLRKLEPNPNRY

SEQ ID NO: 38436 - protein, 242 aa, Arabidopsis thaliana
  peptide (1)..(242): Ceres Seq. ID no. 12738555
  misc_feature (1)..(217): Pfam Name: Lipoxygenase Pfam Description: Lipoxygenase
  misc_feature (1)..(209): Homolog of NCBI NO: 7433165 NR Description: lipoxygenase (EC 1.13.11.12) loxD - tomato
  misc_feature (1)..(209): Homolog of NCBI NO: 7433167 NR Description: probable lipoxygenase (EC 1.13.11.12) (clone H3)
  misc_feature (1)..(217): Homolog of NCBI NO: 14589309 NR Description: lipoxygenase [Sesbania rostrata]
  misc_feature (1)..(209): Homolog of NCBI NO: 28911945 NR Description: lipoxygenase [Nicotiana attenuata]
  misc_feature (1)..(209): Homolog of NCBI NO: 32454714 NR Description: lipoxygenase [Nicotiana attenuata]
  misc_feature (1)..(240): Homolog of NCBI NO: 18394479 NR Description: lipoxygenase
  misc_feature (1)..(240): Homolog of NCBI NO: 9665131 NR Description: lipoxygenase [Arabidopsis thaliana]
  misc_feature (1)..(240): Homolog of NCBI NO: 6002055 NR Description: lipoxygenase [Arabidopsis thaliana]
  misc_feature (1)..(217): Homolog of NCBI NO: 15218506 NR Description: putative lipoxygenase
  misc_feature (1)..(217): Homolog of NCBI NO: 12323766 NR Description: putative lipoxygenase, 5' partial; 101105-97928
MNRLFMVDYHDIYLPFLDRINALDGRKAYATRTILFLTRLGTLKPIAIELSLPSQSSSNQKSKRVVTPPVDATSNWMWQLAKAHVGSNDAGVHQLVNHWLRTHACLEPFILAAHRQLSAMHPIFKLLDPHMRYTLEINAVARQTLISADGVIESCFTAGQYGLEISSAAYKNKWRFDMEGLPADLIRRGMAVPDPTQPHGLKLLVEDYPCQRRSLIMVRNPNLGPNLRGTLLRKLEPNPNRY

SEQ ID NO: 38437 - protein, 240 aa, Arabidopsis thaliana
  peptide (1)..(240): Ceres Seq. ID no. 12738556
  misc_feature (2)..(224): Pfam Name: Lipoxygenase Pfam Description: Lipoxygenase
  misc_feature (2)..(240): Homolog of NCBI NO: 7433165 NR Description: lipoxygenase (EC 1.13.11.12) loxD - tomato
  misc_feature (2)..(240): Homolog of NCBI NO: 7433167 NR Description: probable lipoxygenase (EC 1.13.11.12) (clone H3)
  misc_feature (2)..(239): Homolog of NCBI NO: 14589309 NR Description: lipoxygenase [Sesbania rostrata]
  misc_feature (2)..(231): Homolog of NCBI NO: 28911945 NR Description: lipoxygenase [Nicotiana attenuata]
  misc_feature (2)..(240): Homolog of NCBI NO: 32454714 NR Description: lipoxygenase [Nicotiana attenuata]
  misc_feature (2)..(240): Homolog of NCBI NO: 18394479 NR Description: lipoxygenase
  misc_feature (2)..(240): Homolog of NCBI NO: 9665131 NR Description: lipoxygenase [Arabidopsis thaliana]
  misc_feature (2)..(240): Homolog of NCBI NO: 6002055 NR Description: lipoxygenase [Arabidopsis thaliana]
  misc_feature (2)..(240): Homolog of NCBI NO: 15218506 NR Description: putative lipoxygenase
  misc_feature (2)..(240): Homolog of NCBI NO: 12323766 NR Description: putative lipoxygenase, 5' partial; 101105-97928
MGLNYLLKTTHANDGLLLWSAIQTWVRTYVERYYANSNLIQTDTELQAWYSESINVGHADHRDAEWWPKLSTVEDLVSVITTIIWLASAQHAALNFGQYPYGGYVPNRPPLMRRLIPDESDPEFTSFIEDPQKYFFSSMPSLLQTTKFMAVVDTLSTHSPDEEYIGERQQPSIWTGDAEIVDAFYGFSAEIGRIEKEIDKRNRDPSCRNRCGAGVLPYELMAPSSEPGVTCRGVPNSVSI

SEQ ID NO: 38438 - DNA, 1336 bp, Arabidopsis thaliana
  misc_feature (1)..(1336): Ceres Seq. ID no. 12329843
  misc_feature: MA Experiment ID: 108464 Result: Down-regulated in Transcription
  misc_feature: MA Experiment 108464 PARAMETER Experiment Name: At_Germinating_Seeds_cDNA_P Parameter: Age (day) Value: 4 vs. 0
  misc_feature: MA Experiment 108464 PARAMETER Experiment Name: At_Germinating_Seeds_cDNA_P Parameter: Tissue Value: Germinating Seeds
  misc_feature: MA Experiment ID: 108595 Result: Up-regulated in Transcription
  misc_feature: MA Experiment 108595 PARAMETER Experiment Name: At_Ler-pi_Ovule_cDNA_P Parameter: Plant Line Value: null
  misc_feature: MA Experiment ID: 20000184 Result: Down-regulated in Transcription
  misc_feature: MA Experiment 20000184 PARAMETER Experiment Name: At_Shoots__P Parameter: Age (day) Value: 7
  misc_feature: MA Experiment 20000184 PARAMETER Experiment Name: At_Shoots__P Parameter: Tissue Value: Shoots vs. Whole Plant
  misc_feature: MA Experiment ID: 20000234 Result: Up-regulated in Transcription
  misc_feature: MA Experiment 20000234 PARAMETER Experiment Name: At_Siliques_P Parameter: Age (day) Value: 21
  misc_feature: MA Experiment 20000234 PARAMETER Experiment Name: At_Siliques_P Parameter: Organism Value: A. thaliana
  misc_feature: MA Experiment 20000234 PARAMETER Experiment Name: At_Siliques_P Parameter: Plant Line Value: WS
  misc_feature: MA Experiment 20000234 PARAMETER Experiment Name: At_Siliques_P Parameter: Tissue Value: Less Than 5mm Siliques vs. Whole Plant
  misc_feature: MA Experiment ID: 20000495 Result: Up-regulated in Transcription
  misc_feature: MA Experiment 20000495 PARAMETER Experiment Name: At_Guard_Cells_P Parameter: Harvest Date Value: 8/2/2002
  misc_feature: MA Experiment 20000495 PARAMETER Experiment Name: At_Guard_Cells_P Parameter: Organism Value: A. thaliana
  misc_feature: MA Experiment 20000495 PARAMETER Experiment Name: At_Guard_Cells_P Parameter: Tissue Value: Guard Cells vs. Leaves
attaaagagttttttttcgaaaagagttaaagaaaaaatgggaatgggaaggtatcagaaatctgcaacttctggtgtttcagctagatgggtttttgttctctgtatttctagcttccttcttggtgttcttgtcgttaacaggcttttggcaagttttgaaaccgtagatggcattgagagagcttcacctgagcaaaatgatcaatctagatcacttaatcctcttgttgattgtgagagcaaggaaggagacattctatctcgagtttcgcatactcatgatgttatcaagacattagacaagacaatttcttctcttgaggtagaactagctacagctcgagcagcaagatctgatggtagagatggatctccagctgttgcaaaaacagtagcagaccaatcgaagattcggcctcggatgttctttgtgatgggaatcatgactgctttcagtagcagaaaacgaagagactccataagaggaacttggcttcctaaagggaatgaattgaaaagattagagacagagaagggaatcattatgagatttgttataggtcacagttcttctcctggaggagtcttggaccacaccattgaagctgaagaagaacaacacaaagacttctttcgactgaatcacatagaaggttatcatgaattatcatctaaaacccaaatatacttctcatctgctgttgcaaaatgggatgcagacttctacatcaaagtggatgatgatgttcacgtaaatctcggaatgcttggttctacattggttgcatgaagtctggacctgtccttgctcaaaaaggagtcaaataccatgagccagaatattggaagtttggtgaagaaggaaacaaatacttcagacatgcaactggacaaatctatgcaatctccaaagatttagcaacttatatctcagttaaccggcaactacttcacaagtatgcaaatgaagatgtctctttaggttcttggttcattggtctcgatgttgaacatatcgacgatagaagcctctgctgtggaacacctttagattgtgagtggaagggtcaagcaggaaacccttgcgcagcatcgttcgattggagctgtagtggaatctgcaaatccgtagatagaatgcttgaagtacatcaacgttgtggtgaaggcgatggagcaatttggcatagtagtttctaaatattttctctctgtaatgtatagttttcagcttcttcttcttcttatggattattagtctaggttatgattatgattgatgttacatgtttaacattacagacatcatctaaaaggtcccaatttttgcctg

SEQ ID NO: 38439 - protein, 263 aa, Arabidopsis thaliana
  peptide (1)..(263): Ceres Seq. ID no. 12329844
  misc_feature (156)..(261): Pfam Name: Galactosyltransferase Pfam Description: Galactosyltransferase
  misc_feature (26)..(261): Homolog of NCBI NO: 30699558 NR Description: Avr9 elicitor response protein -related
  misc_feature (26)..(261): Homolog of NCBI NO: 12323294 NR Description: putative (Avr9) elicitor response protein;
  misc_feature (31)..(261): Homolog of NCBI NO: 34907342 NR Description: putative elicitor response protein
  misc_feature (26)..(261): Homolog of NCBI NO: 4138265 NR Description: Avr9 elicitor response protein [Nicotiana tabacum]
  misc_feature (27)..(261): Homolog of NCBI NO: 15217544 NR Description: elicitor response protein, putative; protein id:
  misc_feature (26)..(262): Homolog of NCBI NO: 15225684 NR Description: unknown protein; protein id: At2g32430.1
  misc_feature (21)..(261): Homolog of NCBI NO: 7485336 NR Description: hypothetical protein F10M23.280 - Arabidopsis
  misc_feature (21)..(261): Homolog of NCBI NO: 18416895 NR Description: Avr9 elicitor response like protein
  misc_feature (16)..(262): Homolog of NCBI NO: 15220440 NR Description: putative AVR9 elicitor response protein
  misc_feature (13)..(261): Homolog of NCBI NO: 15223337 NR Description: Avr9 elicitor response protein, putative; protein
LKSFFSKRVKEKMGMGRYQKSATSGVSARWVFVLCISSFLLGVLVVNRLLASFETVDGIERASPEQNDQSRSLNPLVDCESKEGDILSRVSHTHDVIKTLDKTISSLEVELATARAARSDGRDGSPAVAKTVADQSKIRPRMFFVMGIMTAFSSRKRRDSIRGTWLPKGNELKRLETEKGIIMRFVIGHSSSPGGVLDHTIEAEEEQHKDFFRLNHIEGYHELSSKTQIYFSSAVAKWDADFYIKVDDDVHVNLGMLGSTLVA

SEQ ID NO: 38440 - protein, 251 aa, Arabidopsis thaliana
  peptide (1)..(251): Ceres Seq. ID no. 12329845
  misc_feature (144)..(249): Pfam Name: Galactosyltransferase Pfam Description: Galactosyltransferase
  misc_feature (14)..(249): Homolog of NCBI NO: 30699558 NR Description: Avr9 elicitor response protein -related
  misc_feature (14)..(249): Homolog of NCBI NO: 12323294 NR Description: putative (Avr9) elicitor response protein;
  misc_feature (19)..(249): Homolog of NCBI NO: 34907342 NR Description: putative elicitor response protein
  misc_feature (14)..(249): Homolog of NCBI NO: 4138265 NR Description: Avr9 elicitor response protein [Nicotiana tabacum]
  misc_feature (15)..(249): Homolog of NCBI NO: 15217544 NR Description: elicitor response protein, putative; protein id:
  misc_feature (14)..(250): Homolog of NCBI NO: 15225684 NR Description: unknown protein; protein id: At2g32430.1
  misc_feature (9)..(249): Homolog of NCBI NO: 7485336 NR Description: hypothetical protein F10M23.280 - Arabidopsis
  misc_feature (9)..(249): Homolog of NCBI NO: 18416895 NR Description: Avr9 elicitor response like protein
  misc_feature (4)..(250): Homolog of NCBI NO: 15220440 NR Description: putative AVR9 elicitor response protein
  misc_feature (1)..(249): Homolog of NCBI NO: 15223337 NR Description: Avr9 elicitor response protein, putative; protein
MGMGRYQKSATSGVSARWVFVLCISSFLLGVLVVNRLLASFETVDGIERASPEQNDQSRSLNPLVDCESKEGDILSRVSHTHDVIKTLDKTISSLEVELATARAARSDGRDGSPAVAKTVADQSKIRPRMFFVMGIMTAFSSRKRRDSIRGTWLPKGNELKRLETEKGIIMRFVIGHSSSPGGVLDHTIEAEEEQHKDFFRLNHIEGYHELSSKTQIYFSSAVAKWDADFYIKVDDDVHVNLGMLGSTLVA

SEQ ID NO: 38441 - protein, 249 aa, Arabidopsis thaliana
  peptide (1)..(249): Ceres Seq. ID no. 12329846
  misc_feature (142)..(247): Pfam Name: Galactosyltransferase Pfam Description: Galactosyltransferase
  misc_feature (12)..(247): Homolog of NCBI NO: 30699558 NR Description: Avr9 elicitor response protein -related
  misc_feature (12)..(247): Homolog of NCBI NO: 12323294 NR Description: putative (Avr9) elicitor response protein;
  misc_feature (17)..(247): Homolog of NCBI NO: 34907342 NR Description: putative elicitor response protein
  misc_feature (12)..(247): Homolog of NCBI NO: 4138265 NR Description: Avr9 elicitor response protein [Nicotiana tabacum]
  misc_feature (13)..(247): Homolog of NCBI NO: 15217544 NR Description: elicitor response protein, putative; protein id:
  misc_feature (12)..(248): Homolog of NCBI NO: 15225684 NR Description: unknown protein; protein id: At2g32430.1
  misc_feature (7)..(247): Homolog of NCBI NO: 7485336 NR Description: hypothetical protein F10M23.280 - Arabidopsis
  misc_feature (7)..(247): Homolog of NCBI NO: 18416895 NR Description: Avr9 elicitor response like protein
  misc_feature (2)..(248): Homolog of NCBI NO: 15220440 NR Description: putative AVR9 elicitor response protein
  misc_feature (1)..(247): Homolog of NCBI NO: 15223337 NR Description: Avr9 elicitor response protein, putative; protein
MGRYQKSATSGVSARWVFVLCISSFLLGVLVVNRLLASFETVDGIERASPEQNDQSRSLNPLVDCESKEGDILSRVSHTHDVIKTLDKTISSLEVELATARAARSDGRDGSPAVAKTVADQSKIRPRMFFVMGIMTAFSSRKRRDSIRGTWLPKGNELKRLETEKGIIMRFVIGHSSSPGGVLDHTIEAEEEQHKDFFRLNHIEGYHELSSKTQIYFSSAVAKWDADFYIKVDDDVHVNLGMLGSTLVA

SEQ ID NO: 38442 - DNA, 958 bp, Arabidopsis thaliana
  misc_feature (1)..(958): Ceres Seq. ID no. 12326648
  misc_feature: MA Experiment ID: 108434 Result: Down-regulated in Transcription
  misc_feature: MA Experiment 108434 PARAMETER Experiment Name: At_Root_Tips_cDNA_P Parameter: Tissue Value: Root Tips
  misc_feature: MA Experiment ID: 108461 Result: Down-regulated in Transcription
  misc_feature: MA Experiment 108461 PARAMETER Experiment Name: At_Germinating_Seeds_cDNA_P Parameter: Age (day) Value: 1 vs. 0
  misc_feature: MA Experiment 108461 PARAMETER Experiment Name: At_Germinating_Seeds_cDNA_P Parameter: Tissue Value: Germinating Seeds
  misc_feature: MA Experiment ID: 108561 Result: Up-regulated in Transcription
  misc_feature: MA Experiment 108561 PARAMETER Experiment Name: At_100uM_ABA_cDNA_P Parameter: Timepoint (hr) Value: 6
  misc_feature: MA Experiment 108561 PARAMETER Experiment Name: At_100uM_ABA_cDNA_P Parameter: Tissue Value: Aerial
  misc_feature: MA Experiment 108561 PARAMETER Experiment Name: At_100uM_ABA_cDNA_P Parameter: Treatment Value: 100uM ABA vs. No Treatment
  misc_feature: MA Experiment ID: 108573 Result: Up-regulated in Transcription
  misc_feature: MA Experiment 108573 PARAMETER Experiment Name: At_Drought_cDNA_P Parameter: Timepoint (hr) Value: 6
  misc_feature: MA Experiment 108573 PARAMETER Experiment Name: At_Drought_cDNA_P Parameter: Tissue Value: Aerial
  misc_feature: MA Experiment 108573 PARAMETER Experiment Name: At_Drought_cDNA_P Parameter: Treatment Value: Drought vs. No Drought
  misc_feature: MA Experiment ID: 108576 Result: Up-regulated in Transcription
  misc_feature: MA Experiment 108576 PARAMETER Experiment Name: At_42deg_Heat_cDNA_P Parameter: Temperature (deg C) Value: 42 vs. 22
  misc_feature: MA Experiment 108576 PARAMETER Experiment Name: At_42deg_Heat_cDNA_P Parameter: Timepoint (hr) Value: 1
  misc_feature: MA Experiment 108576 PARAMETER Experiment Name: At_42deg_Heat_cDNA_P Parameter: Tissue Value: Aerial
  misc_feature: MA Experiment ID: 108577 Result: Up-regulated in Transcription
  misc_feature: MA Experiment 108577 PARAMETER Experiment Name: At_42deg_Heat_cDNA_P Parameter: Temperature (deg C) Value: 42 vs. 22
  misc_feature: MA Experiment 108577 PARAMETER Experiment Name: At_42deg_Heat_cDNA_P Parameter: Timepoint (hr) Value: 6
  misc_feature: MA Experiment 108577 PARAMETER Experiment Name: At_42deg_Heat_cDNA_P Parameter: Tissue Value: Aerial
  misc_feature: MA Experiment ID: 108585 Result: Up-regulated in Transcription
  misc_feature: MA Experiment 108585 PARAMETER Experiment Name: At_5mM_NaNP_cDNA_P Parameter: Timepoint (hr) Value: 6
  misc_feature: MA Experiment 108585 PARAMETER Experiment Name: At_5mM_NaNP_cDNA_P Parameter: Tissue Value: Aerial
  misc_feature: MA Experiment 108585 PARAMETER Experiment Name: At_5mM_NaNP_cDNA_P Parameter: Treatment Value: null
  misc_feature: MA Experiment ID: 20000111 Result: Up-regulated in Transcription
  misc_feature: MA Experiment 20000111 PARAMETER Experiment Name: At_42deg_Heat_cDNA_P Parameter: Temperature (deg C) Value: 42 vs. 22
  misc_feature: MA Experiment 20000111 PARAMETER Experiment Name: At_42deg_Heat_cDNA_P Parameter: Timepoint (hr) Value: 6
  misc_feature: MA Experiment 20000111 PARAMETER Experiment Name: At_42deg_Heat_cDNA_P Parameter: Tissue Value: Aerial
  misc_feature: MA Experiment ID: 20000112 Result: Up-regulated in Transcription
  misc_feature: MA Experiment 20000112 PARAMETER Experiment Name: At_42deg_Heat_cDNA_P Parameter: Temperature (deg C) Value: 42 vs. 22
  misc_feature: MA Experiment 20000112 PARAMETER Experiment Name: At_42deg_Heat_cDNA_P Parameter: Timepoint (hr) Value: 2
  misc_feature: MA Experiment 20000112 PARAMETER Experiment Name: At_42deg_Heat_cDNA_P Parameter: Tissue Value: Aerial
  misc_feature: MA Experiment ID: 20000113 Result: Up-regulated in Transcription
  misc_feature: MA Experiment 20000113 PARAMETER Experiment Name: At_42deg_Heat_cDNA_P Parameter: Temperature (deg C) Value: 42 vs. 22
  misc_feature: MA Experiment 20000113 PARAMETER Experiment Name: At_42deg_Heat_cDNA_P Parameter: Timepoint (hr) Value: 8
  misc_feature: MA Experiment 20000113 PARAMETER Experiment Name: At_42deg_Heat_cDNA_P Parameter: Tissue Value: Aerial
  misc_feature: MA Experiment ID: 20000144 Result: Up-regulated in Transcription
  misc_feature: MA Experiment 20000144 PARAMETER Experiment Name: At_42deg_Heat_cDNA_P Parameter: Temperature (deg C) Value: 42 vs. 22
  misc_feature: MA Experiment 20000144 PARAMETER Experiment Name: At_42deg_Heat_cDNA_P Parameter: Timepoint (hr) Value: 1
  misc_feature: MA Experiment 20000144 PARAMETER Experiment Name: At_42deg_Heat_cDNA_P Parameter: Tissue Value: Aerial
  misc_feature: MA Experiment ID: 20000171 Result: Up-regulated in Transcription
  misc_feature: MA Experiment 20000171 PARAMETER Experiment Name: At_42deg_Heat_P Parameter: Age (day) Value: 14
  misc_feature: MA Experiment 20000171 PARAMETER Experiment Name: At_42deg_Heat_P Parameter: Organism Value: A. thaliana
  misc_feature: MA Experiment 20000171 PARAMETER Experiment Name: At_42deg_Heat_P Parameter: Plant Line Value: WS
  misc_feature: MA Experiment 20000171 PARAMETER Experiment Name: At_42deg_Heat_P Parameter: Temperature (deg C) Value: 42 vs. 22
  misc_feature: MA Experiment 20000171 PARAMETER Experiment Name: At_42deg_Heat_P Parameter: Timepoint (hr) Value: 1
  misc_feature: MA Experiment 20000171 PARAMETER Experiment Name: At_42deg_Heat_P Parameter: Tissue Value: Aerial
  misc_feature: MA Experiment ID: 20000173 Result: Up-regulated in Transcription
  misc_feature: MA Experiment 20000173 PARAMETER Experiment Name: At_42deg_Heat_P Parameter: Age (day) Value: 14
  misc_feature: MA Experiment 20000173 PARAMETER Experiment Name: At_42deg_Heat_P Parameter: Organism Value: A. thaliana
  misc_feature: MA Experiment 20000173 PARAMETER Experiment Name: At_42deg_Heat_P Parameter: Plant Line Value: WS
  misc_feature: MA Experiment 20000173 PARAMETER Experiment Name: At_42deg_Heat_P Parameter: Temperature (deg C) Value: 42 vs. 22
  misc_feature: MA Experiment 20000173 PARAMETER Experiment Name: At_42deg_Heat_P Parameter: Timepoint (hr) Value: 6
  misc_feature: MA Experiment 20000173 PARAMETER Experiment Name: At_42deg_Heat_P Parameter: Tissue Value: Aerial
  misc_feature: MA Experiment ID: 20000179 Result: Down-regulated in Transcription
  misc_feature: MA Experiment 20000179 PARAMETER Experiment Name: At_Germinating_Seeds_P Parameter: Age (hr) Value: 6 vs. 0
  misc_feature: MA Experiment 20000179 PARAMETER Experiment Name: At_Germinating_Seeds_P Parameter: Tissue Value: Germinating Seeds
  misc_feature: MA Experiment ID: 20000180 Result: Down-regulated in Transcription
  misc_feature: MA Experiment 20000180 PARAMETER Experiment Name: At_Germinating_Seeds_P Parameter: Age (hr) Value: 24 vs. 0
  misc_feature: MA Experiment 20000180 PARAMETER Experiment Name: At_Germinating_Seeds_P Parameter: Tissue Value: Germinating Seeds
  misc_feature: MA Experiment ID: 20000184 Result: Down-regulated in Transcription
  misc_feature: MA Experiment 20000184 PARAMETER Experiment Name: At_Shoots__P Parameter: Age (day) Value: 7
  misc_feature: MA Experiment 20000184 PARAMETER Experiment Name: At_Shoots__P Parameter: Tissue Value: Shoots vs. Whole Plant
  misc_feature: MA Experiment ID: 20000224 Result: Up-regulated in Transcription
  misc_feature: MA Experiment ID: 20000234 Result: Down-regulated in Transcription
  misc_feature: MA Experiment 20000234 PARAMETER Experiment Name: At_Siliques_P Parameter: Age (day) Value: 21
  misc_feature: MA Experiment 20000234 PARAMETER Experiment Name: At_Siliques_P Parameter: Organism Value: A. thaliana
  misc_feature: MA Experiment 20000234 PARAMETER Experiment Name: At_Siliques_P Parameter: Plant Line Value: WS
  misc_feature: MA Experiment 20000234 PARAMETER Experiment Name: At_Siliques_P Parameter: Tissue Value: Less Than 5mm Siliques vs. Whole Plant
  misc_feature: MA Experiment ID: 20000235 Result: Down-regulated in Transcription
  misc_feature: MA Experiment 20000235 PARAMETER Experiment Name: At_Siliques_P Parameter: Age (day) Value: 21
  misc_feature: MA Experiment 20000235 PARAMETER Experiment Name: At_Siliques_P Parameter: Organism Value: A. thaliana
  misc_feature: MA Experiment 20000235 PARAMETER Experiment Name: At_Siliques_P Parameter: Plant Line Value: WS
  misc_feature: MA Experiment 20000235 PARAMETER Experiment Name: At_Siliques_P Parameter: Tissue Value: 5-10mm Siliques vs. Whole Plant
  misc_feature: MA Experiment ID: 20000264 Result: Down-regulated in Transcription
  misc_feature: MA Experiment 20000264 PARAMETER Experiment Name: At_Open_Flower_P Parameter: Age (day) Value: 21
  misc_feature: MA Experiment 20000264 PARAMETER Experiment Name: At_Open_Flower_P Parameter: Plant Line Value: WS
  misc_feature: MA Experiment 20000264 PARAMETER Experiment Name: At_Open_Flower_P Parameter: Tissue Value: Open Flower vs. Whole Plant
  misc_feature: MA Experiment ID: 20000265 Result: Down-regulated in Transcription
  misc_feature: MA Experiment 20000265 PARAMETER Experiment Name: At_Open_Flower_P Parameter: Age (day) Value: 21
  misc_feature: MA Experiment 20000265 PARAMETER Experiment Name: At_Open_Flower_P Parameter: Plant Line Value: WS
  misc_feature: MA Experiment 20000265 PARAMETER Experiment Name: At_Open_Flower_P Parameter: Tissue Value: Closed Flower vs. Whole Plant
  misc_feature: MA Experiment ID: 20000443 Result: Up-regulated in Transcription
  misc_feature: MA Experiment 20000443 PARAMETER Experiment Name: At_1uM_BR-BRZ__P Parameter: Tissue Value: Shoot Apices
  misc_feature: MA Experiment 20000443 PARAMETER Experiment Name: At_1uM_BR-BRZ__P Parameter: Treatment Value: 1uM BRZ vs. No Treatment
  misc_feature: MA Experiment ID: 20001555 Result: Up-regulated in Transcription
  misc_feature: MA Experiment 20001555 PARAMETER Experiment Name: At_Drought_Soil_Dry_P Parameter: Age (day) Value: 24
  misc_feature: MA Experiment 20001555 PARAMETER Experiment Name: At_Drought_Soil_Dry_P Parameter: Organism Value: A. thaliana
  misc_feature: MA Experiment 20001555 PARAMETER Experiment Name: At_Drought_Soil_Dry_P Parameter: Plant Line Value: WS
  misc_feature: MA Experiment 20001555 PARAMETER Experiment Name: At_Drought_Soil_Dry_P Parameter: Post Timepoint (hr) Value: None
  misc_feature: MA Experiment 20001555 PARAMETER Experiment Name: At_Drought_Soil_Dry_P Parameter: Post-Treatment Value: None
  misc_feature: MA Experiment 20001555 PARAMETER Experiment Name: At_Drought_Soil_Dry_P Parameter: Timepoint (day) Value: 10
  misc_feature: MA Experiment 20001555 PARAMETER Experiment Name: At_Drought_Soil_Dry_P Parameter: Treatment Value: Drought vs. No Drought
  misc_feature: MA Experiment ID: 20001911 Result: Up-regulated in Transcription
  misc_feature: MA Experiment 20001911 PARAMETER Experiment Name: At_Drought_Reproduction_P Parameter: Age (day) Value: 40
  misc_feature: MA Experiment 20001911 PARAMETER Experiment Name: At_Drought_Reproduction_P Parameter: Organism Value: A. thaliana
  misc_feature: MA Experiment 20001911 PARAMETER Experiment Name: At_Drought_Reproduction_P Parameter: Plant Line Value: WS
  misc_feature: MA Experiment 20001911 PARAMETER Experiment Name: At_Drought_Reproduction_P Parameter: Timepoint (day) Value: 10
  misc_feature: MA Experiment 20001911 PARAMETER Experiment Name: At_Drought_Reproduction_P Parameter: Tissue Value: Flowers
  misc_feature: MA Experiment 20001911 PARAMETER Experiment Name: At_Drought_Reproduction_P Parameter: Treatment Value: Drought vs. No Drought
tttatccagaacattccgactactctctccctgagcttcggccatggcggttcgtctcgcgaggtcattggctgcgtcaccctcgtcacgtccatcgtgtttatccctcggaaatcgcttctcagcctcagatatcacttcatctgcgattaacggcggcgagttttctgatttcgttagagctttcgccttttattcgtcttcgtcctcttggtggtcgtctcccgatgatttgacggcgtcatcgaagaggaaagagaagaagactacagagcgtttctctgccgtgattgacgcagtccatgaccggaaactcccgccggagctacgtgggcggcgcgatttcgtaaggtcagagactgatataatcaacgtggtcgagcaaaggatatggcattcaatggaagaaggccactttgagaacttacccggtaaaggcaaacccttgaacctccatacaaatcctcacgcagacccagcggaggatacattgtatcggattcttaacaagaacgggtttgctcccgaatgggtggagctcaacaaagagataagaaacaaagcaaaagaatggagagtttcactgaagaaagcatggacaatgaaactcgaggaagaccaatcgggatgggaagagagatcagatttgctgaaaaacgaattgaaacaaatcaataacatggtattcaggtacaatctgatcgttcctttcggccgtcaaatgtttggactgaagtgggagaaagagattgatcgcttgaaagaataacatcttcagaagccaaaaggttggtcacactactatgttcttgtgtttgtagtatatctattgatagtatacgagtcaatgtggctattggtgcttaggctagatataaaaagaataagaaacaagtgtttgagttgtttcatgtatgttgtatccatcaaatactctcttgaaagataattatagcta

SEQ ID NO: 38443 - protein, 241 aa, Arabidopsis thaliana
  peptide (1)..(241): Ceres Seq. ID no. 12326649
  misc_feature (108)..(222): Homolog of NCBI NO: 7020577 NR Description: unnamed protein product [Homo sapiens]
  misc_feature (130)..(241): Homolog of NCBI NO: 13542805 NR Description: Unknown (protein for IMAGE:3483507) [Mus musculus]
  misc_feature (108)..(241): Homolog of NCBI NO: 40254908 NR Description: chromosome 21 open reading frame 55 [Homo
  misc_feature (111)..(234): Homolog of NCBI NO: 31233474 NR Description: ENSANGP00000015813 [Anopheles gambiae]
  misc_feature (108)..(241): Homolog of NCBI NO: 26349033 NR Description: unnamed protein product [Mus musculus]
  misc_feature (108)..(241): Homolog of NCBI NO: 20149746 NR Description: cDNA sequence BC020175; cDNA, sequence BC020175
  misc_feature (98)..(241): Homolog of NCBI NO: 24582398 NR Description: CG13776-PA [Drosophila melanogaster]
  misc_feature (1)..(110): Homolog of NCBI NO: 11357378 NR Description: hypothetical protein F12E4.360 - Arabidopsis
  misc_feature (101)..(241): Homolog of NCBI NO: 11357378 NR Description: hypothetical protein F12E4.360 - Arabidopsis
  misc_feature (1)..(241): Homolog of NCBI NO: 18414270 NR Description: putative protein
MAVRLARSLAASPSSRPSCLSLGNRFSASDITSSAINGGEFSDFVRAFAFYSSSSSWWSSPDDLTASSKRKEKKTTERFSAVIDAVHDRKLPPELRGRRDFVRSETDIINVVEQRIWHSMEEGHFENLPGKGKPLNLHTNPHADPAEDTLYRILNKNGFAPEWVELNKEIRNKAKEWRVSLKKAWTMKLEEDQSGWEERSDLLKNELKQINNMVFRYNLIVPFGRQMFGLKWEKEIDRLKE

SEQ ID NO: 38444 - protein, 122 aa, Arabidopsis thaliana
  peptide (1)..(122): Ceres Seq. ID no. 12326650
  misc_feature (1)..(103): Homolog of NCBI NO: 20810277 NR Description: Unknown (protein for MGC:33722) [Homo sapiens]
  misc_feature (1)..(103): Homolog of NCBI NO: 7020577 NR Description: unnamed protein product [Homo sapiens]
  misc_feature (11)..(122): Homolog of NCBI NO: 13542805 NR Description: Unknown (protein for IMAGE:3483507) [Mus musculus]
  misc_feature (1)..(122): Homolog of NCBI NO: 40254908 NR Description: chromosome 21 open reading frame 55 [Homo
  misc_feature (1)..(115): Homolog of NCBI NO: 31233474 NR Description: ENSANGP00000015813 [Anopheles gambiae]
  misc_feature (1)..(122): Homolog of NCBI NO: 26349033 NR Description: unnamed protein product [Mus musculus]
  misc_feature (1)..(122): Homolog of NCBI NO: 20149746 NR Description: cDNA sequence BC020175; cDNA, sequence BC020175
  misc_feature (1)..(122): Homolog of NCBI NO: 24582398 NR Description: CG13776-PA [Drosophila melanogaster]
  misc_feature (1)..(122): Homolog of NCBI NO: 11357378 NR Description: hypothetical protein F12E4.360 - Arabidopsis
  misc_feature (1)..(122): Homolog of NCBI NO: 18414270 NR Description: putative protein
MEEGHFENLPGKGKPLNLHTNPHADPAEDTLYRILNKNGFAPEWVELNKEIRNKAKEWRVSLKKAWTMKLEEDQSGWEERSDLLKNELKQINNMVFRYNLIVPFGRQMFGLKWEKEIDRLKE

SEQ ID NO: 38445 - DNA, 871 bp, Arabidopsis thaliana
  misc_feature (1)..(871): Ceres Seq. ID no. 12421004
  misc_feature: MA Experiment ID: 108595 Result: Down-regulated in Transcription
  misc_feature: MA Experiment 108595 PARAMETER Experiment Name: At_Ler-pi_Ovule_cDNA_P Parameter: Plant Line Value: null
  misc_feature: MA Experiment ID: 20000439 Result: Down-regulated in Transcription
  misc_feature: MA Experiment 20000439 PARAMETER Experiment Name: At_Roots__P Parameter: Age (day) Value: 14 vs. 21
  misc_feature: MA Experiment 20000439 PARAMETER Experiment Name: At_Roots__P Parameter: Organism Value: A. thaliana
  misc_feature: MA Experiment 20000439 PARAMETER Experiment Name: At_Roots__P Parameter: Tissue Value: Roots vs. Whole Plant
  misc_feature: MA Experiment ID: 20001911 Result: Up-regulated in Transcription
  misc_feature: MA Experiment 20001911 PARAMETER Experiment Name: At_Drought_Reproduction_P Parameter: Age (day) Value: 40
  misc_feature: MA Experiment 20001911 PARAMETER Experiment Name: At_Drought_Reproduction_P Parameter: Organism Value: A. thaliana
  misc_feature: MA Experiment 20001911 PARAMETER Experiment Name: At_Drought_Reproduction_P Parameter: Plant Line Value: WS
  misc_feature: MA Experiment 20001911 PARAMETER Experiment Name: At_Drought_Reproduction_P Parameter: Timepoint (day) Value: 10
  misc_feature: MA Experiment 20001911 PARAMETER Experiment Name: At_Drought_Reproduction_P Parameter: Tissue Value: Flowers
  misc_feature: MA Experiment 20001911 PARAMETER Experiment Name: At_Drought_Reproduction_P Parameter: Treatment Value: Drought vs. No Drought
gaaacaaaaactcgtggaggagatatgcaattgctgacgctaaatccggcggccatttccaggacgccgccgcaagccatagacccttcctcatcctcgagtcttcttcttccttttcctcagattttgagctcccaacgcgctcttggtcttgtagctaggccttgtaatccacttcgacgaggattatctaggtttttatcaagtcgacagcttttccgacgatccaaagttgtcaaggcagtagcaaccccagaccccatcttggaagtacctttaactgaggaaaatgtagaaagcgttttggatgaaatccgaccttaccttatgtctgatggtggtaatgtggcattacatgagatcgatggaaatattgtgcgggttaagctgcagggagcatgcggatcatgtccaagttctactatgacaatgaagatgggtattgagcgtcgtctaatggaaaagatccctgaaatagtggctgtagaagctcttccagatgaagagactggccttgaactgaatgaggaaaacattgaaaaggtgctggaagaaatcaggccttacttaatcggaacagcagatggatcgcttgatctagtggagattgaagatccaatcgtgaagataagaatcacaggacctgcagctggagtcatgacagttcgtgtagcagtcactcagaaactaagagagaaaattccatcaatcgcagctgttcaacttatatagaaacaacaactcttcttgtatgctttgtattagctcccttgtatagttgttgtgcatagattatgtgttttgttgacatttgctatttgtcctcaaataagttttcaacatttttgttttacttagaaaaaaagtcctt

SEQ ID NO: 38446 - protein, 243 aa, Arabidopsis thaliana
  peptide (1)..(243): Ceres Seq. ID no. 12421005
  misc_feature (98)..(165): Pfam Name: NifU-like domain Pfam Description: NifU-like domain
  misc_feature (93)..(163): Homolog of NCBI NO: 22298836 NR Description: ORF_ID:tsl1293~similar to NifU protein
  misc_feature (93)..(163): Homolog of NCBI NO: 17228804 NR Description: NifU like protein [Nostoc sp. PCC 7120]
  misc_feature (93)..(163): Homolog of NCBI NO: 16332125 NR Description: NifU protein [Synechocystis sp. PCC 6803]
  misc_feature (91)..(162): Homolog of NCBI NO: 33860975 NR Description: NifU-like protein
  misc_feature (42)..(243): Homolog of NCBI NO: 21554503 NR Description: nitrogen fixation like protein [Arabidopsis
  misc_feature (28)..(243): Homolog of NCBI NO: 7485833 NR Description: hypothetical protein F20B18.20 - Arabidopsis
  misc_feature (7)..(243): Homolog of NCBI NO: 18416645 NR Description: nitrogen fixation like protein
  misc_feature (56)..(243): Homolog of NCBI NO: 30698492 NR Description: NifU1 [Oryza sativa (japonica cultivar-group)]
  misc_feature (9)..(222): Homolog of NCBI NO: 8777425 NR Description: gene_id:K9P8.8~pir||T09896~strong similarity to
  misc_feature (9)..(243): Homolog of NCBI NO: 18423084 NR Description: Expressed protein
ETKTRGGDMQLLTLNPAAISRTPPQAIDPSSSSSLLLPFPQILSSQRALGLVARPCNPLRRGLSRFLSSRQLFRRSKVVKAVATPDPILEVPLTEENVESVLDEIRPYLMSDGGNVALHEIDGNIVRVKLQGACGSCPSSTMTMKMGIERRLMEKIPEIVAVEALPDEETGLELNEENIEKVLEEIRPYLIGTADGSLDLVEIEDPIVKIRITGPAAGVMTVRVAVTQKLREKIPSIAAVQLI

SEQ ID NO: 38447 - protein, 235 aa, Arabidopsis thaliana
  peptide (1)..(235): Ceres Seq. ID no. 12421006
  misc_feature (90)..(157): Pfam Name: NifU-like domain Pfam Description: NifU-like domain
  misc_feature (85)..(155): Homolog of NCBI NO: 22298836 NR Description: ORF_ID:tsl1293~similar to NifU protein
  misc_feature (85)..(155): Homolog of NCBI NO: 17228804 NR Description: NifU like protein [Nostoc sp. PCC 7120]
  misc_feature (85)..(155): Homolog of NCBI NO: 16332125 NR Description: NifU protein [Synechocystis sp. PCC 6803]
  misc_feature (83)..(154): Homolog of NCBI NO: 33860975 NR Description: NifU-like protein
  misc_feature (34)..(235): Homolog of NCBI NO: 21554503 NR Description: nitrogen fixation like protein [Arabidopsis
  misc_feature (20)..(235): Homolog of NCBI NO: 7485833 NR Description: hypothetical protein F20B18.20 - Arabidopsis
  misc_feature (1)..(235): Homolog of NCBI NO: 18416645 NR Description: nitrogen fixation like protein
  misc_feature (48)..(235): Homolog of NCBI NO: 30698492 NR Description: NifU1 [Oryza sativa (japonica cultivar-group)]
  misc_feature (1)..(214): Homolog of NCBI NO: 8777425 NR Description: gene_id:K9P8.8~pir||T09896~strong similarity to
  misc_feature (1)..(235): Homolog of NCBI NO: 18423084 NR Description: Expressed protein
MQLLTLNPAAISRTPPQAIDPSSSSSLLLPFPQILSSQRALGLVARPCNPLRRGLSRFLSSRQLFRRSKVVKAVATPDPILEVPLTEENVESVLDEIRPYLMSDGGNVALHEIDGNIVRVKLQGACGSCPSSTMTMKMGIERRLMEKIPEIVAVEALPDEETGLELNEENIEKVLEEIRPYLIGTADGSLDLVEIEDPIVKIRITGPAAGVMTVRVAVTQKLREKIPSIAAVQLI

SEQ ID NO: 38448 - protein, 134 aa, Arabidopsis thaliana
  peptide (1)..(134): Ceres Seq. ID no. 12421007
  misc_feature (1)..(56): Pfam Name: NifU-like domain Pfam Description: NifU-like domain
  misc_feature (1)..(54): Homolog of NCBI NO: 22298836 NR Description: ORF_ID:tsl1293~similar to NifU protein
  misc_feature (1)..(54): Homolog of NCBI NO: 17228804 NR Description: NifU like protein [Nostoc sp. PCC 7120]
  misc_feature (1)..(54): Homolog of NCBI NO: 16332125 NR Description: NifU protein [Synechocystis sp. PCC 6803]
  misc_feature (1)..(53): Homolog of NCBI NO: 33860975 NR Description: NifU-like protein
  misc_feature (1)..(134): Homolog of NCBI NO: 21554503 NR Description: nitrogen fixation like protein [Arabidopsis
  misc_feature (1)..(134): Homolog of NCBI NO: 7485833 NR Description: hypothetical protein F20B18.20 - Arabidopsis
  misc_feature (1)..(134): Homolog of NCBI NO: 18416645 NR Description: nitrogen fixation like protein
  misc_feature (1)..(134): Homolog of NCBI NO: 30698492 NR Description: NifU1 [Oryza sativa (japonica cultivar-group)]
  misc_feature (1)..(113): Homolog of NCBI NO: 8777425 NR Description: gene_id:K9P8.8~pir||T09896~strong similarity to
  misc_feature (1)..(134): Homolog of NCBI NO: 18423084 NR Description: Expressed protein
MSDGGNVALHEIDGNIVRVKLQGACGSCPSSTMTMKMGIERRLMEKIPEIVAVEALPDEETGLELNEENIEKVLEEIRPYLIGTADGSLDLVEIEDPIVKIRITGPAAGVMTVRVAVTQKLREKIPSIAAVQLI

SEQ ID NO: 38449 - DNA, 1207 bp, Arabidopsis thaliana
  misc_feature (1)..(1207): Ceres Seq. ID no. 12327556
  misc_feature: MA Experiment ID: 20000184 Result: Down-regulated in Transcription
  misc_feature: MA Experiment 20000184 PARAMETER Experiment Name: At_Shoots__P Parameter: Age (day) Value: 7
  misc_feature: MA Experiment 20000184 PARAMETER Experiment Name: At_Shoots__P Parameter: Tissue Value: Shoots vs. Whole Plant
aagtacattatcatcatttcaagaaacagagagagactaatggcgcaaaaaccacgaacggtgatctgcgtcggagacatccatggatacatatcaaagctcaataacctctggcttaatctccaatctgccatcgacccatcagatttcagctcagctctcgtcatattccttggcgattactgcgatcgtggaccggagactcgaaaagtcatcgatttcttaatctctctgccggagaaacatcccgatcaaactcatgtctttctcgccgggaaccatgactttgccttctctgggttcttaggtttgttgcctcgtccttcagatggatctgatttgaaggatacgtggaaggagtactcaaaaagtgaggagacagaaggatggtatacaggtgaagggttcgaagatatgcatcttcaaggtagaagatgggctggtaaaattaaggctacgttcaattctgtgaaagggatggcttataaaggatcgatttacgatgctggatcgacttttgaatcttatggcgttccacatggatcttctgatttgatgaaggcagtacctgagagtcacaagaagttcttgaccaatatggtatgggttcatgaagaggacgatgtttgtatagaaacagaggaagggcttaagcattgtaagttgatcgccgtacatgctggtttagagaaagggaataacgtagaagaacaactgaagcttttgagagctaaagacactagcatctcaaaaatacaacatctaagtggtaggaaaaacgtttgggacatcccacaggagctggatgataaacatactgttgttgttagcgggcaccatggaaaacttcacatcgatggtatgagattgatcatcgatgaaggcggtggattcccggataaaccagtggcagcaattgttcttccttccaagaagattatccgtgacaccgataatttgtctagttaagtttttctcatctactattgtaccaaagtcaattttgatttcaaaataaatgtagtaaggtttagcactaaattgaatttacttttcttacaaagaaaataaatgggcctctgaaagagtaagcccagattttggaagcggtctagtggtgtaatgtagctcgaaatcttttgggttgttcaaaaaagcccaaacaaaacatgctataatccatttttaatcgaaattatttttccgc

SEQ ID NO: 38450 - protein, 322 aa, Arabidopsis thaliana
  peptide (1)..(322): Ceres Seq. ID no. 12327557
  misc_feature (19)..(283): Pfam Name: Calcineurin-like phosphoesterase Pfam Description: Calcineurin-like phosphoesterase
  misc_feature (24)..(108): Homolog of NCBI NO: 13475753 NR Description: serine/threonine protein phosphatase
  misc_feature (172)..(322): Homolog of NCBI NO: 19424085 NR Description: unknown protein [Arabidopsis thaliana]
  misc_feature (18)..(322): Homolog of NCBI NO: 38347604 NR Description: OSJNBa0042I15.17 [Oryza sativa (japonica
  misc_feature (14)..(322): Homolog of NCBI NO: 6143880 NR Description: unknown protein [Arabidopsis thaliana]
  misc_feature (13)..(322): Homolog of NCBI NO: 18398696 NR Description: expressed protein
  misc_feature (14)..(322): Homolog of NCBI NO: 21618122 NR Description: unknown [Arabidopsis thaliana]
  misc_feature (14)..(322): Homolog of NCBI NO: 18398699 NR Description: expressed protein
KYIIIISRNRERLMAQKPRTVICVGDIHGYISKLNNLWLNLQSAIDPSDFSSALVIFLGDYCDRGPETRKVIDFLISLPEKHPDQTHVFLAGNHDFAFSGFLGLLPRPSDGSDLKDTWKEYSKSEETEGWYTGEGFEDMHLQGRRWAGKIKATFNSVKGMAYKGSIYDAGSTFESYGVPHGSSDLMKAVPESHKKFLTNMVWVHEEDDVCIETEEGLKHCKLIAVHAGLEKGNNVEEQLKLLRAKDTSISKIQHLSGRKNVWDIPQELDDKHTVVVSGHHGKLHIDGMRLIIDEGGGFPDKPVAAIVLPSKKIIRDTDNLSS

SEQ ID NO: 38451 - protein, 309 aa, Arabidopsis thaliana
  peptide (1)..(309): Ceres Seq. ID no. 12327558
  misc_feature (6)..(270): Pfam Name: Calcineurin-like phosphoesterase Pfam Description: Calcineurin-like phosphoesterase
  misc_feature (11)..(95): Homolog of NCBI NO: 13475753 NR Description: serine/threonine protein phosphatase
  misc_feature (159)..(309): Homolog of NCBI NO: 19424085 NR Description: unknown protein [Arabidopsis thaliana]
  misc_feature (5)..(309): Homolog of NCBI NO: 38347604 NR Description: OSJNBa0042I15.17 [Oryza sativa (japonica
  misc_feature (1)..(309): Homolog of NCBI NO: 6143880 NR Description: unknown protein [Arabidopsis thaliana]
  misc_feature (1)..(309): Homolog of NCBI NO: 18398696 NR Description: expressed protein
  misc_feature (1)..(309): Homolog of NCBI NO: 21618122 NR Description: unknown [Arabidopsis thaliana]
  misc_feature (1)..(309): Homolog of NCBI NO: 18398699 NR Description: expressed protein
MAQKPRTVICVGDIHGYISKLNNLWLNLQSAIDPSDFSSALVIFLGDYCDRGPETRKVIDFLISLPEKHPDQTHVFLAGNHDFAFSGFLGLLPRPSDGSDLKDTWKEYSKSEETEGWYTGEGFEDMHLQGRRWAGKIKATFNSVKGMAYKGSIYDAGSTFESYGVPHGSSDLMKAVPESHKKFLTNMVWVHEEDDVCIETEEGLKHCKLIAVHAGLEKGNNVEEQLKLLRAKDTSISKIQHLSGRKNVWDIPQELDDKHTVVVSGHHGKLHIDGMRLIIDEGGGFPDKPVAAIVLPSKKIIRDTDNLSS

SEQ ID NO: 38452 - protein, 184 aa, Arabidopsis thaliana
  peptide (1)..(184): Ceres Seq. ID no. 12327559
  misc_feature (1)..(145): Pfam Name: Calcineurin-like phosphoesterase Pfam Description: Calcineurin-like phosphoesterase
  misc_feature (34)..(184): Homolog of NCBI NO: 19424085 NR Description: unknown protein [Arabidopsis thaliana]
  misc_feature (1)..(184): Homolog of NCBI NO: 38347604 NR Description: OSJNBa0042I15.17 [Oryza sativa (japonica
  misc_feature (1)..(184): Homolog of NCBI NO: 6143880 NR Description: unknown protein [Arabidopsis thaliana]
  misc_feature (1)..(184): Homolog of NCBI NO: 18398696 NR Description: expressed protein
  misc_feature (1)..(184): Homolog of NCBI NO: 21618122 NR Description: unknown [Arabidopsis thaliana]
  misc_feature (1)..(184): Homolog of NCBI NO: 18398699 NR Description: expressed protein
MHLQGRRWAGKIKATFNSVKGMAYKGSIYDAGSTFESYGVPHGSSDLMKAVPESHKKFLTNMVWVHEEDDVCIETEEGLKHCKLIAVHAGLEKGNNVEEQLKLLRAKDTSISKIQHLSGRKNVWDIPQELDDKHTVVVSGHHGKLHIDGMRLIIDEGGGFPDKPVAAIVLPSKKIIRDTDNLSS

SEQ ID NO: 38453 - DNA, 1799 bp, Arabidopsis thaliana; identical to SEQ ID NO: 26635
  misc_feature (1)..(1799): Ceres Seq. ID no. 12326657
  misc_feature: MA Experiment ID: 108594 Result: Up-regulated in Transcription
  misc_feature: MA Experiment 108594 PARAMETER Experiment Name: At_Ler-rhl_Root_cDNA_P Parameter: Plant Line Value: null
  misc_feature: MA Experiment ID: 108595 Result: Up-regulated in Transcription
  misc_feature: MA Experiment 108595 PARAMETER Experiment Name: At_Ler-pi_Ovule_cDNA_P Parameter: Plant Line Value: null
  misc_feature: MA Experiment ID: 20000166 Result: Down-regulated in Transcription
  misc_feature: MA Experiment 20000166 PARAMETER Experiment Name: At_100uM_ABA_P Parameter: Age (day) Value: 14
  misc_feature: MA Experiment 20000166 PARAMETER Experiment Name: At_100uM_ABA_P Parameter: Organism Value: A. thaliana
  misc_feature: MA Experiment 20000166 PARAMETER Experiment Name: At_100uM_ABA_P Parameter: Plant Line Value: WS
  misc_feature: MA Experiment 20000166 PARAMETER Experiment Name: At_100uM_ABA_P Parameter: Timepoint (hr) Value: 1
  misc_feature: MA Experiment 20000166 PARAMETER Experiment Name: At_100uM_ABA_P Parameter: Tissue Value: Aerial
  misc_feature: MA Experiment 20000166 PARAMETER Experiment Name: At_100uM_ABA_P Parameter: Treatment Value: 100uM ABA vs. No Treatment
  misc_feature: MA Experiment ID: 20000184 Result: Down-regulated in Transcription
  misc_feature: MA Experiment 20000184 PARAMETER Experiment Name: At_Shoots__P Parameter: Age (day) Value: 7
  misc_feature: MA Experiment 20000184 PARAMETER Experiment Name: At_Shoots__P Parameter: Tissue Value: Shoots vs. Whole Plant
  misc_feature: MA Experiment ID: 20000214 Result: Down-regulated in Transcription
  misc_feature: MA Experiment 20000214 PARAMETER Experiment Name: At_4deg_Cold_P Parameter: Timepoint (hr) Value: 6
  misc_feature: MA Experiment ID: 20000234 Result: Up-regulated in Transcription
  misc_feature: MA Experiment 20000234 PARAMETER Experiment Name: At_Siliques_P Parameter: Age (day) Value: 21
  misc_feature: MA Experiment 20000234 PARAMETER Experiment Name: At_Siliques_P Parameter: Organism Value: A. thaliana
  misc_feature: MA Experiment 20000234 PARAMETER Experiment Name: At_Siliques_P Parameter: Plant Line Value: WS
  misc_feature: MA Experiment 20000234 PARAMETER Experiment Name: At_Siliques_P Parameter: Tissue Value: Less Than 5mm Siliques vs. Whole Plant
  misc_feature: MA Experiment ID: 20000264 Result: Up-regulated in Transcription
  misc_feature: MA Experiment 20000264 PARAMETER Experiment Name: At_Open_Flower_P Parameter: Age (day) Value: 21
  misc_feature: MA Experiment 20000264 PARAMETER Experiment Name: At_Open_Flower_P Parameter: Plant Line Value: WS
  misc_feature: MA Experiment 20000264 PARAMETER Experiment Name: At_Open_Flower_P Parameter: Tissue Value: Open Flower vs. Whole Plant
  misc_feature: MA Experiment ID: 20000265 Result: Up-regulated in Transcription
  misc_feature: MA Experiment 20000265 PARAMETER Experiment Name: At_Open_Flower_P Parameter: Age (day) Value: 21
  misc_feature: MA Experiment 20000265 PARAMETER Experiment Name: At_Open_Flower_P Parameter: Plant Line Value: WS
  misc_feature: MA Experiment 20000265 PARAMETER Experiment Name: At_Open_Flower_P Parameter: Tissue Value: Closed Flower vs. Whole Plant
  misc_feature: MA Experiment ID: 20000268 Result: Down-regulated in Transcription
  misc_feature: MA Experiment 20000268 PARAMETER Experiment Name: At_100mM_NaCl__P Parameter: Age (day) Value: 14
  misc_feature: MA Experiment 20000268 PARAMETER Experiment Name: At_100mM_NaCl__P Parameter: Organism Value: A. thaliana
  misc_feature: MA Experiment 20000268 PARAMETER Experiment Name: At_100mM_NaCl__P Parameter: Plant Line Value: WS
  misc_feature: MA Experiment 20000268 PARAMETER Experiment Name: At_100mM_NaCl__P Parameter: Timepoint (hr) Value: 6
  misc_feature: MA Experiment 20000268 PARAMETER Experiment Name: At_100mM_NaCl__P Parameter: Tissue Value: Whole Plant
  misc_feature: MA Experiment 20000268 PARAMETER Experiment Name: At_100mM_NaCl__P Parameter: Treatment Value: 100mM NaCl vs. No Treatment
  misc_feature: MA Experiment ID: 20000269 Result: Up-regulated in Transcription
  misc_feature: MA Experiment 20000269 PARAMETER Experiment Name: At_1mM_KNO3_L-vs-H_Roots_P Parameter: Age (day) Value: 7,10,12
  misc_feature: MA Experiment 20000269 PARAMETER Experiment Name: At_1mM_KNO3_L-vs-H_Roots_P Parameter: Organism Value: A. thaliana
  misc_feature: MA Experiment 20000269 PARAMETER Experiment Name: At_1mM_KNO3_L-vs-H_Roots_P Parameter: Plant Line Value: WS
  misc_feature: MA Experiment 20000269 PARAMETER Experiment Name: At_1mM_KNO3_L-vs-H_Roots_P Parameter: Timepoint (day) Value: 7,10,12
  misc_feature: MA Experiment 20000269 PARAMETER Experiment Name: At_1mM_KNO3_L-vs-H_Roots_P Parameter: Tissue Value: Roots
  misc_feature: MA Experiment 20000269 PARAMETER Experiment Name: At_1mM_KNO3_L-vs-H_Roots_P Parameter: Treatment Value: 1mM KNO3 vs. 50mM KNO3
  misc_feature: MA Experiment ID: 20000286 Result: Up-regulated in Transcription
  misc_feature: MA Experiment 20000286 PARAMETER Experiment Name: At_Open_Flower_P Parameter: Age (day) Value: 21
  misc_feature: MA Experiment 20000286 PARAMETER Experiment Name: At_Open_Flower_P Parameter: Plant Line Value: WS
  misc_feature: MA Experiment 20000286 PARAMETER Experiment Name: At_Open_Flower_P Parameter: Tissue Value: Half Open vs. Whole Plant
  misc_feature: MA Experiment ID: 20000436 Result: Down-regulated in Transcription
  misc_feature: MA Experiment 20000436 PARAMETER Experiment Name: At_Drought_P Parameter: Age (day) Value: 7
  misc_feature: MA Experiment 20000436 PARAMETER Experiment Name: At_Drought_P Parameter: Organism Value: A. thaliana
  misc_feature: MA Experiment 20000436 PARAMETER Experiment Name: At_Drought_P Parameter: Plant Line Value: WS
  misc_feature: MA Experiment 20000436 PARAMETER Experiment Name: At_Drought_P Parameter: Timepoint (hr) Value: 12
  misc_feature: MA Experiment 20000436 PARAMETER Experiment Name: At_Drought_P Parameter: Tissue Value: Whole Plant
  misc_feature: MA Experiment 20000436 PARAMETER Experiment Name: At_Drought_P Parameter: Treatment Value: Drought vs. No Drought
  misc_feature: MA Experiment ID: 20000438 Result: Down-regulated in Transcription
  misc_feature: MA Experiment 20000438 PARAMETER Experiment Name: At_Shoots__P Parameter: Age (day) Value: 14
  misc_feature: MA Experiment 20000438 PARAMETER Experiment Name: At_Shoots__P Parameter: Tissue Value: Shoots vs. Whole Plant
  misc_feature: MA Experiment ID: 20000439 Result: Up-regulated in Transcription
  misc_feature: MA Experiment 20000439 PARAMETER Experiment Name: At_Roots__P Parameter: Age (day) Value: 14 vs. 21
  misc_feature: MA Experiment 20000439 PARAMETER Experiment Name: At_Roots__P Parameter: Organism Value: A. thaliana
  misc_feature: MA Experiment 20000439 PARAMETER Experiment Name: At_Roots__P Parameter: Tissue Value: Roots vs. Whole Plant
  misc_feature: MA Experiment ID: 20000453 Result: Up-regulated in Transcription
  misc_feature: MA Experiment 20000453 PARAMETER Experiment Name: At_100uM_ABA_P Parameter: Age (day) Value: 15
  misc_feature: MA Experiment 20000453 PARAMETER Experiment Name: At_100uM_ABA_P Parameter: Organism Value: A. thaliana
  misc_feature: MA Experiment 20000453 PARAMETER Experiment Name: At_100uM_ABA_P Parameter: Plant Line Value: WS
  misc_feature: MA Experiment 20000453 PARAMETER Experiment Name: At_100uM_ABA_P Parameter: Timepoint (hr) Value: 24
  misc_feature: MA Experiment 20000453 PARAMETER Experiment Name: At_100uM_ABA_P Parameter: Tissue Value: Aerial
  misc_feature: MA Experiment 20000453 PARAMETER Experiment Name: At_100uM_ABA_P Parameter: Treatment Value: 100uM ABA vs. No Treatment
  misc_feature: MA Experiment ID: 20000573 Result: Up-regulated in Transcription
  misc_feature: MA Experiment 20000573 PARAMETER Experiment Name: At_100uM_ABA_Mutants__P Parameter: Organism Value: A. thaliana
  misc_feature: MA Experiment 20000573 PARAMETER Experiment Name: At_100uM_ABA_Mutants__P Parameter: Plant Line Value: CS22 vs. Ler wt
  misc_feature: MA Experiment 20000573 PARAMETER Experiment Name: At_100uM_ABA_Mutants__P Parameter: Timepoint (hr) Value: N/A
  misc_feature: MA Experiment 20000573 PARAMETER Experiment Name: At_100uM_ABA_Mutants__P Parameter: Tissue Value: Whole Plant
  misc_feature: MA Experiment 20000573 PARAMETER Experiment Name: At_100uM_ABA_Mutants__P Parameter: Treatment Value: None
  misc_feature: MA Experiment ID: 20000574 Result: Up-regulated in Transcription
  misc_feature: MA Experiment 20000574 PARAMETER Experiment Name: At_100uM_ABA_Mutants__P Parameter: Organism Value: A. thaliana
  misc_feature: MA Experiment 20000574 PARAMETER Experiment Name: At_100uM_ABA_Mutants__P Parameter: Plant Line Value: CS23 vs. Ler wt
  misc_feature: MA Experiment 20000574 PARAMETER Experiment Name: At_100uM_ABA_Mutants__P Parameter: Timepoint (hr) Value: N/A
  misc_feature: MA Experiment 20000574 PARAMETER Experiment Name: At_100uM_ABA_Mutants__P Parameter: Tissue Value: Whole Plant
  misc_feature: MA Experiment 20000574 PARAMETER Experiment Name: At_100uM_ABA_Mutants__P Parameter: Treatment Value: None
  misc_feature: MA Experiment ID: 20000794 Result: Up-regulated in Transcription
  misc_feature: MA Experiment 20000794 PARAMETER Experiment Name: At_Petals_P Parameter: Age (day) Value: 23-25 days
  misc_feature: MA Experiment 20000794 PARAMETER Experiment Name: At_Petals_P Parameter: Plant Line Value: WS
  misc_feature: MA Experiment 20000794 PARAMETER Experiment Name: At_Petals_P Parameter: Tissue Value: Petals vs. Whole plant
  misc_feature: MA Experiment ID: 20001554 Result: Down-regulated in Transcription
  misc_feature: MA Experiment 20001554 PARAMETER Experiment Name: At_Drought_Soil_Dry_P Parameter: Age (day) Value: 21
  misc_feature: MA Experiment 20001554 PARAMETER Experiment Name: At_Drought_Soil_Dry_P Parameter: Organism Value: A. thaliana
  misc_feature: MA Experiment 20001554 PARAMETER Experiment Name: At_Drought_Soil_Dry_P Parameter: Plant Line Value: WS
  misc_feature: MA Experiment 20001554 PARAMETER Experiment Name: At_Drought_Soil_Dry_P Parameter: Post Timepoint (hr) Value: None
  misc_feature: MA Experiment 20001554 PARAMETER Experiment Name: At_Drought_Soil_Dry_P Parameter: Post-Treatment Value: None
  misc_feature: MA Experiment 20001554 PARAMETER Experiment Name: At_Drought_Soil_Dry_P Parameter: Timepoint (day) Value: 7
  misc_feature: MA Experiment 20001554 PARAMETER Experiment Name: At_Drought_Soil_Dry_P Parameter: Treatment Value: Drought vs. No Drought
  misc_feature: MA Experiment ID: 20001557 Result: Up-regulated in Transcription
  misc_feature: MA Experiment 20001557 PARAMETER Experiment Name: At_Drought_Soil_Dry_P Parameter: Age (day) Value: 27
  misc_feature: MA Experiment 20001557 PARAMETER Experiment Name: At_Drought_Soil_Dry_P Parameter: Organism Value: A. thaliana
  misc_feature: MA Experiment 20001557 PARAMETER Experiment Name: At_Drought_Soil_Dry_P Parameter: Plant Line Value: WS
  misc_feature: MA Experiment 20001557 PARAMETER Experiment Name: At_Drought_Soil_Dry_P Parameter: Post Timepoint (hr) Value: 3
  misc_feature: MA Experiment 20001557 PARAMETER Experiment Name: At_Drought_Soil_Dry_P Parameter: Post-Treatment Value: Re-Water vs. No Drought
  misc_feature: MA Experiment 20001557 PARAMETER Experiment Name: At_Drought_Soil_Dry_P Parameter: Timepoint (day) Value: 13
  misc_feature: MA Experiment 20001557 PARAMETER Experiment Name: At_Drought_Soil_Dry_P Parameter: Treatment Value: Drought vs. No Drought
  misc_feature: MA Experiment ID: 20001558 Result: Up-regulated in Transcription
  misc_feature: MA Experiment 20001558 PARAMETER Experiment Name: At_Drought_Soil_Dry_P Parameter: Age (day) Value: 27
  misc_feature: MA Experiment 20001558 PARAMETER Experiment Name: At_Drought_Soil_Dry_P Parameter: Organism Value: A. thaliana
  misc_feature: MA Experiment 20001558 PARAMETER Experiment Name: At_Drought_Soil_Dry_P Parameter: Plant Line Value: WS
  misc_feature: MA Experiment 20001558 PARAMETER Experiment Name: At_Drought_Soil_Dry_P Parameter: Post Timepoint (hr) Value: 6
  misc_feature: MA Experiment 20001558 PARAMETER Experiment Name: At_Drought_Soil_Dry_P Parameter: Post-Treatment Value: Re-Water vs. No Drought
  misc_feature: MA Experiment 20001558 PARAMETER Experiment Name: At_Drought_Soil_Dry_P Parameter: Timepoint (day) Value: 13
  misc_feature: MA Experiment 20001558 PARAMETER Experiment Name: At_Drought_Soil_Dry_P Parameter: Treatment Value: Drought vs. No Drought
  misc_feature: MA Experiment ID: 20001560 Result: Up-regulated in Transcription
  misc_feature: MA Experiment 20001560 PARAMETER Experiment Name: At_Drought_Soil_Dry_P Parameter: Age (day) Value: 28
  misc_feature: MA Experiment 20001560 PARAMETER Experiment Name: At_Drought_Soil_Dry_P Parameter: Organism Value: A. thaliana
  misc_feature: MA Experiment 20001560 PARAMETER Experiment Name: At_Drought_Soil_Dry_P Parameter: Plant Line Value: WS
  misc_feature: MA Experiment 20001560 PARAMETER Experiment Name: At_Drought_Soil_Dry_P Parameter: Post Timepoint (hr) Value: None
  misc_feature: MA Experiment 20001560 PARAMETER Experiment Name: At_Drought_Soil_Dry_P Parameter: Post-Treatment Value: None
  misc_feature: MA Experiment 20001560 PARAMETER Experiment Name: At_Drought_Soil_Dry_P Parameter: Timepoint (day) Value: 14
  misc_feature: MA Experiment 20001560 PARAMETER Experiment Name: At_Drought_Soil_Dry_P Parameter: Treatment Value: Drought vs. No Drought
  misc_feature: MA Experiment ID: 20001757 Result: Up-regulated in Transcription
  misc_feature: MA Experiment 20001757 PARAMETER Experiment Name: At_50mM_NH4NO3_L-to-H_P Parameter: Timepoint (hr) Value: 6
  misc_feature: MA Experiment 20001757 PARAMETER Experiment Name: At_50mM_NH4NO3_L-to-H_P Parameter: Tissue Value: Leaf
  misc_feature: MA Experiment 20001757 PARAMETER Experiment Name: At_50mM_NH4NO3_L-to-H_P Parameter: Treatment Value: 50mM NH4NO3 vs 100mM Mannitol
  misc_feature: MA Experiment ID: 20001906 Result: Up-regulated in Transcription
  misc_feature: MA Experiment 20001906 PARAMETER Experiment Name: At_Drought_Reproduction_P Parameter: Age (day) Value: 35
  misc_feature: MA Experiment 20001906 PARAMETER Experiment Name: At_Drought_Reproduction_P Parameter: Organism Value: A. thaliana
  misc_feature: MA Experiment 20001906 PARAMETER Experiment Name: At_Drought_Reproduction_P Parameter: Plant Line Value: WS
  misc_feature: MA Experiment 20001906 PARAMETER Experiment Name: At_Drought_Reproduction_P Parameter: Timepoint (day) Value: 5
  misc_feature: MA Experiment 20001906 PARAMETER Experiment Name: At_Drought_Reproduction_P Parameter: Tissue Value: Siliques
  misc_feature: MA Experiment 20001906 PARAMETER Experiment Name: At_Drought_Reproduction_P Parameter: Treatment Value: Drought vs. No Drought

SEQ ID NO: 38454 - protein, 482 aa, Arabidopsis thaliana; identical to SEQ ID NO: 26636
  peptide (1)..(482): Ceres Seq. ID no. 12326658
  misc_feature (47)..(478): Pfam Name: Sugar (and other) transporter Pfam Description: Sugar (and other) transporter
  misc_feature (47)..(478): Pfam Name: Sugar (and other) transporter Pfam Description: Sugar (and other) transporter
  misc_feature (378)..(478): Homolog of NCBI NO: 25405762 NR Description: hypothetical protein T22H22.15 [imported] -
  misc_feature (1)..(326): Homolog of NCBI NO: 25405762 NR Description: hypothetical protein T22H22.15 [imported] -
  misc_feature (33)..(478): Homolog of NCBI NO: 30695810 NR Description: sugar transporter, putative [Arabidopsis thaliana]
  misc_feature (43)..(478): Homolog of NCBI NO: 21536914 NR Description: putative sugar transporter [Arabidopsis thaliana]
  misc_feature (43)..(478): Homolog of NCBI NO: 18407508 NR Description: putative sugar transporter
  misc_feature (378)..(478): Homolog of NCBI NO: 25405762 NR Description: hypothetical protein T22H22.15 [imported] -
  misc_feature (33)..(478): Homolog of NCBI NO: 30695810 NR Description: sugar transporter, putative [Arabidopsis thaliana]
  misc_feature (43)..(478): Homolog of NCBI NO: 18407508 NR Description: putative sugar transporter
  misc_feature (1)..(482): Homolog of NCBI NO: 18419741 NR Description: sugar transporter - like protein
  misc_feature (1)..(482): Homolog of NCBI NO: 21592787 NR Description: sugar transporter-like protein [Arabidopsis
  misc_feature (7)..(478): Homolog of NCBI NO: 23504385 NR Description: putative sugar transporter [Lycopersicon
  misc_feature (11)..(476): Homolog of NCBI NO: 30679397 NR Description: sugar transporter family [Arabidopsis thaliana]
  misc_feature (15)..(476): Homolog of NCBI NO: 6729025 NR Description: putative sugar transporter [Arabidopsis thaliana]
  misc_feature (43)..(478): Homolog of NCBI NO: 21536914 NR Description: putative sugar transporter [Arabidopsis thaliana]
  misc_feature (1)..(326): Homolog of NCBI NO: 25405762 NR Description: hypothetical protein T22H22.15 [imported] -
  misc_feature (15)..(476): Homolog of NCBI NO: 6729025 NR Description: putative sugar transporter [Arabidopsis thaliana]
  misc_feature (11)..(476): Homolog of NCBI NO: 30679397 NR Description: sugar transporter family [Arabidopsis thaliana]
  misc_feature (7)..(478): Homolog of NCBI NO: 23504385 NR Description: putative sugar transporter [Lycopersicon
  misc_feature (1)..(482): Homolog of NCBI NO: 21592787 NR Description: sugar transporter-like protein [Arabidopsis
  misc_feature (1)..(482): Homolog of NCBI NO: 18419741 NR Description: sugar transporter - like protein

SEQ ID NO: 38455 - protein, 440 aa, Arabidopsis thaliana; identical to SEQ ID NO: 26637
  peptide (1)..(440): Ceres Seq. ID no. 12326659
  misc_feature (5)..(436): Pfam Name: Sugar (and other) transporter Pfam Description: Sugar (and other) transporter
  misc_feature (5)..(436): Pfam Name: Sugar (and other) transporter Pfam Description: Sugar (and other) transporter
  misc_feature (336)..(436): Homolog of NCBI NO: 25405762 NR Description: hypothetical protein T22H22.15 [imported] -
  misc_feature (1)..(284): Homolog of NCBI NO: 25405762 NR Description: hypothetical protein T22H22.15 [imported] -
  misc_feature (1)..(436): Homolog of NCBI NO: 30695810 NR Description: sugar transporter, putative [Arabidopsis thaliana]
  misc_feature (1)..(436): Homolog of NCBI NO: 21536914 NR Description: putative sugar transporter [Arabidopsis thaliana]
  misc_feature (1)..(436): Homolog of NCBI NO: 18407508 NR Description: putative sugar transporter
  misc_feature (336)..(436): Homolog of NCBI NO: 25405762 NR Description: hypothetical protein T22H22.15 [imported] -
  misc_feature (1)..(436): Homolog of NCBI NO: 30695810 NR Description: sugar transporter, putative [Arabidopsis thaliana]
  misc_feature (1)..(436): Homolog of NCBI NO: 18407508 NR Description: putative sugar transporter
  misc_feature (1)..(440): Homolog of NCBI NO: 18419741 NR Description: sugar transporter - like protein
  misc_feature (1)..(440): Homolog of NCBI NO: 21592787 NR Description: sugar transporter-like protein [Arabidopsis
  misc_feature (1)..(436): Homolog of NCBI NO: 23504385 NR Description: putative sugar transporter [Lycopersicon
  misc_feature (1)..(434): Homolog of NCBI NO: 30679397 NR Description: sugar transporter family [Arabidopsis thaliana]
  misc_feature (1)..(434): Homolog of NCBI NO: 6729025 NR Description: putative sugar transporter [Arabidopsis thaliana]
  misc_feature (1)..(436): Homolog of NCBI NO: 21536914 NR Description: putative sugar transporter [Arabidopsis thaliana]
  misc_feature (1)..(284): Homolog of NCBI NO: 25405762 NR Description: hypothetical protein T22H22.15 [imported] -
  misc_feature (1)..(434): Homolog of NCBI NO: 6729025 NR Description: putative sugar transporter [Arabidopsis thaliana]
  misc_feature (1)..(434): Homolog of NCBI NO: 30679397 NR Description: sugar transporter family [Arabidopsis thaliana]
  misc_feature (1)..(436): Homolog of NCBI NO: 23504385 NR Description: putative sugar transporter [Lycopersicon
  misc_feature (1)..(440): Homolog of NCBI NO: 21592787 NR Description: sugar transporter-like protein [Arabidopsis
  misc_feature (1)..(440): Homolog of NCBI NO: 18419741 NR Description: sugar transporter - like protein

SEQ ID NO: 38456 - protein, 398 aa, Arabidopsis thaliana; identical to SEQ ID NO: 26638
  peptide (1)..(398): Ceres Seq. ID no. 12326660
  misc_feature (1)..(394): Pfam Name: Sugar (and other) transporter Pfam Description: Sugar (and other) transporter
  misc_feature (1)..(394): Pfam Name: Sugar (and other) transporter Pfam Description: Sugar (and other) transporter
  misc_feature (294)..(394): Homolog of NCBI NO: 25405762 NR Description: hypothetical protein T22H22.15 [imported] -
  misc_feature (1)..(242): Homolog of NCBI NO: 25405762 NR Description: hypothetical protein T22H22.15 [imported] -
  misc_feature (1)..(394): Homolog of NCBI NO: 30695810 NR Description: sugar transporter, putative [Arabidopsis thaliana]
  misc_feature (1)..(394): Homolog of NCBI NO: 21536914 NR Description: putative sugar transporter [Arabidopsis thaliana]
  misc_feature (1)..(394): Homolog of NCBI NO: 18407508 NR Description: putative sugar transporter
  misc_feature (294)..(394): Homolog of NCBI NO: 25405762 NR Description: hypothetical protein T22H22.15 [imported] -
  misc_feature (1)..(394): Homolog of NCBI NO: 30695810 NR Description: sugar transporter, putative [Arabidopsis thaliana]
  misc_feature (1)..(394): Homolog of NCBI NO: 18407508 NR Description: putative sugar transporter
  misc_feature (1)..(398): Homolog of NCBI NO: 18419741 NR Description: sugar transporter - like protein
  misc_feature (1)..(398): Homolog of NCBI NO: 21592787 NR Description: sugar transporter-like protein [Arabidopsis
  misc_feature (1)..(394): Homolog of NCBI NO: 23504385 NR Description: putative sugar transporter [Lycopersicon
  misc_feature (1)..(392): Homolog of NCBI NO: 30679397 NR Description: sugar transporter family [Arabidopsis thaliana]
  misc_feature (1)..(392): Homolog of NCBI NO: 6729025 NR Description: putative sugar transporter [Arabidopsis thaliana]
  misc_feature (1)..(394): Homolog of NCBI NO: 21536914 NR Description: putative sugar transporter [Arabidopsis thaliana]
  misc_feature (1)..(242): Homolog of NCBI NO: 25405762 NR Description: hypothetical protein T22H22.15 [imported] -
  misc_feature (1)..(392): Homolog of NCBI NO: 6729025 NR Description: putative sugar transporter [Arabidopsis thaliana]
  misc_feature (1)..(392): Homolog of NCBI NO: 30679397 NR Description: sugar transporter family [Arabidopsis thaliana]
  misc_feature (1)..(394): Homolog of NCBI NO: 23504385 NR Description: putative sugar transporter [Lycopersicon
  misc_feature (1)..(398): Homolog of NCBI NO: 21592787 NR Description: sugar transporter-like protein [Arabidopsis
  misc_feature (1)..(398): Homolog of NCBI NO: 18419741 NR Description: sugar transporter - like protein

SEQ ID NO: 38457 - DNA, 793 bp, Arabidopsis thaliana
  misc_feature (1)..(793): Ceres Seq. ID no. 12394112
  misc_feature: MA Experiment ID: 108435 Result: Down-regulated in Transcription
  misc_feature: MA Experiment 108435 PARAMETER Experiment Name: At_stm_Mutants_cDNA_P Parameter: Plant Line Value: wt Landsburg vs stm
  misc_feature: MA Experiment 108435 PARAMETER Experiment Name: At_stm_Mutants_cDNA_P Parameter: Tissue Value: Shoot Apical Meristem Region
  misc_feature: MA Experiment ID: 108462 Result: Up-regulated in Transcription
  misc_feature: MA Experiment 108462 PARAMETER Experiment Name: At_Germinating_Seeds_cDNA_P Parameter: Age (day) Value: 2 vs. 0
  misc_feature: MA Experiment 108462 PARAMETER Experiment Name: At_Germinating_Seeds_cDNA_P Parameter: Tissue Value: Germinating Seeds
  misc_feature: MA Experiment ID: 108464 Result: Up-regulated in Transcription
  misc_feature: MA Experiment 108464 PARAMETER Experiment Name: At_Germinating_Seeds_cDNA_P Parameter: Age (day) Value: 4 vs. 0
  misc_feature: MA Experiment 108464 PARAMETER Experiment Name: At_Germinating_Seeds_cDNA_P Parameter: Tissue Value: Germinating Seeds
  misc_feature: MA Experiment ID: 108595 Result: Down-regulated in Transcription
  misc_feature: MA Experiment 108595 PARAMETER Experiment Name: At_Ler-pi_Ovule_cDNA_P Parameter: Plant Line Value: null
  misc_feature: MA Experiment ID: 20000180 Result: Up-regulated in Transcription
  misc_feature: MA Experiment 20000180 PARAMETER Experiment Name: At_Germinating_Seeds_P Parameter: Age (hr) Value: 24 vs. 0
  misc_feature: MA Experiment 20000180 PARAMETER Experiment Name: At_Germinating_Seeds_P Parameter: Tissue Value: Germinating Seeds
  misc_feature: MA Experiment ID: 20000185 Result: Down-regulated in Transcription
  misc_feature: MA Experiment 20000185 PARAMETER Experiment Name: At_Roots__P Parameter: Age (day) Value: 7 vs. 21
  misc_feature: MA Experiment 20000185 PARAMETER Experiment Name: At_Roots__P Parameter: Organism Value: A. thaliana
  misc_feature: MA Experiment 20000185 PARAMETER Experiment Name: At_Roots__P Parameter: Tissue Value: Roots vs. Whole Plant
  misc_feature: MA Experiment ID: 20000286 Result: Down-regulated in Transcription
  misc_feature: MA Experiment 20000286 PARAMETER Experiment Name: At_Open_Flower_P Parameter: Age (day) Value: 21
  misc_feature: MA Experiment 20000286 PARAMETER Experiment Name: At_Open_Flower_P Parameter: Plant Line Value: WS
  misc_feature: MA Experiment 20000286 PARAMETER Experiment Name: At_Open_Flower_P Parameter: Tissue Value: Half Open vs. Whole Plant
  misc_feature: MA Experiment ID: 20000439 Result: Down-regulated in Transcription
  misc_feature: MA Experiment 20000439 PARAMETER Experiment Name: At_Roots__P Parameter: Age (day) Value: 14 vs. 21
  misc_feature: MA Experiment 20000439 PARAMETER Experiment Name: At_Roots__P Parameter: Organism Value: A. thaliana
  misc_feature: MA Experiment 20000439 PARAMETER Experiment Name: At_Roots__P Parameter: Tissue Value: Roots vs. Whole Plant
  misc_feature: MA Experiment ID: 20000794 Result: Down-regulated in Transcription
  misc_feature: MA Experiment 20000794 PARAMETER Experiment Name: At_Petals_P Parameter: Age (day) Value: 23-25 days
  misc_feature: MA Experiment 20000794 PARAMETER Experiment Name: At_Petals_P Parameter: Plant Line Value: WS
  misc_feature: MA Experiment 20000794 PARAMETER Experiment Name: At_Petals_P Parameter: Tissue Value: Petals vs. Whole plant
  misc_feature: MA Experiment ID: 20001557 Result: Down-regulated in Transcription
  misc_feature: MA Experiment 20001557 PARAMETER Experiment Name: At_Drought_Soil_Dry_P Parameter: Age (day) Value: 27
  misc_feature: MA Experiment 20001557 PARAMETER Experiment Name: At_Drought_Soil_Dry_P Parameter: Organism Value: A. thaliana
  misc_feature: MA Experiment 20001557 PARAMETER Experiment Name: At_Drought_Soil_Dry_P Parameter: Plant Line Value: WS
  misc_feature: MA Experiment 20001557 PARAMETER Experiment Name: At_Drought_Soil_Dry_P Parameter: Post Timepoint (hr) Value: 3
  misc_feature: MA Experiment 20001557 PARAMETER Experiment Name: At_Drought_Soil_Dry_P Parameter: Post-Treatment Value: Re-Water vs. No Drought
  misc_feature: MA Experiment 20001557 PARAMETER Experiment Name: At_Drought_Soil_Dry_P Parameter: Timepoint (day) Value: 13
  misc_feature: MA Experiment 20001557 PARAMETER Experiment Name: At_Drought_Soil_Dry_P Parameter: Treatment Value: Drought vs. No Drought
  misc_feature: MA Experiment ID: 20001558 Result: Down-regulated in Transcription
  misc_feature: MA Experiment 20001558 PARAMETER Experiment Name: At_Drought_Soil_Dry_P Parameter: Age (day) Value: 27
  misc_feature: MA Experiment 20001558 PARAMETER Experiment Name: At_Drought_Soil_Dry_P Parameter: Organism Value: A. thaliana
  misc_feature: MA Experiment 20001558 PARAMETER Experiment Name: At_Drought_Soil_Dry_P Parameter: Plant Line Value: WS
  misc_feature: MA Experiment 20001558 PARAMETER Experiment Name: At_Drought_Soil_Dry_P Parameter: Post Timepoint (hr) Value: 6
  misc_feature: MA Experiment 20001558 PARAMETER Experiment Name: At_Drought_Soil_Dry_P Parameter: Post-Treatment Value: Re-Water vs. No Drought
  misc_feature: MA Experiment 20001558 PARAMETER Experiment Name: At_Drought_Soil_Dry_P Parameter: Timepoint (day) Value: 13
  misc_feature: MA Experiment 20001558 PARAMETER Experiment Name: At_Drought_Soil_Dry_P Parameter: Treatment Value: Drought vs. No Drought
  misc_feature: MA Experiment ID: 20001905 Result: Down-regulated in Transcription
  misc_feature: MA Experiment 20001905 PARAMETER Experiment Name: At_Drought_Reproduction_P Parameter: Age (day) Value: 40
  misc_feature: MA Experiment 20001905 PARAMETER Experiment Name: At_Drought_Reproduction_P Parameter: Organism Value: A. thaliana
  misc_feature: MA Experiment 20001905 PARAMETER Experiment Name: At_Drought_Reproduction_P Parameter: Plant Line Value: WS
  misc_feature: MA Experiment 20001905 PARAMETER Experiment Name: At_Drought_Reproduction_P Parameter: Timepoint (day) Value: 10
  misc_feature: MA Experiment 20001905 PARAMETER Experiment Name: At_Drought_Reproduction_P Parameter: Tissue Value: Rosettes
  misc_feature: MA Experiment 20001905 PARAMETER Experiment Name: At_Drought_Reproduction_P Parameter: Treatment Value: Drought vs. No Drought
aagtcattcaaattgtcacccgtatctgccaaaaaccctctaaccactcaaaaaaatatctctgctctgctccaatggcgtcgttactcgattccgtcaccgtgacccgcgtgttttctctgccgattgcggcttcggtctcgtcttcttcagctgctccgtcggtttcacgacgccggatttctcccgccaggtttctggaattcagaggtttgaagtcttcgcggagtttggtgactcagtcggccagtctgggtgcgaatcgtagaaccagaatcgctcgcggtggacgaatcgcctgtgaggctcaggacaccactgccgccgccgtcgaagtaccaaatctgtctgattcagaatggcaaacaaaggttctggaatcagatgtcccagttctggtcgagttctgggcaccatggtgtggaccttgccgtatgattcaccccatagttgaccagctaggccaaagatttcgcagggaagttcaaattctacaaaatcaacactgacgagagcccaaatacagcaaaccgttacgggatacgaagcgttccaacagtaatcatcttcaaaggcggtgagaagaaagatagcatcattggagctgtgcctagagagacgttggagaaaactatagaaagattcttggtcgagtaacaaaatttgactcttttgtcactctgaaccattttaccttatcttctctcttgtaatctctgtaaagtcttttaagtttttgactattatgttatcgtgggtcctctttgtcttcttcaataaaaaaaatggaaac

SEQ ID NO: 38458 - protein, 168 aa, Arabidopsis thaliana
  peptide (1)..(168): Ceres Seq. ID no. 12394113
  misc_feature (40)..(163): Homolog of NCBI NO: 21354 NR Description: thioredoxin M precursor (AA -67 to 114) [Spinacia
  misc_feature (25)..(162): Homolog of NCBI NO: 38346628 NR Description: OSJNBa0074L08.22 [Oryza sativa (japonica
  misc_feature (48)..(157): Homolog of NCBI NO: 30678634 NR Description: thioredoxin M-type 1, chloroplast precursor
  misc_feature (39)..(165): Homolog of NCBI NO: 11135407 NR Description: Thioredoxin M-type, chloroplast precursor (TRX-M)
  misc_feature (46)..(162): Homolog of NCBI NO: 21618235 NR Description: putative M-type thioredoxin [Arabidopsis thaliana]
  misc_feature (46)..(162): Homolog of NCBI NO: 6539610 NR Description: thioredoxin m2 [Arabidopsis thaliana]
  misc_feature (46)..(162): Homolog of NCBI NO: 15236327 NR Description: putative M-type thioredoxin
  misc_feature (38)..(157): Homolog of NCBI NO: 15594012 NR Description: putative thioredoxin m2 [Pisum sativum]
  misc_feature (25)..(157): Homolog of NCBI NO: 6539614 NR Description: thioredoxin m4 [Arabidopsis thaliana]
  misc_feature (25)..(157): Homolog of NCBI NO: 15232567 NR Description: thioredoxin m4
VIQIVTRICQKPSNHSKKYLCSAPMASLLDSVTVTRVFSLPIAASVSSSSAAPSVSRRRISPARFLEFRGLKSSRSLVTQSASLGANRRTRIARGGRIACEAQDTTAAAVEVPNLSDSEWQTKVLESDVPVLVEFWAPWCGPCRMIHPIVDQLGQRFRREVQILQNQH

SEQ ID NO: 38459 - protein, 144 aa, Arabidopsis thaliana
  peptide (1)..(144): Ceres Seq. ID no. 12394114
  misc_feature (16)..(139): Homolog of NCBI NO: 21354 NR Description: thioredoxin M precursor (AA -67 to 114) [Spinacia
  misc_feature (1)..(138): Homolog of NCBI NO: 38346628 NR Description: OSJNBa0074L08.22 [Oryza sativa (japonica
  misc_feature (24)..(133): Homolog of NCBI NO: 30678634 NR Description: thioredoxin M-type 1, chloroplast precursor
  misc_feature (15)..(141): Homolog of NCBI NO: 11135407 NR Description: Thioredoxin M-type, chloroplast precursor (TRX-M)
  misc_feature (22)..(138): Homolog of NCBI NO: 21618235 NR Description: putative M-type thioredoxin [Arabidopsis thaliana]
  misc_feature (22)..(138): Homolog of NCBI NO: 6539610 NR Description: thioredoxin m2 [Arabidopsis thaliana]
  misc_feature (22)..(138): Homolog of NCBI NO: 15236327 NR Description: putative M-type thioredoxin
  misc_feature (14)..(133): Homolog of NCBI NO: 15594012 NR Description: putative thioredoxin m2 [Pisum sativum]
  misc_feature (1)..(133): Homolog of NCBI NO: 6539614 NR Description: thioredoxin m4 [Arabidopsis thaliana]
  misc_feature (1)..(133): Homolog of NCBI NO: 15232567 NR Description: thioredoxin m4
MASLLDSVTVTRVFSLPIAASVSSSSAAPSVSRRRISPARFLEFRGLKSSRSLVTQSASLGANRRTRIARGGRIACEAQDTTAAAVEVPNLSDSEWQTKVLESDVPVLVEFWAPWCGPCRMIHPIVDQLGQRFRREVQILQNQH

SEQ ID NO: 38460 - DNA, 1175 bp, Arabidopsis thaliana
  misc_feature (1)..(1175): Ceres Seq. ID no. 13489378
  misc_feature: MA Experiment ID: 108561 Result: Up-regulated in Transcription
  misc_feature: MA Experiment 108561 PARAMETER Experiment Name: At_100uM_ABA_cDNA_P Parameter: Timepoint (hr) Value: 6
  misc_feature: MA Experiment 108561 PARAMETER Experiment Name: At_100uM_ABA_cDNA_P Parameter: Tissue Value: Aerial
  misc_feature: MA Experiment 108561 PARAMETER Experiment Name: At_100uM_ABA_cDNA_P Parameter: Treatment Value: 100uM ABA vs. No Treatment
  misc_feature: MA Experiment ID: 20000185 Result: Down-regulated in Transcription
  misc_feature: MA Experiment 20000185 PARAMETER Experiment Name: At_Roots__P Parameter: Age (day) Value: 7 vs. 21
  misc_feature: MA Experiment 20000185 PARAMETER Experiment Name: At_Roots__P Parameter: Organism Value: A. thaliana
  misc_feature: MA Experiment 20000185 PARAMETER Experiment Name: At_Roots__P Parameter: Tissue Value: Roots vs. Whole Plant
  misc_feature: MA Experiment ID: 20000264 Result: Up-regulated in Transcription
  misc_feature: MA Experiment 20000264 PARAMETER Experiment Name: At_Open_Flower_P Parameter: Age (day) Value: 21
  misc_feature: MA Experiment 20000264 PARAMETER Experiment Name: At_Open_Flower_P Parameter: Plant Line Value: WS
  misc_feature: MA Experiment 20000264 PARAMETER Experiment Name: At_Open_Flower_P Parameter: Tissue Value: Open Flower vs. Whole Plant
  misc_feature: MA Experiment ID: 20000286 Result: Up-regulated in Transcription
  misc_feature: MA Experiment 20000286 PARAMETER Experiment Name: At_Open_Flower_P Parameter: Age (day) Value: 21
  misc_feature: MA Experiment 20000286 PARAMETER Experiment Name: At_Open_Flower_P Parameter: Plant Line Value: WS
  misc_feature: MA Experiment 20000286 PARAMETER Experiment Name: At_Open_Flower_P Parameter: Tissue Value: Half Open vs. Whole Plant
  misc_feature: MA Experiment ID: 20000438 Result: Down-regulated in Transcription
  misc_feature: MA Experiment 20000438 PARAMETER Experiment Name: At_Shoots__P Parameter: Age (day) Value: 14
  misc_feature: MA Experiment 20000438 PARAMETER Experiment Name: At_Shoots__P Parameter: Tissue Value: Shoots vs. Whole Plant
  misc_feature: MA Experiment ID: 20000439 Result: Down-regulated in Transcription
  misc_feature: MA Experiment 20000439 PARAMETER Experiment Name: At_Roots__P Parameter: Age (day) Value: 14 vs. 21
  misc_feature: MA Experiment 20000439 PARAMETER Experiment Name: At_Roots__P Parameter: Organism Value: A. thaliana
  misc_feature: MA Experiment 20000439 PARAMETER Experiment Name: At_Roots__P Parameter: Tissue Value: Roots vs. Whole Plant
  misc_feature: MA Experiment ID: 20000573 Result: Up-regulated in Transcription
  misc_feature: MA Experiment 20000573 PARAMETER Experiment Name: At_100uM_ABA_Mutants__P Parameter: Organism Value: A. thaliana
  misc_feature: MA Experiment 20000573 PARAMETER Experiment Name: At_100uM_ABA_Mutants__P Parameter: Plant Line Value: CS22 vs. Ler wt
  misc_feature: MA Experiment 20000573 PARAMETER Experiment Name: At_100uM_ABA_Mutants__P Parameter: Timepoint (hr) Value: N/A
  misc_feature: MA Experiment 20000573 PARAMETER Experiment Name: At_100uM_ABA_Mutants__P Parameter: Tissue Value: Whole Plant
  misc_feature: MA Experiment 20000573 PARAMETER Experiment Name: At_100uM_ABA_Mutants__P Parameter: Treatment Value: None
  misc_feature: MA Experiment ID: 20000574 Result: Up-regulated in Transcription
  misc_feature: MA Experiment 20000574 PARAMETER Experiment Name: At_100uM_ABA_Mutants__P Parameter: Organism Value: A. thaliana
  misc_feature: MA Experiment 20000574 PARAMETER Experiment Name: At_100uM_ABA_Mutants__P Parameter: Plant Line Value: CS23 vs. Ler wt
  misc_feature: MA Experiment 20000574 PARAMETER Experiment Name: At_100uM_ABA_Mutants__P Parameter: Timepoint (hr) Value: N/A
  misc_feature: MA Experiment 20000574 PARAMETER Experiment Name: At_100uM_ABA_Mutants__P Parameter: Tissue Value: Whole Plant
  misc_feature: MA Experiment 20000574 PARAMETER Experiment Name: At_100uM_ABA_Mutants__P Parameter: Treatment Value: None
  misc_feature: MA Experiment ID: 20000794 Result: Up-regulated in Transcription
  misc_feature: MA Experiment 20000794 PARAMETER Experiment Name: At_Petals_P Parameter: Age (day) Value: 23-25 days
  misc_feature: MA Experiment 20000794 PARAMETER Experiment Name: At_Petals_P Parameter: Plant Line Value: WS
  misc_feature: MA Experiment 20000794 PARAMETER Experiment Name: At_Petals_P Parameter: Tissue Value: Petals vs. Whole plant
  misc_feature: MA Experiment ID: 20001451 Result: Up-regulated in Transcription
  misc_feature: MA Experiment 20001451 PARAMETER Experiment Name: At_Far-red-induction_P Parameter: Age (day) Value: 7
  misc_feature: MA Experiment 20001451 PARAMETER Experiment Name: At_Far-red-induction_P Parameter: Light Value: Far-red vs. White
  misc_feature: MA Experiment 20001451 PARAMETER Experiment Name: At_Far-red-induction_P Parameter: Organism Value: A. thaliana
  misc_feature: MA Experiment 20001451 PARAMETER Experiment Name: At_Far-red-induction_P Parameter: Plant Line Value: Columbia
  misc_feature: MA Experiment 20001451 PARAMETER Experiment Name: At_Far-red-induction_P Parameter: Timepoint (hr) Value: 24
  misc_feature: MA Experiment 20001451 PARAMETER Experiment Name: At_Far-red-induction_P Parameter: Tissue Value: Whole Plant
  misc_feature: MA Experiment ID: 20001910 Result: Up-regulated in Transcription
  misc_feature: MA Experiment 20001910 PARAMETER Experiment Name: At_Drought_Reproduction_P Parameter: Age (day) Value: 37
  misc_feature: MA Experiment 20001910 PARAMETER Experiment Name: At_Drought_Reproduction_P Parameter: Organism Value: A. thaliana
  misc_feature: MA Experiment 20001910 PARAMETER Experiment Name: At_Drought_Reproduction_P Parameter: Plant Line Value: WS
  misc_feature: MA Experiment 20001910 PARAMETER Experiment Name: At_Drought_Reproduction_P Parameter: Timepoint (day) Value: 7
  misc_feature: MA Experiment 20001910 PARAMETER Experiment Name: At_Drought_Reproduction_P Parameter: Tissue Value: Flowers
  misc_feature: MA Experiment 20001910 PARAMETER Experiment Name: At_Drought_Reproduction_P Parameter: Treatment Value: Drought vs. No Drought
atcaattcaataaggaggaggaatagagagctaaagaaaaagaaaaaagactacatttctacaaggacgttggttcttttagtcgtcgtcggtcgtcgaagaaagatcttctccttctttcttcgccgtacgatcgtcgtctaatgggagaatcatcaaatccaatggctacaagttcttcttcctcctcctcctcaattcctccttcgtctccaacaccctctccgacgtccacaaccactccgccacgtcaacatcctctcctccagccaccatcttcaaaaaagaagaaaaacagaacaaacgttttcagagtcttacgcaccgtgtttcgatctttcccaatctttacaacaccatccgtagcatgcaaaatcccggttatacatcccggtttaggcttaccggatccacatcacaacacgtcaagaatcaccggaacgttattcggataccgtaaaggccgagtaagtctttccattcaagaaaaccctaaatgtttaccttctttagtcgtggagctcgccatgcaaaccacaacgcttcaaaaagagctaagcacgggaatggtgagaatagctctcgagactgagaaacagcctcgagctgataataacaattctaaaaccgagaagaagacagatattttggaagaaccgttatggacaatgtattgtaaaggagagaaaacgggttacggtgtgaaacgagaagcgaccgaagaagatcttaacgtgatggagttgttacgtccggtgtctatgggcgccggagttttgccgggaaactcggagtcggaaggacccgacggcgaaatggcgtatatgagagcttattttgagagagttattgggtctaaagattcagagactttttatatgttgagtcctgaagggaataatggacccgaacttagctttttctttgtgagagtttgacttattttgttatggttcaaattaatgtaacgtgtatgtaaatgaccggaaacggcggtggtcgtcgacgttatatactattgtttaggataattgtaagaattttttgttgttctttcgttgttaatctctcgatctttataaaaagattgaattgtaagtgtgtgtatatacacacttcttcgtcctgaaaggaaatgtatgtgatgacattggataggaggaggtttaattgac

SEQ ID NO: 38461 - protein, 264 aa, Arabidopsis thaliana
  peptide (1)..(264): Ceres Seq. ID no. 13489379
  misc_feature (96)..(264): Pfam Name: Protein of unknown function, DUF617 Pfam Description: Protein of unknown function, DUF617
  misc_feature (45)..(263): Homolog of NCBI NO: 15239035 NR Description: expressed protein [Arabidopsis thaliana]
  misc_feature (16)..(263): Homolog of NCBI NO: 34903148 NR Description: unnamed protein product [Oryza sativa (japonica
  misc_feature (96)..(264): Homolog of NCBI NO: 21741231 NR Description: OSJNBb0034I13.25 [Oryza sativa (japonica
  misc_feature (96)..(264): Homolog of NCBI NO: 40253867 NR Description: unknown protein [Oryza sativa (japonica
  misc_feature (7)..(264): Homolog of NCBI NO: 32129319 NR Description: hypothetical protein [Oryza sativa (japonica
  misc_feature (7)..(264): Homolog of NCBI NO: 34909066 NR Description: P0702B09.30 [Oryza sativa (japonica
  misc_feature (8)..(264): Homolog of NCBI NO: 15240220 NR Description: hypothetical protein [Arabidopsis thaliana]
  misc_feature (1)..(264): Homolog of NCBI NO: 15227126 NR Description: hypothetical protein [Arabidopsis thaliana]
  misc_feature (8)..(264): Homolog of NCBI NO: 21618123 NR Description: unknown [Arabidopsis thaliana]
  misc_feature (1)..(264): Homolog of NCBI NO: 15235158 NR Description: expressed protein [Arabidopsis thaliana]
MGESSNPMATSSSSSSSSIPPSSPTPSPTSTTTPPRQHPLLQPPSSKKKKNRTNVFRVLRTVFRSFPIFTTPSVACKIPVIHPGLGLPDPHHNTSRITGTLFGYRKGRVSLSIQENPKCLPSLVVELAMQTTTLQKELSTGMVRIALETEKQPRADNNNSKTEKKTDILEEPLWTMYCKGEKTGYGVKREATEEDLNVMELLRPVSMGAGVLPGNSESEGPDGEMAYMRAYFERVIGSKDSETFYMLSPEGNNGPELSFFFVRV

SEQ ID NO: 38462 - protein, 257 aa, Arabidopsis thaliana
  peptide (1)..(257): Ceres Seq. ID no. 13489380
  misc_feature (89)..(257): Pfam Name: Protein of unknown function, DUF617 Pfam Description: Protein of unknown function, DUF617
  misc_feature (38)..(256): Homolog of NCBI NO: 15239035 NR Description: expressed protein [Arabidopsis thaliana]
  misc_feature (9)..(256): Homolog of NCBI NO: 34903148 NR Description: unnamed protein product [Oryza sativa (japonica
  misc_feature (89)..(257): Homolog of NCBI NO: 21741231 NR Description: OSJNBb0034I13.25 [Oryza sativa (japonica
  misc_feature (89)..(257): Homolog of NCBI NO: 40253867 NR Description: unknown protein [Oryza sativa (japonica
  misc_feature (1)..(257): Homolog of NCBI NO: 32129319 NR Description: hypothetical protein [Oryza sativa (japonica
  misc_feature (1)..(257): Homolog of NCBI NO: 34909066 NR Description: P0702B09.30 [Oryza sativa (japonica
  misc_feature (1)..(257): Homolog of NCBI NO: 15240220 NR Description: hypothetical protein [Arabidopsis thaliana]
  misc_feature (1)..(257): Homolog of NCBI NO: 15227126 NR Description: hypothetical protein [Arabidopsis thaliana]
  misc_feature (1)..(257): Homolog of NCBI NO: 21618123 NR Description: unknown [Arabidopsis thaliana]
  misc_feature (1)..(257): Homolog of NCBI NO: 15235158 NR Description: expressed protein [Arabidopsis thaliana]
MATSSSSSSSSIPPSSPTPSPTSTTTPPRQHPLLQPPSSKKKKNRTNVFRVLRTVFRSFPIFTTPSVACKIPVIHPGLGLPDPHHNTSRITGTLFGYRKGRVSLSIQENPKCLPSLVVELAMQTTTLQKELSTGMVRIALETEKQPRADNNNSKTEKKTDILEEPLWTMYCKGEKTGYGVKREATEEDLNVMELLRPVSMGAGVLPGNSESEGPDGEMAYMRAYFERVIGSKDSETFYMLSPEGNNGPELSFFFVRV

SEQ ID NO: 38463 - protein, 136 aa, Arabidopsis thaliana
  peptide (1)..(136): Ceres Seq. ID no. 13489381
  misc_feature (1)..(136): Pfam Name: Protein of unknown function, DUF617 Pfam Description: Protein of unknown function, DUF617
  misc_feature (1)..(135): Homolog of NCBI NO: 15239035 NR Description: expressed protein [Arabidopsis thaliana]
  misc_feature (1)..(135): Homolog of NCBI NO: 34903148 NR Description: unnamed protein product [Oryza sativa (japonica
  misc_feature (1)..(136): Homolog of NCBI NO: 21741231 NR Description: OSJNBb0034I13.25 [Oryza sativa (japonica
  misc_feature (1)..(136): Homolog of NCBI NO: 40253867 NR Description: unknown protein [Oryza sativa (japonica
  misc_feature (1)..(136): Homolog of NCBI NO: 32129319 NR Description: hypothetical protein [Oryza sativa (japonica
  misc_feature (1)..(136): Homolog of NCBI NO: 34909066 NR Description: P0702B09.30 [Oryza sativa (japonica
  misc_feature (1)..(136): Homolog of NCBI NO: 15240220 NR Description: hypothetical protein [Arabidopsis thaliana]
  misc_feature (1)..(136): Homolog of NCBI NO: 15227126 NR Description: hypothetical protein [Arabidopsis thaliana]
  misc_feature (1)..(136): Homolog of NCBI NO: 21618123 NR Description: unknown [Arabidopsis thaliana]
  misc_feature (1)..(136): Homolog of NCBI NO: 15235158 NR Description: expressed protein [Arabidopsis thaliana]
MQTTTLQKELSTGMVRIALETEKQPRADNNNSKTEKKTDILEEPLWTMYCKGEKTGYGVKREATEEDLNVMELLRPVSMGAGVLPGNSESEGPDGEMAYMRAYFERVIGSKDSETFYMLSPEGNNGPELSFFFVRV

SEQ ID NO: 38464 - DNA, 798 bp, Arabidopsis thaliana
  misc_feature (1)..(798): Ceres Seq. ID no. 12562120
  misc_feature: MA Experiment ID: 20000328 Result: Down-regulated in Transcription
  misc_feature: MA Experiment 20000328 PARAMETER Experiment Name: At_42deg_Heat_Sub_P Parameter: Age (day) Value: 14
  misc_feature: MA Experiment 20000328 PARAMETER Experiment Name: At_42deg_Heat_Sub_P Parameter: Organism Value: A. thaliana
  misc_feature: MA Experiment 20000328 PARAMETER Experiment Name: At_42deg_Heat_Sub_P Parameter: Plant Line Value: WS
  misc_feature: MA Experiment 20000328 PARAMETER Experiment Name: At_42deg_Heat_Sub_P Parameter: Temperature (deg C) Value: 42 vs. 22
  misc_feature: MA Experiment 20000328 PARAMETER Experiment Name: At_42deg_Heat_Sub_P Parameter: Timepoint (hr) Value: 6
  misc_feature: MA Experiment 20000328 PARAMETER Experiment Name: At_42deg_Heat_Sub_P Parameter: Tissue Value: Aerial
  misc_feature: MA Experiment ID: 20000440 Result: Down-regulated in Transcription
  misc_feature: MA Experiment 20000440 PARAMETER Experiment Name: At_Closed-Flower__Sub_P Parameter: Tissue Value: Closed Flower vs. Whole Plant
  misc_feature: MA Experiment ID: 20001560 Result: Down-regulated in Transcription
  misc_feature: MA Experiment 20001560 PARAMETER Experiment Name: At_Drought_Soil_Dry_P Parameter: Age (day) Value: 28
  misc_feature: MA Experiment 20001560 PARAMETER Experiment Name: At_Drought_Soil_Dry_P Parameter: Organism Value: A. thaliana
  misc_feature: MA Experiment 20001560 PARAMETER Experiment Name: At_Drought_Soil_Dry_P Parameter: Plant Line Value: WS
  misc_feature: MA Experiment 20001560 PARAMETER Experiment Name: At_Drought_Soil_Dry_P Parameter: Post Timepoint (hr) Value: None
  misc_feature: MA Experiment 20001560 PARAMETER Experiment Name: At_Drought_Soil_Dry_P Parameter: Post-Treatment Value: None
  misc_feature: MA Experiment 20001560 PARAMETER Experiment Name: At_Drought_Soil_Dry_P Parameter: Timepoint (day) Value: 14
  misc_feature: MA Experiment 20001560 PARAMETER Experiment Name: At_Drought_Soil_Dry_P Parameter: Treatment Value: Drought vs. No Drought
atctgtcgaaagctcagtcatcactagacagttggaagcaacacattgtctccaagaacccgagaatagaaaattgccgtgcaatcttgagcagccttgttcagaccttgaatctccccaaggaaaaactcggccaaagggaaagtcttgatgagagctctatatggtgtaaaggttaagaccttatacatctctggtgtttttgctgcagcgttctcaggttcatcgcagaatctgatgtaccttacagtctcaaacgagcttccatgggcacaatcattcatggaagtgcagaacaccatgaacgcagaaatcaagaacatatttttgtcagacgggttaacggttctgaaagagctagaggcagttgcttcaggtgtcaagaaactctaccctgcgatccaacaaggatcaatagatcccatatcgctgcagccactgaaggactcggtcacagaattatcgaatgggatagatcttgtttcgaaagaagtggattgtttcttcaagattctgttatcggggagagacacattactagagaacctaaggtcgatgggtgcatcaaccctacaggcaacatcgccaaaaaaggctgccggaaaaaattacagaggattctgataaactataaatgtttgtacagatggttttacttcaagtgttccatcttcttggtattgaatgtattattaggtgtttgtgcaatcgtagtcgtttgtatgagatgctttgaaagtagtagttgtataagtaaaggttttaccaacttatctatatatattatgaatatctttg

SEQ ID NO: 38465 - protein, 177 aa, Arabidopsis thaliana
  peptide (1)..(177): Ceres Seq. ID no. 12562121
MGTIIHGSAEHHERRNQEHIFVRRVNGSERARGSCFRCQETLPCDPTRINRSHIAAATEGLGHRIIEWDRSCFERSGLFLQDSVIGERHITREPKVDGCINPTGNIAKKGCRKKLQRILINYKCLYRWFYFKCSIFLVLNVLLGVCAIVVVCMRCFESSSCISKGFTNLSIYIMNIF

SEQ ID NO: 38466 - protein, 157 aa, Arabidopsis thaliana
  peptide (1)..(157): Ceres Seq. ID no. 12562122
  misc_feature (1)..(121): Homolog of NCBI NO: 37536014 NR Description: unknown protein [Oryza sativa (japonica
  misc_feature (1)..(133): Homolog of NCBI NO: 15233126 NR Description: putative protein; protein id: At3g61500.1
  misc_feature (1)..(135): Homolog of NCBI NO: 16604342 NR Description: At2g46080/T3F17.27 [Arabidopsis thaliana]
  misc_feature (1)..(135): Homolog of NCBI NO: 18406969 NR Description: expressed protein
  misc_feature (1)..(153): Homolog of NCBI NO: 28392962 NR Description: unknown protein [Arabidopsis thaliana]
  misc_feature (1)..(153): Homolog of NCBI NO: 30678866 NR Description: expressed protein [Arabidopsis thaliana]
  misc_feature (1)..(153): Homolog of NCBI NO: 7485228 NR Description: hypothetical protein A_IG002N01.26 - Arabidopsis
  misc_feature (1)..(157): Homolog of NCBI NO: 18378853 NR Description: expressed protein
MRALYGVKVKTLYISGVFAAAFSGSSQNLMYLTVSNELPWAQSFMEVQNTMNAEIKNIFLSDGLTVLKELEAVASGVKKLYPAIQQGSIDPISLQPLKDSVTELSNGIDLVSKEVDCFFKILLSGRDTLLENLRSMGASTLQATSPKKAAGKNYRGF

SEQ ID NO: 38467 - protein, 128 aa, Arabidopsis thaliana
  peptide (1)..(128): Ceres Seq. ID no. 12562123
  misc_feature (1)..(92): Homolog of NCBI NO: 37536014 NR Description: unknown protein [Oryza sativa (japonica
  misc_feature (1)..(104): Homolog of NCBI NO: 15233126 NR Description: putative protein; protein id: At3g61500.1
  misc_feature (1)..(106): Homolog of NCBI NO: 16604342 NR Description: At2g46080/T3F17.27 [Arabidopsis thaliana]
  misc_feature (1)..(106): Homolog of NCBI NO: 18406969 NR Description: expressed protein
  misc_feature (1)..(124): Homolog of NCBI NO: 28392962 NR Description: unknown protein [Arabidopsis thaliana]
  misc_feature (1)..(124): Homolog of NCBI NO: 30678866 NR Description: expressed protein [Arabidopsis thaliana]
  misc_feature (1)..(124): Homolog of NCBI NO: 7485228 NR Description: hypothetical protein A_IG002N01.26 - Arabidopsis
  misc_feature (1)..(128): Homolog of NCBI NO: 18378853 NR Description: expressed protein
MYLTVSNELPWAQSFMEVQNTMNAEIKNIFLSDGLTVLKELEAVASGVKKLYPAIQQGSIDPISLQPLKDSVTELSNGIDLVSKEVDCFFKILLSGRDTLLENLRSMGASTLQATSPKKAAGKNYRGF

SEQ ID NO: 38468 - DNA, 2957 bp, Arabidopsis thaliana
  misc_feature (1)..(2957): Ceres Seq. ID no. 12560451
  misc_feature: MA Experiment ID: 20000171 Result: Down-regulated in Transcription
  misc_feature: MA Experiment 20000171 PARAMETER Experiment Name: At_42deg_Heat_P Parameter: Age (day) Value: 14
  misc_feature: MA Experiment 20000171 PARAMETER Experiment Name: At_42deg_Heat_P Parameter: Organism Value: A. thaliana
  misc_feature: MA Experiment 20000171 PARAMETER Experiment Name: At_42deg_Heat_P Parameter: Plant Line Value: WS
  misc_feature: MA Experiment 20000171 PARAMETER Experiment Name: At_42deg_Heat_P Parameter: Temperature (deg C) Value: 42 vs. 22
  misc_feature: MA Experiment 20000171 PARAMETER Experiment Name: At_42deg_Heat_P Parameter: Timepoint (hr) Value: 1
  misc_feature: MA Experiment 20000171 PARAMETER Experiment Name: At_42deg_Heat_P Parameter: Tissue Value: Aerial
  misc_feature: MA Experiment ID: 20000173 Result: Down-regulated in Transcription
  misc_feature: MA Experiment 20000173 PARAMETER Experiment Name: At_42deg_Heat_P Parameter: Age (day) Value: 14
  misc_feature: MA Experiment 20000173 PARAMETER Experiment Name: At_42deg_Heat_P Parameter: Organism Value: A. thaliana
  misc_feature: MA Experiment 20000173 PARAMETER Experiment Name: At_42deg_Heat_P Parameter: Plant Line Value: WS
  misc_feature: MA Experiment 20000173 PARAMETER Experiment Name: At_42deg_Heat_P Parameter: Temperature (deg C) Value: 42 vs. 22
  misc_feature: MA Experiment 20000173 PARAMETER Experiment Name: At_42deg_Heat_P Parameter: Timepoint (hr) Value: 6
  misc_feature: MA Experiment 20000173 PARAMETER Experiment Name: At_42deg_Heat_P Parameter: Tissue Value: Aerial
  misc_feature: MA Experiment ID: 20000286 Result: Up-regulated in Transcription
  misc_feature: MA Experiment 20000286 PARAMETER Experiment Name: At_Open_Flower_P Parameter: Age (day) Value: 21
  misc_feature: MA Experiment 20000286 PARAMETER Experiment Name: At_Open_Flower_P Parameter: Plant Line Value: WS
  misc_feature: MA Experiment 20000286 PARAMETER Experiment Name: At_Open_Flower_P Parameter: Tissue Value: Half Open vs. Whole Plant
  misc_feature: MA Experiment ID: 20000495 Result: Down-regulated in Transcription
  misc_feature: MA Experiment 20000495 PARAMETER Experiment Name: At_Guard_Cells_P Parameter: Harvest Date Value: 8/2/2002
  misc_feature: MA Experiment 20000495 PARAMETER Experiment Name: At_Guard_Cells_P Parameter: Organism Value: A. thaliana
  misc_feature: MA Experiment 20000495 PARAMETER Experiment Name: At_Guard_Cells_P Parameter: Tissue Value: Guard Cells vs. Leaves
  misc_feature: MA Experiment ID: 20000794 Result: Up-regulated in Transcription
  misc_feature: MA Experiment 20000794 PARAMETER Experiment Name: At_Petals_P Parameter: Age (day) Value: 23-25 days
  misc_feature: MA Experiment 20000794 PARAMETER Experiment Name: At_Petals_P Parameter: Plant Line Value: WS
  misc_feature: MA Experiment 20000794 PARAMETER Experiment Name: At_Petals_P Parameter: Tissue Value: Petals vs. Whole plant
ataaaccttctcttctctcgataaacttcagatattaaaaaacccaaacttttatttcccccaatcaaaaaccctaatttcttcttatcttgtttggatttttcatttcttctgtttgattttattccacaaacacaataaaaaagtttgcattttttcctcttctaagctcgtttcagatcttcgatttcaccatttttataaactattatgcgaacttagttttgttctttgtgattttgtatgacaatgatcttcttctctaagcttaatcgctccatttctcgttcaaagggatttttgtacggtggtggtgttagatcggcggcaaggctacttacttcgccgggacttgaggcggcgtctgtgaatgaagtggaaggtggattagggtttataagaagacactttgcttctttagcttcacggaagggtttagtcaataatgatttgattggtgtttttgctaatccaagacttcgtagattcttctctgatgaagctcctaagaagaagaattatgagaactattttcctaaagataagcaagaacccaagagtgatcagaaatcagagcataaagagggttcagaaaagaatgaaaatgagaatgtgggagatatgttcatgaaccgattccaaaatttgctaattcctctactagctcttgctgtattcttttctactttctcgtttggctctggggaacaacaacagataagtttccaggagttcaaaaacaagctactcgagcctggtttagttgaccacatagatgtttcaaacaaatcagtagcaaaagtctacgtgaggagcacaccgaaagaccaacaaacaactgacgttgtccatggtaatggtaacggtattcctgctaaaagaactggtggtcagtataagtactacttcaatatcggtagtgttgattcttttgaggagaaactcgaagaagctcaagaagcgttaggtgttgatcgtcatgaatatgttcctgtcacatacgtctctgaaatggtctggtatcaagagttcatgaggtttgcaccgactttgttgctcttgggtactctgatctatggtgcgagacggatgcaaggtggattgggtgtaggaggaactggcggtaagaatggtcgtggaattttcaatataggcaaagctacaataacgagagctgataaacattccaagaataagatttatttcaaggatgttgctggatgtgacgaggctaaacaagaaattatggagtttgtacatttccttaagaacccaaagaagtatgaagatttgggtgctaaaattccgaaaggtgcacttttagtcggtccgcctggaaccggaaagacccttttagcaaaagccacagcaggagaatctggtgtgccatttctgtctatttctggctcagatttcatggagatgtttgttggtgttgggccttcgagggtgagacatttgttccaagaggcgagacaagctgcaccgagcattatatttatcgatgagattgatgctattggtcgggcaagaggtcgtggaggtttaggcggaaatgatgagcgtgaaagcactctgaatcagttgctagttgaaatggatggttttggtacaaccgctggtgttgtggttcttgctggaaccaacagaccggatattttggataaagctttgttaaggcctggacgttttgatcgccagataactattgataaacctgatatcaaagggcgtgatcagattttcaagatttacttgaagaagatcaaacttgatcatgagccatcatattactctcaaaggcttgctgctctcactcccgggtttgcaggagctgacattgcgaatgtctgtaacgaagcagctcttattgctgctagacacgaaggagcaacggttactatggcacactttgaatctgcgattgatcgtgttattggtggtcttgagaagaaaaaccgggtgataagcaagttggagcgacgtacagttgcatatcatgaatctggtcacgcagttgtagggtggttccttgaacatgcagagccgttactgaaagtgactattgtaccacgtggcacagcggctctcggatttgcacaatacgttccaaacgaaaaccttctcatgaccaaagagcaactctttgacatgacttgcatgactctcggaggccgtgcagctgagcaggtattgataggtaaaatctcaacgggtgcgcagaacgatctagagaaggtgacgaagatgacttacgcgcaagtagctgtgtatggtttcagtgacaaggttgggctactctcgtttccaccaagggatgatggctacgacttctctaaaccatacagcaacaaaaccggtgctatcatagacgaagaagttagggactgggtggccaaagcttatgagcggaccgtagagctggttgaggaacacaaagtgaaagtggctgagatcgccgagcttttactagagaaagaggtgttgcatcaggatgatctcttaaaaattttaggtgaacgtccgtttaagtcagctgaggtcactaattatgaccggttcaagtctgggtttgaagagactgagaaggactcagccgccacccctacagtggagcctgtggtggatgatggagctcccccgccgtttgaaccccaggttgttccgacgtaagagaaacgtcactgttacaactgtaaatttgatcaagtatgcaataacacaattcaaaaaaagcattctcttgttcttcaatgtttttagtgacgacggaatttgttagcaatgaacattttttgttttctaaattattgcttctaataagatttttatttgcttttcagtctcattcttatagtttgcgttttgtaataaaggattgaatatgatgatgatattgttacatcttccaatatttaccaaataccatcatgtaagaatgatggcatcatgtgtct

SEQ ID NO: 38469 - protein, 809 aa, Arabidopsis thaliana
  peptide (1)..(809): Ceres Seq. ID no. 12560452
  misc_feature (552)..(756): Pfam Name: Peptidase family M41 Pfam Description: Peptidase family M41
  misc_feature (552)..(756): Pfam Name: Peptidase family M41 Pfam Description: Peptidase family M41
  misc_feature (552)..(756): Pfam Name: Peptidase family M41 Pfam Description: Peptidase family M41
  misc_feature (100)..(809): Homolog of NCBI NO: 12082993 NR Description: matrix AAA protease MAP-1 [Neurospora crassa]
  misc_feature (209)..(785): Homolog of NCBI NO: 16905099 NR Description: AFG3(ATPase family gene 3)-like 1 (yeast) [Mus
  misc_feature (115)..(187): Homolog of NCBI NO: 28574878 NR Description: CG6512-PA [Drosophila melanogaster]
  misc_feature (221)..(784): Homolog of NCBI NO: 28574878 NR Description: CG6512-PA [Drosophila melanogaster]
  misc_feature (210)..(785): Homolog of NCBI NO: 18999411 NR Description: Similar to AFG3 ATPase family gene 3-like 2
  misc_feature (100)..(809): Homolog of NCBI NO: 12082993 NR Description: matrix AAA protease MAP-1 [Neurospora crassa]
  misc_feature (115)..(187): Homolog of NCBI NO: 28574878 NR Description: CG6512-PA [Drosophila melanogaster]
  misc_feature (210)..(785): Homolog of NCBI NO: 18999411 NR Description: Similar to AFG3 ATPase family gene 3-like 2
  misc_feature (221)..(784): Homolog of NCBI NO: 28574878 NR Description: CG6512-PA [Drosophila melanogaster]
  misc_feature (115)..(187): Homolog of NCBI NO: 28574878 NR Description: CG6512-PA [Drosophila melanogaster]
  misc_feature (209)..(785): Homolog of NCBI NO: 16905099 NR Description: AFG3(ATPase family gene 3)-like 1 (yeast) [Mus
  misc_feature (100)..(809): Homolog of NCBI NO: 12082993 NR Description: matrix AAA protease MAP-1 [Neurospora crassa]
  misc_feature (7)..(783): Homolog of NCBI NO: 25406980 NR Description: protein F22G5.10 [imported] - Arabidopsis
  misc_feature (7)..(786): Homolog of NCBI NO: 34908198 NR Description: putative AAA-metalloprotease
  misc_feature (206)..(789): Homolog of NCBI NO: 6539504 NR Description: FtsH2 [Cyanidioschyzon merolae]
  misc_feature (152)..(192): Homolog of NCBI NO: 6539504 NR Description: FtsH2 [Cyanidioschyzon merolae]
  misc_feature (210)..(785): Homolog of NCBI NO: 5802970 NR Description: AFG3 ATPase family gene 3-like 2
  misc_feature (7)..(783): Homolog of NCBI NO: 25406980 NR Description: protein F22G5.10 [imported] - Arabidopsis
  misc_feature (7)..(786): Homolog of NCBI NO: 34908198 NR Description: putative AAA-metalloprotease
  misc_feature (206)..(789): Homolog of NCBI NO: 6539504 NR Description: FtsH2 [Cyanidioschyzon merolae]
  misc_feature (152)..(192): Homolog of NCBI NO: 6539504 NR Description: FtsH2 [Cyanidioschyzon merolae]
  misc_feature (210)..(785): Homolog of NCBI NO: 5802970 NR Description: AFG3 ATPase family gene 3-like 2
  misc_feature (210)..(785): Homolog of NCBI NO: 18999411 NR Description: Similar to AFG3 ATPase family gene 3-like 2
  misc_feature (221)..(784): Homolog of NCBI NO: 28574878 NR Description: CG6512-PA [Drosophila melanogaster]
  misc_feature (209)..(785): Homolog of NCBI NO: 16905099 NR Description: AFG3(ATPase family gene 3)-like 1 (yeast) [Mus
  misc_feature (210)..(785): Homolog of NCBI NO: 5802970 NR Description: AFG3 ATPase family gene 3-like 2
  misc_feature (152)..(192): Homolog of NCBI NO: 6539504 NR Description: FtsH2 [Cyanidioschyzon merolae]
  misc_feature (206)..(789): Homolog of NCBI NO: 6539504 NR Description: FtsH2 [Cyanidioschyzon merolae]
  misc_feature (7)..(786): Homolog of NCBI NO: 34908198 NR Description: putative AAA-metalloprotease
  misc_feature (7)..(783): Homolog of NCBI NO: 25406980 NR Description: protein F22G5.10 [imported] - Arabidopsis
MTMIFFSKLNRSISRSKGFLYGGGVRSAARLLTSPGLEAASVNEVEGGLGFIRRHFASLASRKGLVNNDLIGVFANPRLRRFFSDEAPKKKNYENYFPKDKQEPKSDQKSEHKEGSEKNENENVGDMFMNRFQNLLIPLLALAVFFSTFSFGSGEQQQISFQEFKNKLLEPGLVDHIDVSNKSVAKVYVRSTPKDQQTTDVVHGNGNGIPAKRTGGQYKYYFNIGSVDSFEEKLEEAQEALGVDRHEYVPVTYVSEMVWYQEFMRFAPTLLLLGTLIYGARRMQGGLGVGGTGGKNGRGIFNIGKATITRADKHSKNKIYFKDVAGCDEAKQEIMEFVHFLKNPKKYEDLGAKIPKGALLVGPPGTGKTLLAKATAGESGVPFLSISGSDFMEMFVGVGPSRVRHLFQEARQAAPSIIFIDEIDAIGRARGRGGLGGNDERESTLNQLLVEMDGFGTTAGVVVLAGTNRPDILDKALLRPGRFDRQITIDKPDIKGRDQIFKIYLKKIKLDHEPSYYSQRLAALTPGFAGADIANVCNEAALIAARHEGATVTMAHFESAIDRVIGGLEKKNRVISKLERRTVAYHESGHAVVGWFLEHAEPLLKVTIVPRGTAALGFAQYVPNENLLMTKEQLFDMTCMTLGGRAAEQVLIGKISTGAQNDLEKVTKMTYAQVAVYGFSDKVGLLSFPPRDDGYDFSKPYSNKTGAIIDEEVRDWVAKAYERTVELVEEHKVKVAEIAELLLEKEVLHQDDLLKILGERPFKSAEVTNYDRFKSGFEETEKDSAATPTVEPVVDDGAPPPFEPQVVPT

SEQ ID NO: 38470 - protein, 807 aa, Arabidopsis thaliana
  peptide (1)..(807): Ceres Seq. ID no. 12560453
  misc_feature (550)..(754): Pfam Name: Peptidase family M41 Pfam Description: Peptidase family M41
  misc_feature (550)..(754): Pfam Name: Peptidase family M41 Pfam Description: Peptidase family M41
  misc_feature (550)..(754): Pfam Name: Peptidase family M41 Pfam Description: Peptidase family M41
  misc_feature (98)..(807): Homolog of NCBI NO: 12082993 NR Description: matrix AAA protease MAP-1 [Neurospora crassa]
  misc_feature (207)..(783): Homolog of NCBI NO: 16905099 NR Description: AFG3(ATPase family gene 3)-like 1 (yeast) [Mus
  misc_feature (113)..(185): Homolog of NCBI NO: 28574878 NR Description: CG6512-PA [Drosophila melanogaster]
  misc_feature (219)..(782): Homolog of NCBI NO: 28574878 NR Description: CG6512-PA [Drosophila melanogaster]
  misc_feature (208)..(783): Homolog of NCBI NO: 18999411 NR Description: Similar to AFG3 ATPase family gene 3-like 2
  misc_feature (98)..(807): Homolog of NCBI NO: 12082993 NR Description: matrix AAA protease MAP-1 [Neurospora crassa]
  misc_feature (113)..(185): Homolog of NCBI NO: 28574878 NR Description: CG6512-PA [Drosophila melanogaster]
  misc_feature (208)..(783): Homolog of NCBI NO: 18999411 NR Description: Similar to AFG3 ATPase family gene 3-like 2
  misc_feature (219)..(782): Homolog of NCBI NO: 28574878 NR Description: CG6512-PA [Drosophila melanogaster]
  misc_feature (113)..(185): Homolog of NCBI NO: 28574878 NR Description: CG6512-PA [Drosophila melanogaster]
  misc_feature (207)..(783): Homolog of NCBI NO: 16905099 NR Description: AFG3(ATPase family gene 3)-like 1 (yeast) [Mus
  misc_feature (98)..(807): Homolog of NCBI NO: 12082993 NR Description: matrix AAA protease MAP-1 [Neurospora crassa]
  misc_feature (5)..(781): Homolog of NCBI NO: 25406980 NR Description: protein F22G5.10 [imported] - Arabidopsis
  misc_feature (5)..(784): Homolog of NCBI NO: 34908198 NR Description: putative AAA-metalloprotease
  misc_feature (204)..(787): Homolog of NCBI NO: 6539504 NR Description: FtsH2 [Cyanidioschyzon merolae]
  misc_feature (150)..(190): Homolog of NCBI NO: 6539504 NR Description: FtsH2 [Cyanidioschyzon merolae]
  misc_feature (208)..(783): Homolog of NCBI NO: 5802970 NR Description: AFG3 ATPase family gene 3-like 2
  misc_feature (5)..(781): Homolog of NCBI NO: 25406980 NR Description: protein F22G5.10 [imported] - Arabidopsis
  misc_feature (5)..(784): Homolog of NCBI NO: 34908198 NR Description: putative AAA-metalloprotease
  misc_feature (204)..(787): Homolog of NCBI NO: 6539504 NR Description: FtsH2 [Cyanidioschyzon merolae]
  misc_feature (150)..(190): Homolog of NCBI NO: 6539504 NR Description: FtsH2 [Cyanidioschyzon merolae]
  misc_feature (208)..(783): Homolog of NCBI NO: 5802970 NR Description: AFG3 ATPase family gene 3-like 2
  misc_feature (208)..(783): Homolog of NCBI NO: 18999411 NR Description: Similar to AFG3 ATPase family gene 3-like 2
  misc_feature (219)..(782): Homolog of NCBI NO: 28574878 NR Description: CG6512-PA [Drosophila melanogaster]
  misc_feature (207)..(783): Homolog of NCBI NO: 16905099 NR Description: AFG3(ATPase family gene 3)-like 1 (yeast) [Mus
  misc_feature (208)..(783): Homolog of NCBI NO: 5802970 NR Description: AFG3 ATPase family gene 3-like 2
  misc_feature (150)..(190): Homolog of NCBI NO: 6539504 NR Description: FtsH2 [Cyanidioschyzon merolae]
  misc_feature (204)..(787): Homolog of NCBI NO: 6539504 NR Description: FtsH2 [Cyanidioschyzon merolae]
  misc_feature (5)..(784): Homolog of NCBI NO: 34908198 NR Description: putative AAA-metalloprotease
  misc_feature (5)..(781): Homolog of NCBI NO: 25406980 NR Description: protein F22G5.10 [imported] - Arabidopsis
MIFFSKLNRSISRSKGFLYGGGVRSAARLLTSPGLEAASVNEVEGGLGFIRRHFASLASRKGLVNNDLIGVFANPRLRRFFSDEAPKKKNYENYFPKDKQEPKSDQKSEHKEGSEKNENENVGDMFMNRFQNLLIPLLALAVFFSTFSFGSGEQQQISFQEFKNKLLEPGLVDHIDVSNKSVAKVYVRSTPKDQQTTDVVHGNGNGIPAKRTGGQYKYYFNIGSVDSFEEKLEEAQEALGVDRHEYVPVTYVSEMVWYQEFMRFAPTLLLLGTLIYGARRMQGGLGVGGTGGKNGRGIFNIGKATITRADKHSKNKIYFKDVAGCDEAKQEIMEFVHFLKNPKKYEDLGAKIPKGALLVGPPGTGKTLLAKATAGESGVPFLSISGSDFMEMFVGVGPSRVRHLFQEARQAAPSIIFIDEIDAIGRARGRGGLGGNDERESTLNQLLVEMDGFGTTAGVVVLAGTNRPDILDKALLRPGRFDRQITIDKPDIKGRDQIFKIYLKKIKLDHEPSYYSQRLAALTPGFAGADIANVCNEAALIAARHEGATVTMAHFESAIDRVIGGLEKKNRVISKLERRTVAYHESGHAVVGWFLEHAEPLLKVTIVPRGTAALGFAQYVPNENLLMTKEQLFDMTCMTLGGRAAEQVLIGKISTGAQNDLEKVTKMTYAQVAVYGFSDKVGLLSFPPRDDGYDFSKPYSNKTGAIIDEEVRDWVAKAYERTVELVEEHKVKVAEIAELLLEKEVLHQDDLLKILGERPFKSAEVTNYDRFKSGFEETEKDSAATPTVEPVVDDGAPPPFEPQVVPT

SEQ ID NO: 38471 - protein, 683 aa, Arabidopsis thaliana
  peptide (1)..(683): Ceres Seq. ID no. 12560454
  misc_feature (426)..(630): Pfam Name: Peptidase family M41 Pfam Description: Peptidase family M41
  misc_feature (426)..(630): Pfam Name: Peptidase family M41 Pfam Description: Peptidase family M41
  misc_feature (426)..(630): Pfam Name: Peptidase family M41 Pfam Description: Peptidase family M41
  misc_feature (1)..(683): Homolog of NCBI NO: 12082993 NR Description: matrix AAA protease MAP-1 [Neurospora crassa]
  misc_feature (83)..(659): Homolog of NCBI NO: 16905099 NR Description: AFG3(ATPase family gene 3)-like 1 (yeast) [Mus
  misc_feature (1)..(61): Homolog of NCBI NO: 28574878 NR Description: CG6512-PA [Drosophila melanogaster]
  misc_feature (95)..(658): Homolog of NCBI NO: 28574878 NR Description: CG6512-PA [Drosophila melanogaster]
  misc_feature (84)..(659): Homolog of NCBI NO: 18999411 NR Description: Similar to AFG3 ATPase family gene 3-like 2
  misc_feature (1)..(683): Homolog of NCBI NO: 12082993 NR Description: matrix AAA protease MAP-1 [Neurospora crassa]
  misc_feature (1)..(61): Homolog of NCBI NO: 28574878 NR Description: CG6512-PA [Drosophila melanogaster]
  misc_feature (84)..(659): Homolog of NCBI NO: 18999411 NR Description: Similar to AFG3 ATPase family gene 3-like 2
  misc_feature (95)..(658): Homolog of NCBI NO: 28574878 NR Description: CG6512-PA [Drosophila melanogaster]
  misc_feature (1)..(61): Homolog of NCBI NO: 28574878 NR Description: CG6512-PA [Drosophila melanogaster]
  misc_feature (83)..(659): Homolog of NCBI NO: 16905099 NR Description: AFG3(ATPase family gene 3)-like 1 (yeast) [Mus
  misc_feature (1)..(683): Homolog of NCBI NO: 12082993 NR Description: matrix AAA protease MAP-1 [Neurospora crassa]
  misc_feature (1)..(657): Homolog of NCBI NO: 25406980 NR Description: protein F22G5.10 [imported] - Arabidopsis
  misc_feature (1)..(660): Homolog of NCBI NO: 34908198 NR Description: putative AAA-metalloprotease
  misc_feature (80)..(663): Homolog of NCBI NO: 6539504 NR Description: FtsH2 [Cyanidioschyzon merolae]
  misc_feature (26)..(66): Homolog of NCBI NO: 6539504 NR Description: FtsH2 [Cyanidioschyzon merolae]
  misc_feature (84)..(659): Homolog of NCBI NO: 5802970 NR Description: AFG3 ATPase family gene 3-like 2
  misc_feature (1)..(657): Homolog of NCBI NO: 25406980 NR Description: protein F22G5.10 [imported] - Arabidopsis
  misc_feature (1)..(660): Homolog of NCBI NO: 34908198 NR Description: putative AAA-metalloprotease
  misc_feature (80)..(663): Homolog of NCBI NO: 6539504 NR Description: FtsH2 [Cyanidioschyzon merolae]
  misc_feature (26)..(66): Homolog of NCBI NO: 6539504 NR Description: FtsH2 [Cyanidioschyzon merolae]
  misc_feature (84)..(659): Homolog of NCBI NO: 5802970 NR Description: AFG3 ATPase family gene 3-like 2
  misc_feature (84)..(659): Homolog of NCBI NO: 18999411 NR Description: Similar to AFG3 ATPase family gene 3-like 2
  misc_feature (95)..(658): Homolog of NCBI NO: 28574878 NR Description: CG6512-PA [Drosophila melanogaster]
  misc_feature (83)..(659): Homolog of NCBI NO: 16905099 NR Description: AFG3(ATPase family gene 3)-like 1 (yeast) [Mus
  misc_feature (84)..(659): Homolog of NCBI NO: 5802970 NR Description: AFG3 ATPase family gene 3-like 2
  misc_feature (26)..(66): Homolog of NCBI NO: 6539504 NR Description: FtsH2 [Cyanidioschyzon merolae]
  misc_feature (80)..(663): Homolog of NCBI NO: 6539504 NR Description: FtsH2 [Cyanidioschyzon merolae]
  misc_feature (1)..(660): Homolog of NCBI NO: 34908198 NR Description: putative AAA-metalloprotease
  misc_feature (1)..(657): Homolog of NCBI NO: 25406980 NR Description: protein F22G5.10 [imported] - Arabidopsis
MFMNRFQNLLIPLLALAVFFSTFSFGSGEQQQISFQEFKNKLLEPGLVDHIDVSNKSVAKVYVRSTPKDQQTTDVVHGNGNGIPAKRTGGQYKYYFNIGSVDSFEEKLEEAQEALGVDRHEYVPVTYVSEMVWYQEFMRFAPTLLLLGTLIYGARRMQGGLGVGGTGGKNGRGIFNIGKATITRADKHSKNKIYFKDVAGCDEAKQEIMEFVHFLKNPKKYEDLGAKIPKGALLVGPPGTGKTLLAKATAGESGVPFLSISGSDFMEMFVGVGPSRVRHLFQEARQAAPSIIFIDEIDAIGRARGRGGLGGNDERESTLNQLLVEMDGFGTTAGVVVLAGTNRPDILDKALLRPGRFDRQITIDKPDIKGRDQIFKIYLKKIKLDHEPSYYSQRLAALTPGFAGADIANVCNEAALIAARHEGATVTMAHFESAIDRVIGGLEKKNRVISKLERRTVAYHESGHAVVGWFLEHAEPLLKVTIVPRGTAALGFAQYVPNENLLMTKEQLFDMTCMTLGGRAAEQVLIGKISTGAQNDLEKVTKMTYAQVAVYGFSDKVGLLSFPPRDDGYDFSKPYSNKTGAIIDEEVRDWVAKAYERTVELVEEHKVKVAEIAELLLEKEVLHQDDLLKILGERPFKSAEVTNYDRFKSGFEETEKDSAATPTVEPVVDDGAPPPFEPQVVPT

SEQ ID NO: 38472 - DNA, 956 bp, Arabidopsis thaliana
  misc_feature (1)..(956): Ceres Seq. ID no. 12326661
  misc_feature: MA Experiment ID: 108433 Result: Up-regulated in Transcription
  misc_feature: MA Experiment 108433 PARAMETER Experiment Name: At_rhl_Mutant2_cDNA_P Parameter: Age (day) Value: 7
  misc_feature: MA Experiment 108433 PARAMETER Experiment Name: At_rhl_Mutant2_cDNA_P Parameter: Organism Value: A. thaliana
  misc_feature: MA Experiment 108433 PARAMETER Experiment Name: At_rhl_Mutant2_cDNA_P Parameter: Plant Line Value: rhl Mutant vs. wt landsburg
  misc_feature: MA Experiment 108433 PARAMETER Experiment Name: At_rhl_Mutant2_cDNA_P Parameter: Tissue Value: Roots
  misc_feature: MA Experiment ID: 20000184 Result: Down-regulated in Transcription
  misc_feature: MA Experiment 20000184 PARAMETER Experiment Name: At_Shoots__P Parameter: Age (day) Value: 7
  misc_feature: MA Experiment 20000184 PARAMETER Experiment Name: At_Shoots__P Parameter: Tissue Value: Shoots vs. Whole Plant
  misc_feature: MA Experiment ID: 20000227 Result: Down-regulated in Transcription
  misc_feature: MA Experiment 20000227 PARAMETER Experiment Name: At_Root-Tips-vs-Tops_P Parameter: Tissue Value: Root Tips vs. Root Tops
  misc_feature: MA Experiment ID: 20000264 Result: Up-regulated in Transcription
  misc_feature: MA Experiment 20000264 PARAMETER Experiment Name: At_Open_Flower_P Parameter: Age (day) Value: 21
  misc_feature: MA Experiment 20000264 PARAMETER Experiment Name: At_Open_Flower_P Parameter: Plant Line Value: WS
  misc_feature: MA Experiment 20000264 PARAMETER Experiment Name: At_Open_Flower_P Parameter: Tissue Value: Open Flower vs. Whole Plant
  misc_feature: MA Experiment ID: 20000286 Result: Up-regulated in Transcription
  misc_feature: MA Experiment 20000286 PARAMETER Experiment Name: At_Open_Flower_P Parameter: Age (day) Value: 21
  misc_feature: MA Experiment 20000286 PARAMETER Experiment Name: At_Open_Flower_P Parameter: Plant Line Value: WS
  misc_feature: MA Experiment 20000286 PARAMETER Experiment Name: At_Open_Flower_P Parameter: Tissue Value: Half Open vs. Whole Plant
  misc_feature: MA Experiment ID: 20000573 Result: Up-regulated in Transcription
  misc_feature: MA Experiment 20000573 PARAMETER Experiment Name: At_100uM_ABA_Mutants__P Parameter: Organism Value: A. thaliana
  misc_feature: MA Experiment 20000573 PARAMETER Experiment Name: At_100uM_ABA_Mutants__P Parameter: Plant Line Value: CS22 vs. Ler wt
  misc_feature: MA Experiment 20000573 PARAMETER Experiment Name: At_100uM_ABA_Mutants__P Parameter: Timepoint (hr) Value: N/A
  misc_feature: MA Experiment 20000573 PARAMETER Experiment Name: At_100uM_ABA_Mutants__P Parameter: Tissue Value: Whole Plant
  misc_feature: MA Experiment 20000573 PARAMETER Experiment Name: At_100uM_ABA_Mutants__P Parameter: Treatment Value: None
  misc_feature: MA Experiment ID: 20000794 Result: Up-regulated in Transcription
  misc_feature: MA Experiment 20000794 PARAMETER Experiment Name: At_Petals_P Parameter: Age (day) Value: 23-25 days
  misc_feature: MA Experiment 20000794 PARAMETER Experiment Name: At_Petals_P Parameter: Plant Line Value: WS
  misc_feature: MA Experiment 20000794 PARAMETER Experiment Name: At_Petals_P Parameter: Tissue Value: Petals vs. Whole plant
  misc_feature: MA Experiment ID: 20001248 Result: Up-regulated in Transcription
  misc_feature: MA Experiment 20001248 PARAMETER Experiment Name: At_Far-red-induction_P Parameter: Age (day) Value: 7
  misc_feature: MA Experiment 20001248 PARAMETER Experiment Name: At_Far-red-induction_P Parameter: Light Value: Far-red vs. White
  misc_feature: MA Experiment 20001248 PARAMETER Experiment Name: At_Far-red-induction_P Parameter: Organism Value: A. thaliana
  misc_feature: MA Experiment 20001248 PARAMETER Experiment Name: At_Far-red-induction_P Parameter: Plant Line Value: Columbia
  misc_feature: MA Experiment 20001248 PARAMETER Experiment Name: At_Far-red-induction_P Parameter: Timepoint (hr) Value: 4
  misc_feature: MA Experiment 20001248 PARAMETER Experiment Name: At_Far-red-induction_P Parameter: Tissue Value: Whole Plant
  misc_feature: MA Experiment ID: 20001450 Result: Up-regulated in Transcription
  misc_feature: MA Experiment 20001450 PARAMETER Experiment Name: At_Far-red-induction_P Parameter: Age (day) Value: 7
  misc_feature: MA Experiment 20001450 PARAMETER Experiment Name: At_Far-red-induction_P Parameter: Light Value: Far-red vs. White
  misc_feature: MA Experiment 20001450 PARAMETER Experiment Name: At_Far-red-induction_P Parameter: Organism Value: A. thaliana
  misc_feature: MA Experiment 20001450 PARAMETER Experiment Name: At_Far-red-induction_P Parameter: Plant Line Value: Columbia
  misc_feature: MA Experiment 20001450 PARAMETER Experiment Name: At_Far-red-induction_P Parameter: Timepoint (hr) Value: 8
  misc_feature: MA Experiment 20001450 PARAMETER Experiment Name: At_Far-red-induction_P Parameter: Tissue Value: Whole Plant
atgattggtggtttcttcgccgatgttaaattcaacagatcgagagagaaaaaactctctctccctcctccgttcaccgtcgcgactcggctctacagtacattttgttgagcaatctcgtatttagaggattccaatgtctggcgcagaggataataaatcttcccatgctcagctttcgtcccaaatttttcttgatcttgtggattcggtgatagctgatgtagcatctgagtgtcatcgggtagcacgactaggacttgatcgtgatttggatatagtagaagaagagttgagattgtcagtggaagcgcgtgcgaagatcgctgatcctagcaacaacctcgaaaccaacaccaaatatgttgttgatatatttgggcagactcaccctcctgtagctagtgaagtgttcaattgcatgaactgtgggcgacaaattgttgcaggaaggtttgctcctcatctcgaaaaatgcatgggaaagggaagaaaggctcgtgccaagacaaccagaagcacaacggctgcacagaaccggaatgcacgacgcagccccaatccacgatattctccttatccaaattctgctagtgagaaccagttagcaagtggatcacctggtgttgcaggtgaagactgctcaaatttcacagttcgagagaacgtgaaaggagactgaagtacaactgatgagaggcttatactgattactgaacgacaatgtggctagtaactgactcgaccagactggtataaatcgaattgctaggtttatattcagttcacaaaaaaagagagaaaagcggcgcaaaaggaaaagtagcggaggttcataatgtagctatttctacagcttactaatggggtatcaatatattagtacatgcaccatcatgttataattacaaaaaactctgtagagtcctcaatcaaacagttcccactgttgtgtt

SEQ ID NO: 38473 - protein, 181 aa, Arabidopsis thaliana
  peptide (1)..(181): Ceres Seq. ID no. 12326662
  misc_feature (1)..(140): Homolog of NCBI NO: 26984622 NR Description: SI:dZ180G5.4 (novel protein) [Danio rerio]
  misc_feature (1)..(181): Homolog of NCBI NO: 22327952 NR Description: putative protein
  misc_feature (14)..(181): Homolog of NCBI NO: 8843778 NR Description: emb|CAB85555.1~gene_id:MZN1.2~similar to unknown
MSGAEDNKSSHAQLSSQIFLDLVDSVIADVASECHRVARLGLDRDLDIVEEELRLSVEARAKIADPSNNLETNTKYVVDIFGQTHPPVASEVFNCMNCGRQIVAGRFAPHLEKCMGKGRKARAKTTRSTTAAQNRNARRSPNPRYSPYPNSASENQLASGSPGVAGEDCSNFTVRENVKGD

SEQ ID NO: 38474 - DNA, 1116 bp, Arabidopsis thaliana
  misc_feature (1)..(1116): Ceres Seq. ID no. 12422005
  misc_feature: MA Experiment ID: 108569 Result: Up-regulated in Transcription
  misc_feature: MA Experiment 108569 PARAMETER Experiment Name: At_0.001%_MeJA__cDNA_P Parameter: Timepoint (hr) Value: 6
  misc_feature: MA Experiment 108569 PARAMETER Experiment Name: At_0.001%_MeJA__cDNA_P Parameter: Tissue Value: Aerial
  misc_feature: MA Experiment 108569 PARAMETER Experiment Name: At_0.001%_MeJA__cDNA_P Parameter: Treatment Value: 0.001% MeJA vs. No Treatment
  misc_feature: MA Experiment ID: 108579 Result: Down-regulated in Transcription
  misc_feature: MA Experiment 108579 PARAMETER Experiment Name: At_4deg_Cold_cDNA_P Parameter: Temperature (deg C) Value: 4 vs. 22
  misc_feature: MA Experiment 108579 PARAMETER Experiment Name: At_4deg_Cold_cDNA_P Parameter: Timepoint (hr) Value: 6
  misc_feature: MA Experiment 108579 PARAMETER Experiment Name: At_4deg_Cold_cDNA_P Parameter: Tissue Value: Aerial
  misc_feature: MA Experiment ID: 108595 Result: Down-regulated in Transcription
  misc_feature: MA Experiment 108595 PARAMETER Experiment Name: At_Ler-pi_Ovule_cDNA_P Parameter: Plant Line Value: null
  misc_feature: MA Experiment ID: 20000224 Result: Down-regulated in Transcription
  misc_feature: MA Experiment ID: 20001560 Result: Down-regulated in Transcription
  misc_feature: MA Experiment 20001560 PARAMETER Experiment Name: At_Drought_Soil_Dry_P Parameter: Age (day) Value: 28
  misc_feature: MA Experiment 20001560 PARAMETER Experiment Name: At_Drought_Soil_Dry_P Parameter: Organism Value: A. thaliana
  misc_feature: MA Experiment 20001560 PARAMETER Experiment Name: At_Drought_Soil_Dry_P Parameter: Plant Line Value: WS
  misc_feature: MA Experiment 20001560 PARAMETER Experiment Name: At_Drought_Soil_Dry_P Parameter: Post Timepoint (hr) Value: None
  misc_feature: MA Experiment 20001560 PARAMETER Experiment Name: At_Drought_Soil_Dry_P Parameter: Post-Treatment Value: None
  misc_feature: MA Experiment 20001560 PARAMETER Experiment Name: At_Drought_Soil_Dry_P Parameter: Timepoint (day) Value: 14
  misc_feature: MA Experiment 20001560 PARAMETER Experiment Name: At_Drought_Soil_Dry_P Parameter: Treatment Value: Drought vs. No Drought
  misc_feature: MA Experiment ID: 20001905 Result: Down-regulated in Transcription
  misc_feature: MA Experiment 20001905 PARAMETER Experiment Name: At_Drought_Reproduction_P Parameter: Age (day) Value: 40
  misc_feature: MA Experiment 20001905 PARAMETER Experiment Name: At_Drought_Reproduction_P Parameter: Organism Value: A. thaliana
  misc_feature: MA Experiment 20001905 PARAMETER Experiment Name: At_Drought_Reproduction_P Parameter: Plant Line Value: WS
  misc_feature: MA Experiment 20001905 PARAMETER Experiment Name: At_Drought_Reproduction_P Parameter: Timepoint (day) Value: 10
  misc_feature: MA Experiment 20001905 PARAMETER Experiment Name: At_Drought_Reproduction_P Parameter: Tissue Value: Rosettes
  misc_feature: MA Experiment 20001905 PARAMETER Experiment Name: At_Drought_Reproduction_P Parameter: Treatment Value: Drought vs. No Drought
cccaaagtcggcggaagaagatggtgtcgccgaaaatagcaccgtcgatgctgtcatcggacttcgcaaatctagcggcggaggccaatcggatgatcgatttgggcgctaactggcttcacatggatattatggacgggtaaaatttgctgccttacctgtggattcttattagcatccaaacccagcttgtaacatttttgtttcaagatagtttggtataataactctgtgtagctcccgcaggcattttgtccctaatcttacgattggtgctcctgtcatcgagagtttgcgaaagcacactaatgcatatcttgattgccaccttatggtgacgaaccccatggattacgttgcacagatggctaaagctggggcttctggtttcacattccacgtcgaggtggcccaagataattggcaacaacttgtcgagaagattaagtctactgggatgagaccaggcgtggctctaaagcctggaacacctgttgaacaagtctatcctctggttgaagggacaactccggttgaaatggttcttgtgatgactgtagaacctggatttggaggccagaagtttatgcctgacatgatggacaaggtccgggcattgaggcaaaaatacccaacacttgatattcaggtggatggcggcttaggcccttcaacgatcgacacagcggctgcagcaggcgccaactgtattgttgctggaagttcagtgtttggagctccggagccaggagatgtcatctcccttctgaggaccagtgttgagaaagcccaacccaccacttgaaagctgcacgtggtggcggtggtgctgagacggcgttgtattctcatcggaagatggtacctcttcgtttctctcaaggttaaaaagctggtcctttatgttttaaaatcatctcgtgaatcgtgatacttagtcttggttccaagaactgtataacgtcattttgagttattaattccctcaccacacagattatttcataggagttgggtaccaagagtagtgtgcaatgtataattagtaatttaataaacgtattaggttcagtcattttggaatggttataattatgaatacaagtatacaacatg

SEQ ID NO: 38475 - protein, 157 aa, Arabidopsis thaliana
  peptide (1)..(157): Ceres Seq. ID no. 12422006
  misc_feature (1)..(137): Pfam Name: Ribulose-phosphate 3 epimerase family Pfam Description: Ribulose-phosphate 3 epimerase family
  misc_feature (1)..(153): Homolog of NCBI NO: 17552948 NR Description: D-ribulose-5-Phosphate 3-epimerase (24.4 kD)
  misc_feature (1)..(153): Homolog of NCBI NO: 39581355 NR Description: Hypothetical protein CBG15299 [Caenorhabditis
  misc_feature (1)..(153): Homolog of NCBI NO: 40385883 NR Description: ribulose-5-phosphate-3-epimerase isoform 1
  misc_feature (1)..(153): Homolog of NCBI NO: 27532955 NR Description: RIKEN cDNA 5730518J08 [Mus musculus]
  misc_feature (1)..(152): Homolog of NCBI NO: 6322341 NR Description: D-ribulose-5-Phosphate 3-epimerase; Rpe1p
  misc_feature (1)..(156): Homolog of NCBI NO: 19114917 NR Description: putative ribulose phosphate 3-epimerase
  misc_feature (1)..(154): Homolog of NCBI NO: 28373310 NR Description: Chain A, The Structure Of The Cytosolic
  misc_feature (1)..(157): Homolog of NCBI NO: 15221735 NR Description: putative D-ribulose-5-phosphate-3-epimerase
  misc_feature (1)..(157): Homolog of NCBI NO: 6091725 NR Description: putative D-ribulose-5-phosphate 3-epimerase
  misc_feature (1)..(157): Homolog of NCBI NO: 18395962 NR Description: putative D-ribulose-5-phosphate 3-epimerase
MVTNPMDYVAQMAKAGASGFTFHVEVAQDNWQQLVEKIKSTGMRPGVALKPGTPVEQVYPLVEGTTPVEMVLVMTVEPGFGGQKFMPDMMDKVRALRQKYPTLDIQVDGGLGPSTIDTAAAAGANCIVAGSSVFGAPEPGDVISLLRTSVEKAQPTT

SEQ ID NO: 38476 - protein, 152 aa, Arabidopsis thaliana
  peptide (1)..(152): Ceres Seq. ID no. 12422007
  misc_feature (1)..(132): Pfam Name: Ribulose-phosphate 3 epimerase family Pfam Description: Ribulose-phosphate 3 epimerase family
  misc_feature (1)..(148): Homolog of NCBI NO: 17552948 NR Description: D-ribulose-5-Phosphate 3-epimerase (24.4 kD)
  misc_feature (1)..(148): Homolog of NCBI NO: 39581355 NR Description: Hypothetical protein CBG15299 [Caenorhabditis
  misc_feature (1)..(148): Homolog of NCBI NO: 40385883 NR Description: ribulose-5-phosphate-3-epimerase isoform 1
  misc_feature (1)..(148): Homolog of NCBI NO: 27532955 NR Description: RIKEN cDNA 5730518J08 [Mus musculus]
  misc_feature (1)..(147): Homolog of NCBI NO: 6322341 NR Description: D-ribulose-5-Phosphate 3-epimerase; Rpe1p
  misc_feature (1)..(151): Homolog of NCBI NO: 19114917 NR Description: putative ribulose phosphate 3-epimerase
  misc_feature (1)..(149): Homolog of NCBI NO: 28373310 NR Description: Chain A, The Structure Of The Cytosolic
  misc_feature (1)..(152): Homolog of NCBI NO: 15221735 NR Description: putative D-ribulose-5-phosphate-3-epimerase
  misc_feature (1)..(152): Homolog of NCBI NO: 6091725 NR Description: putative D-ribulose-5-phosphate 3-epimerase
  misc_feature (1)..(152): Homolog of NCBI NO: 18395962 NR Description: putative D-ribulose-5-phosphate 3-epimerase
MDYVAQMAKAGASGFTFHVEVAQDNWQQLVEKIKSTGMRPGVALKPGTPVEQVYPLVEGTTPVEMVLVMTVEPGFGGQKFMPDMMDKVRALRQKYPTLDIQVDGGLGPSTIDTAAAAGANCIVAGSSVFGAPEPGDVISLLRTSVEKAQPTT

SEQ ID NO: 38477 - protein, 146 aa, Arabidopsis thaliana
  peptide (1)..(146): Ceres Seq. ID no. 12422008
  misc_feature (1)..(126): Pfam Name: Ribulose-phosphate 3 epimerase family Pfam Description: Ribulose-phosphate 3 epimerase family
  misc_feature (1)..(142): Homolog of NCBI NO: 17552948 NR Description: D-ribulose-5-Phosphate 3-epimerase (24.4 kD)
  misc_feature (1)..(142): Homolog of NCBI NO: 39581355 NR Description: Hypothetical protein CBG15299 [Caenorhabditis
  misc_feature (1)..(142): Homolog of NCBI NO: 40385883 NR Description: ribulose-5-phosphate-3-epimerase isoform 1
  misc_feature (1)..(142): Homolog of NCBI NO: 27532955 NR Description: RIKEN cDNA 5730518J08 [Mus musculus]
  misc_feature (1)..(141): Homolog of NCBI NO: 6322341 NR Description: D-ribulose-5-Phosphate 3-epimerase; Rpe1p
  misc_feature (1)..(145): Homolog of NCBI NO: 19114917 NR Description: putative ribulose phosphate 3-epimerase
  misc_feature (1)..(143): Homolog of NCBI NO: 28373310 NR Description: Chain A, The Structure Of The Cytosolic
  misc_feature (1)..(146): Homolog of NCBI NO: 15221735 NR Description: putative D-ribulose-5-phosphate-3-epimerase
  misc_feature (1)..(146): Homolog of NCBI NO: 6091725 NR Description: putative D-ribulose-5-phosphate 3-epimerase
  misc_feature (1)..(146): Homolog of NCBI NO: 18395962 NR Description: putative D-ribulose-5-phosphate 3-epimerase
MAKAGASGFTFHVEVAQDNWQQLVEKIKSTGMRPGVALKPGTPVEQVYPLVEGTTPVEMVLVMTVEPGFGGQKFMPDMMDKVRALRQKYPTLDIQVDGGLGPSTIDTAAAAGANCIVAGSSVFGAPEPGDVISLLRTSVEKAQPTT

SEQ ID NO: 38478 - DNA, 1359 bp, Arabidopsis thaliana
  misc_feature (1)..(1359): Ceres Seq. ID no. 12328518
atactaaatcatcaccccaacactacaaagaagaaacacactctatctctctgtctcaatacatatttcctcacttctgatcagtgtgatcacgtagagtgccttgaaggagaagaaggaaacaaaaagaaataaaaatgggataccttatagaagaaactttaagctctaactctaaaaccccaattgttatcgatgatgataacgagttgggtttgatggccgtgagactagccaatgctgctgcctttccgatggttctcaaagccgccctcgagctcggtgtctttgacactctctatgctgaagcctctcgcagcgactcgttcctttcaccatcagaaatagcgagtaagctaccaactacacctcgtaaccctgaggctccggttttattggaccgtatgcttcgtctactcgctagctattctgtggtcaagtgtggtaaggtctcataaggaaagggtgagagggtctacagagccgagccaatttgcaggtttttcttgaaggataacattcaagatattggatcccttgcttctcaagtcattgtcaatttcgatagcgtcttcctcaatacttgggcacaattgaaagacgtggttctagaaggaggagatgcatttggccgcgcacatggtggtatgaagctctttgactatatgggtacagatgagagattcagcaaactatttaaccagaccggttttaccattgcggtggtgaagaaggctcttgaagtttaccaaggcttcaaagatgtggatgtgttggttgatgtgggaggtggagttggtaacactcttggtgttgtaacatctaagtatcccaatattaagggtatcaattttgatctaacttgcgccttggcacaagcaccctcttatcccggtgtggaacatgttgctggagatatgtttgtggatattccaaccggagatgctatgatcttgaaacgtatacttcatgattggaccgacgaagactgtgtgaagattcttaagaattgttggaaatcacttccagaaaacggtaaagtggttgtcatagaattagtcactcctgatgaggcagagaatggagacatcaacgcaaacattgcctttgacatggacatgttaatgttcacacaatgttccggaggaaaagagagatcaagagctgagtttgaagctttggctgcagcttctggctttacccattgcaagttcgtttgccaagcttatcactgctggattattgagttctgtaaataaaatgtgtgaaatgtaaaacaaaatcgtcgttaattatttattttcatctttgttgtcattctttcttgatatctttctcgtcgagtaataaaagtgtttt

SEQ ID NO: 38479 - protein, 203 aa, Arabidopsis thaliana
  peptide (1)..(203): Ceres Seq. ID no. 12328519
  misc_feature (1)..(180): Pfam Name: O-methyltransferase Pfam Description: O-methyltransferase
  misc_feature (1)..(203): Homolog of NCBI NO: 27808586 NR Description: At1g77520 [Arabidopsis thaliana]
  misc_feature (1)..(203): Homolog of NCBI NO: 15223976 NR Description: O-methyltransferase, family 2 family
  misc_feature (1)..(203): Homolog of NCBI NO: 21617938 NR Description: putative catechol O-methyltransferase
  misc_feature (1)..(104): Homolog of NCBI NO: 30687192 NR Description: O-methyltransferase 1, putative [Arabidopsis
  misc_feature (1)..(203): Homolog of NCBI NO: 15223731 NR Description: O-methyltransferase, family 2 family
  misc_feature (1)..(203): Homolog of NCBI NO: 15218135 NR Description: O-methyltransferase 1, putative; protein id:
  misc_feature (1)..(203): Homolog of NCBI NO: 15218137 NR Description: O-methyltransferase 1, putative
  misc_feature (1)..(203): Homolog of NCBI NO: 15218133 NR Description: O-methyltransferase 1, putative
  misc_feature (1)..(203): Homolog of NCBI NO: 15218138 NR Description: O-methyltransferase 1, putative
  misc_feature (1)..(203): Homolog of NCBI NO: 21618219 NR Description: O-methyltransferase, putative [Arabidopsis
MKLFDYMGTDERFSKLFNQTGFTIAVVKKALEVYQGFKDVDVLVDVGGGVGNTLGVVTSKYPNIKGINFDLTCALAQAPSYPGVEHVAGDMFVDIPTGDAMILKRILHDWTDEDCVKILKNCWKSLPENGKVVVIELVTPDEAENGDINANIAFDMDMLMFTQCSGGKERSRAEFEALAAASGFTHCKFVCQAYHCWIIEFCK

SEQ ID NO: 38480 - protein, 197 aa, Arabidopsis thaliana
  peptide (1)..(197): Ceres Seq. ID no. 12328520
  misc_feature (1)..(174): Pfam Name: O-methyltransferase Pfam Description: O-methyltransferase
  misc_feature (1)..(197): Homolog of NCBI NO: 27808586 NR Description: At1g77520 [Arabidopsis thaliana]
  misc_feature (1)..(197): Homolog of NCBI NO: 15223976 NR Description: O-methyltransferase, family 2 family
  misc_feature (1)..(197): Homolog of NCBI NO: 21617938 NR Description: putative catechol O-methyltransferase
  misc_feature (1)..(98): Homolog of NCBI NO: 30687192 NR Description: O-methyltransferase 1, putative [Arabidopsis
  misc_feature (1)..(197): Homolog of NCBI NO: 15223731 NR Description: O-methyltransferase, family 2 family
  misc_feature (1)..(197): Homolog of NCBI NO: 15218135 NR Description: O-methyltransferase 1, putative; protein id:
  misc_feature (1)..(197): Homolog of NCBI NO: 15218137 NR Description: O-methyltransferase 1, putative
  misc_feature (1)..(197): Homolog of NCBI NO: 15218133 NR Description: O-methyltransferase 1, putative
  misc_feature (1)..(197): Homolog of NCBI NO: 15218138 NR Description: O-methyltransferase 1, putative
  misc_feature (1)..(197): Homolog of NCBI NO: 21618219 NR Description: O-methyltransferase, putative [Arabidopsis
MGTDERFSKLFNQTGFTIAVVKKALEVYQGFKDVDVLVDVGGGVGNTLGVVTSKYPNIKGINFDLTCALAQAPSYPGVEHVAGDMFVDIPTGDAMILKRILHDWTDEDCVKILKNCWKSLPENGKVVVIELVTPDEAENGDINANIAFDMDMLMFTQCSGGKERSRAEFEALAAASGFTHCKFVCQAYHCWIIEFCK

SEQ ID NO: 38481 - protein, 113 aa, Arabidopsis thaliana
  peptide (1)..(113): Ceres Seq. ID no. 12328521
  misc_feature (1)..(90): Pfam Name: O-methyltransferase Pfam Description: O-methyltransferase
  misc_feature (1)..(113): Homolog of NCBI NO: 27808586 NR Description: At1g77520 [Arabidopsis thaliana]
  misc_feature (1)..(113): Homolog of NCBI NO: 15223976 NR Description: O-methyltransferase, family 2 family
  misc_feature (1)..(113): Homolog of NCBI NO: 21617938 NR Description: putative catechol O-methyltransferase
  misc_feature (1)..(14): Homolog of NCBI NO: 30687192 NR Description: O-methyltransferase 1, putative [Arabidopsis
  misc_feature (1)..(113): Homolog of NCBI NO: 15223731 NR Description: O-methyltransferase, family 2 family
  misc_feature (1)..(113): Homolog of NCBI NO: 15218135 NR Description: O-methyltransferase 1, putative; protein id:
  misc_feature (1)..(113): Homolog of NCBI NO: 15218137 NR Description: O-methyltransferase 1, putative
  misc_feature (1)..(113): Homolog of NCBI NO: 15218133 NR Description: O-methyltransferase 1, putative
  misc_feature (1)..(113): Homolog of NCBI NO: 15218138 NR Description: O-methyltransferase 1, putative
  misc_feature (1)..(113): Homolog of NCBI NO: 21618219 NR Description: O-methyltransferase, putative [Arabidopsis
MFVDIPTGDAMILKRILHDWTDEDCVKILKNCWKSLPENGKVVVIELVTPDEAENGDINANIAFDMDMLMFTQCSGGKERSRAEFEALAAASGFTHCKFVCQAYHCWIIEFCK

SEQ ID NO: 38482 - DNA, 1110 bp, Arabidopsis thaliana
  misc_feature (1)..(1110): Ceres Seq. ID no. 12711308
  misc_feature: MA Experiment ID: 20000234 Result: Up-regulated in Transcription
  misc_feature: MA Experiment 20000234 PARAMETER Experiment Name: At_Siliques_P Parameter: Age (day) Value: 21
  misc_feature: MA Experiment 20000234 PARAMETER Experiment Name: At_Siliques_P Parameter: Organism Value: A. thaliana
  misc_feature: MA Experiment 20000234 PARAMETER Experiment Name: At_Siliques_P Parameter: Plant Line Value: WS
  misc_feature: MA Experiment 20000234 PARAMETER Experiment Name: At_Siliques_P Parameter: Tissue Value: Less Than 5mm Siliques vs. Whole Plant
  misc_feature: MA Experiment ID: 20000264 Result: Up-regulated in Transcription
  misc_feature: MA Experiment 20000264 PARAMETER Experiment Name: At_Open_Flower_P Parameter: Age (day) Value: 21
  misc_feature: MA Experiment 20000264 PARAMETER Experiment Name: At_Open_Flower_P Parameter: Plant Line Value: WS
  misc_feature: MA Experiment 20000264 PARAMETER Experiment Name: At_Open_Flower_P Parameter: Tissue Value: Open Flower vs. Whole Plant
  misc_feature: MA Experiment ID: 20000265 Result: Up-regulated in Transcription
  misc_feature: MA Experiment 20000265 PARAMETER Experiment Name: At_Open_Flower_P Parameter: Age (day) Value: 21
  misc_feature: MA Experiment 20000265 PARAMETER Experiment Name: At_Open_Flower_P Parameter: Plant Line Value: WS
  misc_feature: MA Experiment 20000265 PARAMETER Experiment Name: At_Open_Flower_P Parameter: Tissue Value: Closed Flower vs. Whole Plant
  misc_feature: MA Experiment ID: 20000286 Result: Up-regulated in Transcription
  misc_feature: MA Experiment 20000286 PARAMETER Experiment Name: At_Open_Flower_P Parameter: Age (day) Value: 21
  misc_feature: MA Experiment 20000286 PARAMETER Experiment Name: At_Open_Flower_P Parameter: Plant Line Value: WS
  misc_feature: MA Experiment 20000286 PARAMETER Experiment Name: At_Open_Flower_P Parameter: Tissue Value: Half Open vs. Whole Plant
  misc_feature: MA Experiment ID: 20000794 Result: Up-regulated in Transcription
  misc_feature: MA Experiment 20000794 PARAMETER Experiment Name: At_Petals_P Parameter: Age (day) Value: 23-25 days
  misc_feature: MA Experiment 20000794 PARAMETER Experiment Name: At_Petals_P Parameter: Plant Line Value: WS
  misc_feature: MA Experiment 20000794 PARAMETER Experiment Name: At_Petals_P Parameter: Tissue Value: Petals vs. Whole plant
  misc_feature: MA Experiment ID: 20001910 Result: Up-regulated in Transcription
  misc_feature: MA Experiment 20001910 PARAMETER Experiment Name: At_Drought_Reproduction_P Parameter: Age (day) Value: 37
  misc_feature: MA Experiment 20001910 PARAMETER Experiment Name: At_Drought_Reproduction_P Parameter: Organism Value: A. thaliana
  misc_feature: MA Experiment 20001910 PARAMETER Experiment Name: At_Drought_Reproduction_P Parameter: Plant Line Value: WS
  misc_feature: MA Experiment 20001910 PARAMETER Experiment Name: At_Drought_Reproduction_P Parameter: Timepoint (day) Value: 7
  misc_feature: MA Experiment 20001910 PARAMETER Experiment Name: At_Drought_Reproduction_P Parameter: Tissue Value: Flowers
  misc_feature: MA Experiment 20001910 PARAMETER Experiment Name: At_Drought_Reproduction_P Parameter: Treatment Value: Drought vs. No Drought
acattctgagaagaagaagaagaaaataagaaaaaacaaaagatgaaaaccattatcctttttgtaacatttcttgctctttcttcttcatctctagccgatgagacagagactgaatttcattacaaacccggtgagatagccgatccctcgaaatggagcagtatcaaggctgaatggaaaatttgcgggacagggaagaggcaatcgccaatcaatcttactccaaaaatagctcgcattgttcacaattctacagagattcttcagacatattacaaacctgtagaggctattcttaagaaccgtggattcgacatgaaggttaagtgggaagacgatgcagggaagatcgtgatcaatgataccgactataaattggttcaaagccactggcacgcaccttcagagcattttctcgatggacagaggttggcaatggaacttcacatggtacacaaaagtgtagaagggcacttggcagtgattggagttctcttcagagaaggagaaccaaatgctttcatttcgcggatcatggacaagatccataagatcgcagacgtacaagatggagaggtcagcatcggaaagatagatccaagagaatttggatgggatcttacaaagttttatgaatacagaggttctctcacgactcctccttgcacggaagatgtcatgtggaccatcatcaacaaggtggggactgtttcacgtgagcaaattgatgtattgacagatgctcgtcgcggtggttatgagaagaacgcgagaccagctcaacctctgaacggacgtctggtttatttaaacgagcagtccagtccaagtccaactccacggctaagaataccacgagttggtccggtctaagacagtcttataggacaaggcaactccgagccctaatttccatacaaagaaaattcggaaaagaattttgaagatgtatgaaaattgggagccataactatttttttttaactattcttttgattaaaagataaaactacgcaatattatatgcataaagtttttcttttatacatgtattccaataaacaagatgtaataatatccaaccataatgagttgtttgattatttt

SEQ ID NO: 38483 - protein, 277 aa, Arabidopsis thaliana
  peptide (1)..(277): Ceres Seq. ID no. 12711309
  misc_feature (31)..(259): Pfam Name: Eukaryotic-type carbonic anhydrase Pfam Description: Eukaryotic-type carbonic anhydrase
  misc_feature (4)..(257): Homolog of NCBI NO: 25407021 NR Description: protein T6D22.16 [imported] - Arabidopsis
  misc_feature (23)..(264): Homolog of NCBI NO: 2147328 NR Description: dioscorin class B - Dioscorea cayenensis
  misc_feature (8)..(257): Homolog of NCBI NO: 37806288 NR Description: putative dioscorin [Oryza sativa (japonica
  misc_feature (2)..(221): Homolog of NCBI NO: 15233474 NR Description: carbonic anhydrase - like protein; protein id:
  misc_feature (21)..(223): Homolog of NCBI NO: 30683808 NR Description: carbonic anhydrase -related [Arabidopsis thaliana]
  misc_feature (3)..(258): Homolog of NCBI NO: 29468280 NR Description: nectarin III [Nicotiana langsdorffii x Nicotiana
  misc_feature (4)..(257): Homolog of NCBI NO: 15223122 NR Description: storage protein, putative; protein id:
  misc_feature (21)..(262): Homolog of NCBI NO: 25291473 NR Description: probable carbonic anhydrase [imported] -
  misc_feature (1)..(256): Homolog of NCBI NO: 15233471 NR Description: carbonic anhydrase -like protein; protein id:
  misc_feature (1)..(277): Homolog of NCBI NO: 15237646 NR Description: carbonate dehydratase - like protein
MKTIILFVTFLALSSSSLADETETEFHYKPGEIADPSKWSSIKAEWKICGTGKRQSPINLTPKIARIVHNSTEILQTYYKPVEAILKNRGFDMKVKWEDDAGKIVINDTDYKLVQSHWHAPSEHFLDGQRLAMELHMVHKSVEGHLAVIGVLFREGEPNAFISRIMDKIHKIADVQDGEVSIGKIDPREFGWDLTKFYEYRGSLTTPPCTEDVMWTIINKVGTVSREQIDVLTDARRGGYEKNARPAQPLNGRLVYLNEQSSPSPTPRLRIPRVGPV

SEQ ID NO: 38484 - protein, 185 aa, Arabidopsis thaliana
  peptide (1)..(185): Ceres Seq. ID no. 12711310
  misc_feature (1)..(167): Pfam Name: Eukaryotic-type carbonic anhydrase Pfam Description: Eukaryotic-type carbonic anhydrase
  misc_feature (1)..(165): Homolog of NCBI NO: 25407021 NR Description: protein T6D22.16 [imported] - Arabidopsis
  misc_feature (1)..(172): Homolog of NCBI NO: 2147328 NR Description: dioscorin class B - Dioscorea cayenensis
  misc_feature (1)..(165): Homolog of NCBI NO: 37806288 NR Description: putative dioscorin [Oryza sativa (japonica
  misc_feature (1)..(129): Homolog of NCBI NO: 15233474 NR Description: carbonic anhydrase - like protein; protein id:
  misc_feature (1)..(131): Homolog of NCBI NO: 30683808 NR Description: carbonic anhydrase -related [Arabidopsis thaliana]
  misc_feature (1)..(166): Homolog of NCBI NO: 29468280 NR Description: nectarin III [Nicotiana langsdorffii x Nicotiana
  misc_feature (1)..(165): Homolog of NCBI NO: 15223122 NR Description: storage protein, putative; protein id:
  misc_feature (1)..(170): Homolog of NCBI NO: 25291473 NR Description: probable carbonic anhydrase [imported] -
  misc_feature (1)..(164): Homolog of NCBI NO: 15233471 NR Description: carbonic anhydrase -like protein; protein id:
  misc_feature (1)..(185): Homolog of NCBI NO: 15237646 NR Description: carbonate dehydratase - like protein
MKVKWEDDAGKIVINDTDYKLVQSHWHAPSEHFLDGQRLAMELHMVHKSVEGHLAVIGVLFREGEPNAFISRIMDKIHKIADVQDGEVSIGKIDPREFGWDLTKFYEYRGSLTTPPCTEDVMWTIINKVGTVSREQIDVLTDARRGGYEKNARPAQPLNGRLVYLNEQSSPSPTPRLRIPRVGPV

SEQ ID NO: 38485 - protein, 145 aa, Arabidopsis thaliana
  peptide (1)..(145): Ceres Seq. ID no. 12711311
  misc_feature (1)..(127): Pfam Name: Eukaryotic-type carbonic anhydrase Pfam Description: Eukaryotic-type carbonic anhydrase
  misc_feature (1)..(125): Homolog of NCBI NO: 25407021 NR Description: protein T6D22.16 [imported] - Arabidopsis
  misc_feature (1)..(132): Homolog of NCBI NO: 2147328 NR Description: dioscorin class B - Dioscorea cayenensis
  misc_feature (1)..(125): Homolog of NCBI NO: 37806288 NR Description: putative dioscorin [Oryza sativa (japonica
  misc_feature (1)..(89): Homolog of NCBI NO: 15233474 NR Description: carbonic anhydrase - like protein; protein id:
  misc_feature (1)..(91): Homolog of NCBI NO: 30683808 NR Description: carbonic anhydrase -related [Arabidopsis thaliana]
  misc_feature (1)..(126): Homolog of NCBI NO: 29468280 NR Description: nectarin III [Nicotiana langsdorffii x Nicotiana
  misc_feature (1)..(125): Homolog of NCBI NO: 15223122 NR Description: storage protein, putative; protein id:
  misc_feature (1)..(130): Homolog of NCBI NO: 25291473 NR Description: probable carbonic anhydrase [imported] -
  misc_feature (1)..(124): Homolog of NCBI NO: 15233471 NR Description: carbonic anhydrase -like protein; protein id:
  misc_feature (1)..(145): Homolog of NCBI NO: 15237646 NR Description: carbonate dehydratase - like protein
MELHMVHKSVEGHLAVIGVLFREGEPNAFISRIMDKIHKIADVQDGEVSIGKIDPREFGWDLTKFYEYRGSLTTPPCTEDVMWTIINKVGTVSREQIDVLTDARRGGYEKNARPAQPLNGRLVYLNEQSSPSPTPRLRIPRVGPV

SEQ ID NO: 38486 - DNA, 1503 bp, Arabidopsis thaliana
  misc_feature (1)..(1503): Ceres Seq. ID no. 12328773
  misc_feature: MA Experiment ID: 108434 Result: Down-regulated in Transcription
  misc_feature: MA Experiment 108434 PARAMETER Experiment Name: At_Root_Tips_cDNA_P Parameter: Tissue Value: Root Tips
  misc_feature: MA Experiment ID: 108464 Result: Up-regulated in Transcription
  misc_feature: MA Experiment 108464 PARAMETER Experiment Name: At_Germinating_Seeds_cDNA_P Parameter: Age (day) Value: 4 vs. 0
  misc_feature: MA Experiment 108464 PARAMETER Experiment Name: At_Germinating_Seeds_cDNA_P Parameter: Tissue Value: Germinating Seeds
  misc_feature: MA Experiment ID: 108576 Result: Up-regulated in Transcription
  misc_feature: MA Experiment 108576 PARAMETER Experiment Name: At_42deg_Heat_cDNA_P Parameter: Temperature (deg C) Value: 42 vs. 22
  misc_feature: MA Experiment 108576 PARAMETER Experiment Name: At_42deg_Heat_cDNA_P Parameter: Timepoint (hr) Value: 1
  misc_feature: MA Experiment 108576 PARAMETER Experiment Name: At_42deg_Heat_cDNA_P Parameter: Tissue Value: Aerial
  misc_feature: MA Experiment ID: 108609 Result: Up-regulated in Transcription
  misc_feature: MA Experiment 108609 PARAMETER Experiment Name: At_100uM_ABA_cDNA_P Parameter: Timepoint (hr) Value: 24
  misc_feature: MA Experiment 108609 PARAMETER Experiment Name: At_100uM_ABA_cDNA_P Parameter: Tissue Value: Aerial
  misc_feature: MA Experiment 108609 PARAMETER Experiment Name: At_100uM_ABA_cDNA_P Parameter: Treatment Value: 100uM ABA vs. No Treatment
  misc_feature: MA Experiment ID: 20000068 Result: Down-regulated in Transcription
  misc_feature: MA Experiment ID: 20000093 Result: Up-regulated in Transcription
  misc_feature: MA Experiment 20000093 PARAMETER Experiment Name: At_42deg_Heat_cDNA_P Parameter: Temperature (deg C) Value: 42 vs. 22
  misc_feature: MA Experiment 20000093 PARAMETER Experiment Name: At_42deg_Heat_cDNA_P Parameter: Timepoint (hr) Value: 0.5
  misc_feature: MA Experiment 20000093 PARAMETER Experiment Name: At_42deg_Heat_cDNA_P Parameter: Tissue Value: Aerial
  misc_feature: MA Experiment ID: 20000113 Result: Up-regulated in Transcription
  misc_feature: MA Experiment 20000113 PARAMETER Experiment Name: At_42deg_Heat_cDNA_P Parameter: Temperature (deg C) Value: 42 vs. 22
  misc_feature: MA Experiment 20000113 PARAMETER Experiment Name: At_42deg_Heat_cDNA_P Parameter: Timepoint (hr) Value: 8
  misc_feature: MA Experiment 20000113 PARAMETER Experiment Name: At_42deg_Heat_cDNA_P Parameter: Tissue Value: Aerial
  misc_feature: MA Experiment ID: 20000173 Result: Up-regulated in Transcription
  misc_feature: MA Experiment 20000173 PARAMETER Experiment Name: At_42deg_Heat_P Parameter: Age (day) Value: 14
  misc_feature: MA Experiment 20000173 PARAMETER Experiment Name: At_42deg_Heat_P Parameter: Organism Value: A. thaliana
  misc_feature: MA Experiment 20000173 PARAMETER Experiment Name: At_42deg_Heat_P Parameter: Plant Line Value: WS
  misc_feature: MA Experiment 20000173 PARAMETER Experiment Name: At_42deg_Heat_P Parameter: Temperature (deg C) Value: 42 vs. 22
  misc_feature: MA Experiment 20000173 PARAMETER Experiment Name: At_42deg_Heat_P Parameter: Timepoint (hr) Value: 6
  misc_feature: MA Experiment 20000173 PARAMETER Experiment Name: At_42deg_Heat_P Parameter: Tissue Value: Aerial
  misc_feature: MA Experiment ID: 20000224 Result: Down-regulated in Transcription
  misc_feature: MA Experiment ID: 20000443 Result: Up-regulated in Transcription
  misc_feature: MA Experiment 20000443 PARAMETER Experiment Name: At_1uM_BR-BRZ__P Parameter: Tissue Value: Shoot Apices
  misc_feature: MA Experiment 20000443 PARAMETER Experiment Name: At_1uM_BR-BRZ__P Parameter: Treatment Value: 1uM BRZ vs. No Treatment
  misc_feature: MA Experiment ID: 20001451 Result: Up-regulated in Transcription
  misc_feature: MA Experiment 20001451 PARAMETER Experiment Name: At_Far-red-induction_P Parameter: Age (day) Value: 7
  misc_feature: MA Experiment 20001451 PARAMETER Experiment Name: At_Far-red-induction_P Parameter: Light Value: Far-red vs. White
  misc_feature: MA Experiment 20001451 PARAMETER Experiment Name: At_Far-red-induction_P Parameter: Organism Value: A. thaliana
  misc_feature: MA Experiment 20001451 PARAMETER Experiment Name: At_Far-red-induction_P Parameter: Plant Line Value: Columbia
  misc_feature: MA Experiment 20001451 PARAMETER Experiment Name: At_Far-red-induction_P Parameter: Timepoint (hr) Value: 24
  misc_feature: MA Experiment 20001451 PARAMETER Experiment Name: At_Far-red-induction_P Parameter: Tissue Value: Whole Plant
cttctctttcctctctctcacacacatcttcgagaagtttccgccggcgggagagatcaaagacaactgctgatcagaaatcagagatcagagatatgaacattctcttctccagattctcctttttgcttctgtttctctgttcttggaccattttcactttcaccacaacagaagcttatgatgcacttgatccatatggaaacattactataaaatgggatattatgagctggactggtgatggttatgtggctgttgtaacaatctttaatttccaacaataccgtcacatagaggcgccggggtggcaattaggatggagttggatgaagaaggaagtaatatggagtatggttggtggtcaagcaacagaacaaggagattgttctaagtttaagggtaacattcctcattgctgcaagaaaactccggctatcgttgatttgttaccgggaactccttataaccagcagatatccaactgttgtagagggggtgtgattagcgcgtgggcacaagaccccgcaaccgcgatttcttcgtttcagatcagtgttggccagtctggaacaactaatactacggttagagcacctaggaatataactttgaaggctccaggacctggttacacttgcgggcctgcaaaactcgttaagccgagtagattcatttccgcggataaacgaagaaagactcagtctttgcttacatggaacattacttgcacatattcgcagtttctagcacggaaaactccgacttgttgtgtctcactctcagccttctacaatgaaactatagtaccatgtccaacttgttcttgtggatgtcaaaatagttctcaagctggtacatgtgttgaccctaaaatagcttcagtagtaccagccttagggaagaacaacctcgaacctctcttgcaatgtacgcaacatatgtgtcccattcgagttcattggcatgtaaaaactagctacaaagagtactggagagtgaaggttgccatcacaaactttaactacaatatgaactactctcagtggaacttagtctttcagcatcccaacttcgacaatctcactcagcttttcagtttcaactacaaaccgcttaatccttacttgaacataaatgacacggccatgctatggggaatcaagttctacaatgattttttaagccaagctggtccagtaggcaatgtacagtcagagcttctcttccaaaagaacccattggagttcacattcgagaaaggatgggcgtttccgaggcgcatatacttcaacggtgataactgcgttatgccacctccagactcttatccatggcttccaaacgctagtccaaacattgcaacctcgccatttgtcatacttctcatcactttcttatctgttttgattcttatgtaaatggatatctatataccgtcatggacatgtttggtgatgtttacattataagtgagtgtgttattaggaaatcattctttgc

SEQ ID NO: 38487 - protein, 472 aa, Arabidopsis thaliana
  peptide (1)..(472): Ceres Seq. ID no. 12328774
  misc_feature (83)..(247): Pfam Name: Phytochelatin synthetase-like conserved region Pfam Description: Phytochelatin synthetase-like conserved region
  misc_feature (56)..(469): Homolog of NCBI NO: 30090032 NR Description: phytochelatin synthetase [Triticum monococcum]
  misc_feature (55)..(465): Homolog of NCBI NO: 30090026 NR Description: phytochelatin synthetase-like protein 2 [Sorghum
  misc_feature (32)..(470): Homolog of NCBI NO: 18424412 NR Description: phytochelatin synthetase - like protein
  misc_feature (32)..(470): Homolog of NCBI NO: 21553837 NR Description: phytochelatin synthetase-like protein
  misc_feature (35)..(466): Homolog of NCBI NO: 15232863 NR Description: unknown protein; protein id: At3g02210.1
  misc_feature (305)..(472): Homolog of NCBI NO: 10092257 NR Description: unknown protein; 31818-33764 [Arabidopsis
  misc_feature (32)..(291): Homolog of NCBI NO: 10092257 NR Description: unknown protein; 31818-33764 [Arabidopsis
  misc_feature (32)..(472): Homolog of NCBI NO: 13477083 NR Description: phytochelatin synthetase-like protein
  misc_feature (32)..(472): Homolog of NCBI NO: 18406342 NR Description: phytochelatin synthetase-like protein
  misc_feature (32)..(472): Homolog of NCBI NO: 21618129 NR Description: phytochelatin synthetase-like protein
SLSSLSHTSSRSFRRRERSKTTADQKSEIRDMNILFSRFSFLLLFLCSWTIFTFTTTEAYDALDPYGNITIKWDIMSWTGDGYVAVVTIFNFQQYRHIEAPGWQLGWSWMKKEVIWSMVGGQATEQGDCSKFKGNIPHCCKKTPAIVDLLPGTPYNQQISNCCRGGVISAWAQDPATAISSFQISVGQSGTTNTTVRAPRNITLKAPGPGYTCGPAKLVKPSRFISADKRRKTQSLLTWNITCTYSQFLARKTPTCCVSLSAFYNETIVPCPTCSCGCQNSSQAGTCVDPKIASVVPALGKNNLEPLLQCTQHMCPIRVHWHVKTSYKEYWRVKVAITNFNYNMNYSQWNLVFQHPNFDNLTQLFSFNYKPLNPYLNINDTAMLWGIKFYNDFLSQAGPVGNVQSELLFQKNPLEFTFEKGWAFPRRIYFNGDNCVMPPPDSYPWLPNASPNIATSPFVILLITFLSVLILM

SEQ ID NO: 38488 - protein, 441 aa, Arabidopsis thaliana
  peptide (1)..(441): Ceres Seq. ID no. 12328775
  misc_feature (52)..(216): Pfam Name: Phytochelatin synthetase-like conserved region Pfam Description: Phytochelatin synthetase-like conserved region
  misc_feature (25)..(438): Homolog of NCBI NO: 30090032 NR Description: phytochelatin synthetase [Triticum monococcum]
  misc_feature (24)..(434): Homolog of NCBI NO: 30090026 NR Description: phytochelatin synthetase-like protein 2 [Sorghum
  misc_feature (1)..(439): Homolog of NCBI NO: 18424412 NR Description: phytochelatin synthetase - like protein
  misc_feature (1)..(439): Homolog of NCBI NO: 21553837 NR Description: phytochelatin synthetase-like protein
  misc_feature (4)..(435): Homolog of NCBI NO: 15232863 NR Description: unknown protein; protein id: At3g02210.1
  misc_feature (274)..(441): Homolog of NCBI NO: 10092257 NR Description: unknown protein; 31818-33764 [Arabidopsis
  misc_feature (1)..(260): Homolog of NCBI NO: 10092257 NR Description: unknown protein; 31818-33764 [Arabidopsis
  misc_feature (1)..(441): Homolog of NCBI NO: 13477083 NR Description: phytochelatin synthetase-like protein
  misc_feature (1)..(441): Homolog of NCBI NO: 18406342 NR Description: phytochelatin synthetase-like protein
  misc_feature (1)..(441): Homolog of NCBI NO: 21618129 NR Description: phytochelatin synthetase-like protein
MNILFSRFSFLLLFLCSWTIFTFTTTEAYDALDPYGNITIKWDIMSWTGDGYVAVVTIFNFQQYRHIEAPGWQLGWSWMKKEVIWSMVGGQATEQGDCSKFKGNIPHCCKKTPAIVDLLPGTPYNQQISNCCRGGVISAWAQDPATAISSFQISVGQSGTTNTTVRAPRNITLKAPGPGYTCGPAKLVKPSRFISADKRRKTQSLLTWNITCTYSQFLARKTPTCCVSLSAFYNETIVPCPTCSCGCQNSSQAGTCVDPKIASVVPALGKNNLEPLLQCTQHMCPIRVHWHVKTSYKEYWRVKVAITNFNYNMNYSQWNLVFQHPNFDNLTQLFSFNYKPLNPYLNINDTAMLWGIKFYNDFLSQAGPVGNVQSELLFQKNPLEFTFEKGWAFPRRIYFNGDNCVMPPPDSYPWLPNASPNIATSPFVILLITFLSVLILM

SEQ ID NO: 38489 - protein, 397 aa, Arabidopsis thaliana
  peptide (1)..(397): Ceres Seq. ID no. 12328776
  misc_feature (8)..(172): Pfam Name: Phytochelatin synthetase-like conserved region Pfam Description: Phytochelatin synthetase-like conserved region
  misc_feature (1)..(394): Homolog of NCBI NO: 30090032 NR Description: phytochelatin synthetase [Triticum monococcum]
  misc_feature (1)..(390): Homolog of NCBI NO: 30090026 NR Description: phytochelatin synthetase-like protein 2 [Sorghum
  misc_feature (1)..(395): Homolog of NCBI NO: 18424412 NR Description: phytochelatin synthetase - like protein
  misc_feature (1)..(395): Homolog of NCBI NO: 21553837 NR Description: phytochelatin synthetase-like protein
  misc_feature (1)..(391): Homolog of NCBI NO: 15232863 NR Description: unknown protein; protein id: At3g02210.1
  misc_feature (230)..(397): Homolog of NCBI NO: 10092257 NR Description: unknown protein; 31818-33764 [Arabidopsis
  misc_feature (1)..(216): Homolog of NCBI NO: 10092257 NR Description: unknown protein; 31818-33764 [Arabidopsis
  misc_feature (1)..(397): Homolog of NCBI NO: 13477083 NR Description: phytochelatin synthetase-like protein
  misc_feature (1)..(397): Homolog of NCBI NO: 18406342 NR Description: phytochelatin synthetase-like protein
  misc_feature (1)..(397): Homolog of NCBI NO: 21618129 NR Description: phytochelatin synthetase-like protein
MSWTGDGYVAVVTIFNFQQYRHIEAPGWQLGWSWMKKEVIWSMVGGQATEQGDCSKFKGNIPHCCKKTPAIVDLLPGTPYNQQISNCCRGGVISAWAQDPATAISSFQISVGQSGTTNTTVRAPRNITLKAPGPGYTCGPAKLVKPSRFISADKRRKTQSLLTWNITCTYSQFLARKTPTCCVSLSAFYNETIVPCPTCSCGCQNSSQAGTCVDPKIASVVPALGKNNLEPLLQCTQHMCPIRVHWHVKTSYKEYWRVKVAITNFNYNMNYSQWNLVFQHPNFDNLTQLFSFNYKPLNPYLNINDTAMLWGIKFYNDFLSQAGPVGNVQSELLFQKNPLEFTFEKGWAFPRRIYFNGDNCVMPPPDSYPWLPNASPNIATSPFVILLITFLSVLILM

SEQ ID NO: 38490 - DNA, 1383 bp, Arabidopsis thaliana
  misc_feature (1)..(1383): Ceres Seq. ID no. 13489199
  misc_feature: MA Experiment ID: 20000171 Result: Down-regulated in Transcription
  misc_feature: MA Experiment 20000171 PARAMETER Experiment Name: At_42deg_Heat_P Parameter: Age (day) Value: 14
  misc_feature: MA Experiment 20000171 PARAMETER Experiment Name: At_42deg_Heat_P Parameter: Organism Value: A. thaliana
  misc_feature: MA Experiment 20000171 PARAMETER Experiment Name: At_42deg_Heat_P Parameter: Plant Line Value: WS
  misc_feature: MA Experiment 20000171 PARAMETER Experiment Name: At_42deg_Heat_P Parameter: Temperature (deg C) Value: 42 vs. 22
  misc_feature: MA Experiment 20000171 PARAMETER Experiment Name: At_42deg_Heat_P Parameter: Timepoint (hr) Value: 1
  misc_feature: MA Experiment 20000171 PARAMETER Experiment Name: At_42deg_Heat_P Parameter: Tissue Value: Aerial
  misc_feature: MA Experiment ID: 20000173 Result: Down-regulated in Transcription
  misc_feature: MA Experiment 20000173 PARAMETER Experiment Name: At_42deg_Heat_P Parameter: Age (day) Value: 14
  misc_feature: MA Experiment 20000173 PARAMETER Experiment Name: At_42deg_Heat_P Parameter: Organism Value: A. thaliana
  misc_feature: MA Experiment 20000173 PARAMETER Experiment Name: At_42deg_Heat_P Parameter: Plant Line Value: WS
  misc_feature: MA Experiment 20000173 PARAMETER Experiment Name: At_42deg_Heat_P Parameter: Temperature (deg C) Value: 42 vs. 22
  misc_feature: MA Experiment 20000173 PARAMETER Experiment Name: At_42deg_Heat_P Parameter: Timepoint (hr) Value: 6
  misc_feature: MA Experiment 20000173 PARAMETER Experiment Name: At_42deg_Heat_P Parameter: Tissue Value: Aerial
  misc_feature: MA Experiment ID: 20000180 Result: Up-regulated in Transcription
  misc_feature: MA Experiment 20000180 PARAMETER Experiment Name: At_Germinating_Seeds_P Parameter: Age (hr) Value: 24 vs. 0
  misc_feature: MA Experiment 20000180 PARAMETER Experiment Name: At_Germinating_Seeds_P Parameter: Tissue Value: Germinating Seeds
  misc_feature: MA Experiment ID: 20000184 Result: Down-regulated in Transcription
  misc_feature: MA Experiment 20000184 PARAMETER Experiment Name: At_Shoots__P Parameter: Age (day) Value: 7
  misc_feature: MA Experiment 20000184 PARAMETER Experiment Name: At_Shoots__P Parameter: Tissue Value: Shoots vs. Whole Plant
  misc_feature: MA Experiment ID: 20000185 Result: Down-regulated in Transcription
  misc_feature: MA Experiment 20000185 PARAMETER Experiment Name: At_Roots__P Parameter: Age (day) Value: 7 vs. 21
  misc_feature: MA Experiment 20000185 PARAMETER Experiment Name: At_Roots__P Parameter: Organism Value: A. thaliana
  misc_feature: MA Experiment 20000185 PARAMETER Experiment Name: At_Roots__P Parameter: Tissue Value: Roots vs. Whole Plant
  misc_feature: MA Experiment ID: 20000234 Result: Up-regulated in Transcription
  misc_feature: MA Experiment 20000234 PARAMETER Experiment Name: At_Siliques_P Parameter: Age (day) Value: 21
  misc_feature: MA Experiment 20000234 PARAMETER Experiment Name: At_Siliques_P Parameter: Organism Value: A. thaliana
  misc_feature: MA Experiment 20000234 PARAMETER Experiment Name: At_Siliques_P Parameter: Plant Line Value: WS
  misc_feature: MA Experiment 20000234 PARAMETER Experiment Name: At_Siliques_P Parameter: Tissue Value: Less Than 5mm Siliques vs. Whole Plant
  misc_feature: MA Experiment ID: 20000439 Result: Down-regulated in Transcription
  misc_feature: MA Experiment 20000439 PARAMETER Experiment Name: At_Roots__P Parameter: Age (day) Value: 14 vs. 21
  misc_feature: MA Experiment 20000439 PARAMETER Experiment Name: At_Roots__P Parameter: Organism Value: A. thaliana
  misc_feature: MA Experiment 20000439 PARAMETER Experiment Name: At_Roots__P Parameter: Tissue Value: Roots vs. Whole Plant
  misc_feature: MA Experiment ID: 20001905 Result: Down-regulated in Transcription
  misc_feature: MA Experiment 20001905 PARAMETER Experiment Name: At_Drought_Reproduction_P Parameter: Age (day) Value: 40
  misc_feature: MA Experiment 20001905 PARAMETER Experiment Name: At_Drought_Reproduction_P Parameter: Organism Value: A. thaliana
  misc_feature: MA Experiment 20001905 PARAMETER Experiment Name: At_Drought_Reproduction_P Parameter: Plant Line Value: WS
  misc_feature: MA Experiment 20001905 PARAMETER Experiment Name: At_Drought_Reproduction_P Parameter: Timepoint (day) Value: 10
  misc_feature: MA Experiment 20001905 PARAMETER Experiment Name: At_Drought_Reproduction_P Parameter: Tissue Value: Rosettes
  misc_feature: MA Experiment 20001905 PARAMETER Experiment Name: At_Drought_Reproduction_P Parameter: Treatment Value: Drought vs. No Drought
ggtctcactgaaactgtgaaaattttatctcttttatagataaagaatcttgcttttttcagttttcagtatgaagaagaattgaagagagtgtccgaggaaggagacctttggtttcagtttgtgagtcttgttgtaatggctttatcaatggagtttgggttttcaattgggtcatgcttcaaggcaccaaacccacctgttctaatctctgcaagccctaataagatcaatttcacgttgagaaggagaaagaaaagattcttacttagagtctctgctgtgtcgtataaggaattcgcagagtctgctttagaagaaaccaggaaaaggatcgttcttgaaccttcacatctccaggaaaagtatagtagcatgacaggactagatggtaagaccgaacttcaaatgcttgcttttaaatcttcaaagattagactcttgaggagtatggcaatagagaatgagacaatgcaggtctttgactttgcgggtttcatggagcctgagtatgatactcccatattctgtgctaactttttcacatctaccaacgttaacatagttgtattggaccttaatcctttgcatcagttgactgaccagacggattaccaagacaagtattataacaagataatgtccatatatcacaaatatgctgagactttcccatggggagggaaattgactggtgaatccataaagtttttctcgcctttggtgatgtggactaggttttcgtctagcaaagaaaaacataaggctttgttctctgcgtttctagagtactatcaggcatggcttgagatgacaatccaagtgagggaggagatggaaccatctcatgtgagagccaattgtgaagcacaacacaagtacctgacatggcgagcacaaaaggatcctggacatggtcttcttaaaagattagtaggtgaagcaaaggcaaaggagctgctaagggatttcctgttcaatggggtggatgagttaggcacaaaaacattcattgattactttccagagtaccaaacagaagatggaactgtaagcgataaacgaagtatcattgggaagtcatatgaaactcgtccatgggatttaacaggacaatttatcggctaacaatgatatatgtgaacaagtcagatttcagagtcatcaacacaagaggacgtgaacttagggaagtaggaataagaaagagcagcatgaggagtctctcaggtctatctgcatttcaagatgattgtttgagttaccatgcattgtagttttacaagtgtagctctcagcccttcatcaaaatgagaatcctcgagtatgatatgattttaatgaaaatgtattcgtctctacctaatcaacagagattaactt

SEQ ID NO: 38491 - protein, 329 aa, Arabidopsis thaliana
  peptide (1)..(329): Ceres Seq. ID no. 13489200
  misc_feature (54)..(281): Pfam Name: Ferredoxin-dependent bilin reductase Pfam Description: Ferredoxin-dependent bilin reductase
  misc_feature (51)..(281): Homolog of NCBI NO: 34223769 NR Description: PebB [Fremyella diplosiphon]
  misc_feature (45)..(281): Homolog of NCBI NO: 23127198 NR Description: hypothetical protein [Nostoc punctiforme]
  misc_feature (263)..(329): Homolog of NCBI NO: 19386814 NR Description: B1147A04.9 [Oryza sativa (japonica
  misc_feature (51)..(211): Homolog of NCBI NO: 19386814 NR Description: B1147A04.9 [Oryza sativa (japonica
  misc_feature (219)..(329): Homolog of NCBI NO: 5923680 NR Description: hypothetical protein [Arabidopsis thaliana]
  misc_feature (1)..(74): Homolog of NCBI NO: 5923680 NR Description: hypothetical protein [Arabidopsis thaliana]
  misc_feature (94)..(288): Homolog of NCBI NO: 5923680 NR Description: hypothetical protein [Arabidopsis thaliana]
  misc_feature (5)..(329): Homolog of NCBI NO: 21618130 NR Description: unknown [Arabidopsis thaliana]
  misc_feature (1)..(329): Homolog of NCBI NO: 30680787 NR Description: auxin-regulated protein [Arabidopsis thaliana]
  misc_feature (1)..(329): Homolog of NCBI NO: 22330928 NR Description: auxin-regulated protein [Arabidopsis thaliana]
MALSMEFGFSIGSCFKAPNPPVLISASPNKINFTLRRRKKRFLLRVSAVSYKEFAESALEETRKRIVLEPSHLQEKYSSMTGLDGKTELQMLAFKSSKIRLLRSMAIENETMQVFDFAGFMEPEYDTPIFCANFFTSTNVNIVVLDLNPLHQLTDQTDYQDKYYNKIMSIYHKYAETFPWGGKLTGESIKFFSPLVMWTRFSSSKEKHKALFSAFLEYYQAWLEMTIQVREEMEPSHVRANCEAQHKYLTWRAQKDPGHGLLKRLVGEAKAKELLRDFLFNGVDELGTKTFIDYFPEYQTEDGTVSDKRSIIGKSYETRPWDLTGQFIG

SEQ ID NO: 38492 - protein, 325 aa, Arabidopsis thaliana
  peptide (1)..(325): Ceres Seq. ID no. 13489201
  misc_feature (50)..(277): Pfam Name: Ferredoxin-dependent bilin reductase Pfam Description: Ferredoxin-dependent bilin reductase
  misc_feature (47)..(277): Homolog of NCBI NO: 34223769 NR Description: PebB [Fremyella diplosiphon]
  misc_feature (41)..(277): Homolog of NCBI NO: 23127198 NR Description: hypothetical protein [Nostoc punctiforme]
  misc_feature (259)..(325): Homolog of NCBI NO: 19386814 NR Description: B1147A04.9 [Oryza sativa (japonica
  misc_feature (47)..(207): Homolog of NCBI NO: 19386814 NR Description: B1147A04.9 [Oryza sativa (japonica
  misc_feature (215)..(325): Homolog of NCBI NO: 5923680 NR Description: hypothetical protein [Arabidopsis thaliana]
  misc_feature (1)..(70): Homolog of NCBI NO: 5923680 NR Description: hypothetical protein [Arabidopsis thaliana]
  misc_feature (90)..(284): Homolog of NCBI NO: 5923680 NR Description: hypothetical protein [Arabidopsis thaliana]
  misc_feature (1)..(325): Homolog of NCBI NO: 21618130 NR Description: unknown [Arabidopsis thaliana]
  misc_feature (1)..(325): Homolog of NCBI NO: 30680787 NR Description: auxin-regulated protein [Arabidopsis thaliana]
  misc_feature (1)..(325): Homolog of NCBI NO: 22330928 NR Description: auxin-regulated protein [Arabidopsis thaliana]
MEFGFSIGSCFKAPNPPVLISASPNKINFTLRRRKKRFLLRVSAVSYKEFAESALEETRKRIVLEPSHLQEKYSSMTGLDGKTELQMLAFKSSKIRLLRSMAIENETMQVFDFAGFMEPEYDTPIFCANFFTSTNVNIVVLDLNPLHQLTDQTDYQDKYYNKIMSIYHKYAETFPWGGKLTGESIKFFSPLVMWTRFSSSKEKHKALFSAFLEYYQAWLEMTIQVREEMEPSHVRANCEAQHKYLTWRAQKDPGHGLLKRLVGEAKAKELLRDFLFNGVDELGTKTFIDYFPEYQTEDGTVSDKRSIIGKSYETRPWDLTGQFIG

SEQ ID NO: 38493 - protein, 250 aa, Arabidopsis thaliana
  peptide (1)..(250): Ceres Seq. ID no. 13489202
  misc_feature (1)..(202): Pfam Name: Ferredoxin-dependent bilin reductase Pfam Description: Ferredoxin-dependent bilin reductase
  misc_feature (42)..(177): Homolog of NCBI NO: 19386814 NR Description: B1147A04.9 [Oryza sativa (japonica
  misc_feature (1)..(202): Homolog of NCBI NO: 34223769 NR Description: PebB [Fremyella diplosiphon]
  misc_feature (1)..(202): Homolog of NCBI NO: 23127198 NR Description: hypothetical protein [Nostoc punctiforme]
  misc_feature (184)..(250): Homolog of NCBI NO: 19386814 NR Description: B1147A04.9 [Oryza sativa (japonica
  misc_feature (1)..(132): Homolog of NCBI NO: 19386814 NR Description: B1147A04.9 [Oryza sativa (japonica
  misc_feature (140)..(250): Homolog of NCBI NO: 5923680 NR Description: hypothetical protein [Arabidopsis thaliana]
  misc_feature (15)..(209): Homolog of NCBI NO: 5923680 NR Description: hypothetical protein [Arabidopsis thaliana]
  misc_feature (1)..(250): Homolog of NCBI NO: 21618130 NR Description: unknown [Arabidopsis thaliana]
  misc_feature (1)..(250): Homolog of NCBI NO: 30680787 NR Description: auxin-regulated protein [Arabidopsis thaliana]
  misc_feature (1)..(250): Homolog of NCBI NO: 22330928 NR Description: auxin-regulated protein [Arabidopsis thaliana]
MTGLDGKTELQMLAFKSSKIRLLRSMAIENETMQVFDFAGFMEPEYDTPIFCANFFTSTNVNIVVLDLNPLHQLTDQTDYQDKYYNKIMSIYHKYAETFPWGGKLTGESIKFFSPLVMWTRFSSSKEKHKALFSAFLEYYQAWLEMTIQVREEMEPSHVRANCEAQHKYLTWRAQKDPGHGLLKRLVGEAKAKELLRDFLFNGVDELGTKTFIDYFPEYQTEDGTVSDKRSIIGKSYETRPWDLTGQFIG

SEQ ID NO: 38494 - DNA, 1567 bp, Arabidopsis thaliana
  misc_feature (1)..(1567): Ceres Seq. ID no. 13489203
  misc_feature: MA Experiment ID: 20000117 Result: Down-regulated in Transcription
  misc_feature: MA Experiment 20000117 PARAMETER Experiment Name: At_100uM_ABA_Mutants_cDNA_P Parameter: Plant Line Value: Columbia
  misc_feature: MA Experiment 20000117 PARAMETER Experiment Name: At_100uM_ABA_Mutants_cDNA_P Parameter: Timepoint (hr) Value: 6
  misc_feature: MA Experiment 20000117 PARAMETER Experiment Name: At_100uM_ABA_Mutants_cDNA_P Parameter: Tissue Value: Aerial
  misc_feature: MA Experiment 20000117 PARAMETER Experiment Name: At_100uM_ABA_Mutants_cDNA_P Parameter: Treatment Value: 100uM ABA vs. No Treatment
  misc_feature: MA Experiment ID: 20001451 Result: Down-regulated in Transcription
  misc_feature: MA Experiment 20001451 PARAMETER Experiment Name: At_Far-red-induction_P Parameter: Age (day) Value: 7
  misc_feature: MA Experiment 20001451 PARAMETER Experiment Name: At_Far-red-induction_P Parameter: Light Value: Far-red vs. White
  misc_feature: MA Experiment 20001451 PARAMETER Experiment Name: At_Far-red-induction_P Parameter: Organism Value: A. thaliana
  misc_feature: MA Experiment 20001451 PARAMETER Experiment Name: At_Far-red-induction_P Parameter: Plant Line Value: Columbia
  misc_feature: MA Experiment 20001451 PARAMETER Experiment Name: At_Far-red-induction_P Parameter: Timepoint (hr) Value: 24
  misc_feature: MA Experiment 20001451 PARAMETER Experiment Name: At_Far-red-induction_P Parameter: Tissue Value: Whole Plant
  misc_feature: MA Experiment ID: 20001911 Result: Down-regulated in Transcription
  misc_feature: MA Experiment 20001911 PARAMETER Experiment Name: At_Drought_Reproduction_P Parameter: Age (day) Value: 40
  misc_feature: MA Experiment 20001911 PARAMETER Experiment Name: At_Drought_Reproduction_P Parameter: Organism Value: A. thaliana
  misc_feature: MA Experiment 20001911 PARAMETER Experiment Name: At_Drought_Reproduction_P Parameter: Plant Line Value: WS
  misc_feature: MA Experiment 20001911 PARAMETER Experiment Name: At_Drought_Reproduction_P Parameter: Timepoint (day) Value: 10
  misc_feature: MA Experiment 20001911 PARAMETER Experiment Name: At_Drought_Reproduction_P Parameter: Tissue Value: Flowers
  misc_feature: MA Experiment 20001911 PARAMETER Experiment Name: At_Drought_Reproduction_P Parameter: Treatment Value: Drought vs. No Drought
tggcatcgcctgtttttataatttctcgtcttgtacaaaataaaagactctctctctcttaaaatttctctttcgattctctcgcatttcaaaatttcatttccttatatagactcttaaggccggcgatttctgtgagtccatagattttcgctactccgccgtcagtttttctcaactccggaggctgtgtttttgccaccgctttgattcgccggtaagttcacgtatggccagtaatactttgaaagagatgaatagtcttcatgtaactgagaagataagtgactgtaaagctagcttgaccaagccatgtgttggtaaaatgaatggaaaatctgaagatagaccattaccaaactctgcctccttggattccagtgattctaaagttgtagaagcagagaaacccgagccagagatagctattgtggaagttgaatatattgaatctgaaaacttggataatgtagacgatgctgatgcagttctgaagtctgttttagctggactagagtccaaggactggatttcactctgtgatgctcttaataacgttcgccgactttcgatattccacaaggaagaaatgatgcatatgcttgaaaaagtgataccacttgtcgtgaaatcactgaaaaatccaagaagtgcggtgtgtaaaacggcatgcatgacatctgcagatatcttcagtgcatataataatcatataacagatctgttggagcctctgcttactcaactactcctcaagtcttcccaagacaaacggtttgtttgcgaggcagcagagaaagctttaacagcaatgaccaaatatgtttccccaaccttgctgttaccaaagctgcaaccttgtctcaaaaacaggaatcctcggatccgtgccaaagcatcattatgcttttctcgaagtgttcctcgactgggcgttgaagggattaaagaatatggaatcgacaaattagttcaagcagccgcatctcagcttagcgatcagctccctgaatcccgtgaggctgcacggactgtcctactagaacttcagagcgtatatgaaaaagctcatcctctcatcaaccctgagacatcatcaccagaagaacagcaaatcccggaggtagagccaattacttgggaaactttctgcaagtcaaaactgtcggctcttagcgcacaagccgtgcttcgtgtcaccaatgttgtcactgttactgctcgggagggtttggttactacaggttcatcatcttcatcccagttataaacattttctactacaaattttttaaaaaccgtttgctacgagtcatacggtttacatggtattctccggcatggcggcatgatctaccaaattggcaaattatggaccgataaaaagagtgaacgttcgtgtatgaaaaatcttggcttctttctgggttattttctttttgtggattctcatctgtcttcactaccagtacttgtttctttttcttatgtgtatatattctataccaagatttggtaagatagtcatgagtcttttggttatatgcaaaattggtcggattctttg

SEQ ID NO: 38495 - protein, 346 aa, Arabidopsis thaliana
  peptide (1)..(346): Ceres Seq. ID no. 13489204
  misc_feature (1)..(91): Homolog of NCBI NO: 26449430 NR Description: unknown protein [Arabidopsis thaliana]
  misc_feature (127)..(323): Homolog of NCBI NO: 7485173 NR Description: hypothetical protein - Arabidopsis thaliana
  misc_feature (37)..(323): Homolog of NCBI NO: 21593517 NR Description: unknown [Arabidopsis thaliana]
  misc_feature (37)..(323): Homolog of NCBI NO: 18414533 NR Description: expressed protein [Arabidopsis thaliana]
  misc_feature (248)..(340): Homolog of NCBI NO: 15229670 NR Description: expressed protein [Arabidopsis thaliana]
  misc_feature (1)..(234): Homolog of NCBI NO: 15229670 NR Description: expressed protein [Arabidopsis thaliana]
  misc_feature (1)..(245): Homolog of NCBI NO: 9294314 NR Description: gb|AAF24615.1~gene_id:K24M9.2~similar to unknown
  misc_feature (1)..(340): Homolog of NCBI NO: 21537265 NR Description: unknown [Arabidopsis thaliana]
  misc_feature (1)..(340): Homolog of NCBI NO: 18395821 NR Description: expressed protein [Arabidopsis thaliana]
  misc_feature (1)..(346): Homolog of NCBI NO: 15241493 NR Description: expressed protein [Arabidopsis thaliana]
MASNTLKEMNSLHVTEKISDCKASLTKPCVGKMNGKSEDRPLPNSASLDSSDSKVVEAEKPEPEIAIVEVEYIESENLDNVDDADAVLKSVLAGLESKDWISLCDALNNVRRLSIFHKEEMMHMLEKVIPLVVKSLKNPRSAVCKTACMTSADIFSAYNNHITDLLEPLLTQLLLKSSQDKRFVCEAAEKALTAMTKYVSPTLLLPKLQPCLKNRNPRIRAKASLCFSRSVPRLGVEGIKEYGIDKLVQAAASQLSDQLPESREAARTVLLELQSVYEKAHPLINPETSSPEEQQIPEVEPITWETFCKSKLSALSAQAVLRVTNVVTVTAREGLVTTGSSSSSQL

SEQ ID NO: 38496 - protein, 338 aa, Arabidopsis thaliana
  peptide (1)..(338): Ceres Seq. ID no. 13489205
  misc_feature (1)..(83): Homolog of NCBI NO: 26449430 NR Description: unknown protein [Arabidopsis thaliana]
  misc_feature (119)..(315): Homolog of NCBI NO: 7485173 NR Description: hypothetical protein - Arabidopsis thaliana
  misc_feature (29)..(315): Homolog of NCBI NO: 21593517 NR Description: unknown [Arabidopsis thaliana]
  misc_feature (29)..(315): Homolog of NCBI NO: 18414533 NR Description: expressed protein [Arabidopsis thaliana]
  misc_feature (240)..(332): Homolog of NCBI NO: 15229670 NR Description: expressed protein [Arabidopsis thaliana]
  misc_feature (1)..(226): Homolog of NCBI NO: 15229670 NR Description: expressed protein [Arabidopsis thaliana]
  misc_feature (1)..(237): Homolog of NCBI NO: 9294314 NR Description: gb|AAF24615.1~gene_id:K24M9.2~similar to unknown
  misc_feature (1)..(332): Homolog of NCBI NO: 21537265 NR Description: unknown [Arabidopsis thaliana]
  misc_feature (1)..(332): Homolog of NCBI NO: 18395821 NR Description: expressed protein [Arabidopsis thaliana]
  misc_feature (1)..(338): Homolog of NCBI NO: 15241493 NR Description: expressed protein [Arabidopsis thaliana]
MNSLHVTEKISDCKASLTKPCVGKMNGKSEDRPLPNSASLDSSDSKVVEAEKPEPEIAIVEVEYIESENLDNVDDADAVLKSVLAGLESKDWISLCDALNNVRRLSIFHKEEMMHMLEKVIPLVVKSLKNPRSAVCKTACMTSADIFSAYNNHITDLLEPLLTQLLLKSSQDKRFVCEAAEKALTAMTKYVSPTLLLPKLQPCLKNRNPRIRAKASLCFSRSVPRLGVEGIKEYGIDKLVQAAASQLSDQLPESREAARTVLLELQSVYEKAHPLINPETSSPEEQQIPEVEPITWETFCKSKLSALSAQAVLRVTNVVTVTAREGLVTTGSSSSSQL

SEQ ID NO: 38497 - protein, 314 aa, Arabidopsis thaliana
  peptide (1)..(314): Ceres Seq. ID no. 13489206
  misc_feature (1)..(59): Homolog of NCBI NO: 26449430 NR Description: unknown protein [Arabidopsis thaliana]
  misc_feature (95)..(291): Homolog of NCBI NO: 7485173 NR Description: hypothetical protein - Arabidopsis thaliana
  misc_feature (5)..(291): Homolog of NCBI NO: 21593517 NR Description: unknown [Arabidopsis thaliana]
  misc_feature (5)..(291): Homolog of NCBI NO: 18414533 NR Description: expressed protein [Arabidopsis thaliana]
  misc_feature (216)..(308): Homolog of NCBI NO: 15229670 NR Description: expressed protein [Arabidopsis thaliana]
  misc_feature (1)..(202): Homolog of NCBI NO: 15229670 NR Description: expressed protein [Arabidopsis thaliana]
  misc_feature (1)..(213): Homolog of NCBI NO: 9294314 NR Description: gb|AAF24615.1~gene_id:K24M9.2~similar to unknown
  misc_feature (1)..(308): Homolog of NCBI NO: 21537265 NR Description: unknown [Arabidopsis thaliana]
  misc_feature (1)..(308): Homolog of NCBI NO: 18395821 NR Description: expressed protein [Arabidopsis thaliana]
  misc_feature (1)..(314): Homolog of NCBI NO: 15241493 NR Description: expressed protein [Arabidopsis thaliana]
MNGKSEDRPLPNSASLDSSDSKVVEAEKPEPEIAIVEVEYIESENLDNVDDADAVLKSVLAGLESKDWISLCDALNNVRRLSIFHKEEMMHMLEKVIPLVVKSLKNPRSAVCKTACMTSADIFSAYNNHITDLLEPLLTQLLLKSSQDKRFVCEAAEKALTAMTKYVSPTLLLPKLQPCLKNRNPRIRAKASLCFSRSVPRLGVEGIKEYGIDKLVQAAASQLSDQLPESREAARTVLLELQSVYEKAHPLINPETSSPEEQQIPEVEPITWETFCKSKLSALSAQAVLRVTNVVTVTAREGLVTTGSSSSSQL

SEQ ID NO: 38498 - DNA, 892 bp, Arabidopsis thaliana
  misc_feature (1)..(892): Ceres Seq. ID no. 13645732
  misc_feature: MA Experiment ID: 108461 Result: Down-regulated in Transcription
  misc_feature: MA Experiment 108461 PARAMETER Experiment Name: At_Germinating_Seeds_cDNA_P Parameter: Age (day) Value: 1 vs. 0
  misc_feature: MA Experiment 108461 PARAMETER Experiment Name: At_Germinating_Seeds_cDNA_P Parameter: Tissue Value: Germinating Seeds
  misc_feature: MA Experiment ID: 20000179 Result: Down-regulated in Transcription
  misc_feature: MA Experiment 20000179 PARAMETER Experiment Name: At_Germinating_Seeds_P Parameter: Age (hr) Value: 6 vs. 0
  misc_feature: MA Experiment 20000179 PARAMETER Experiment Name: At_Germinating_Seeds_P Parameter: Tissue Value: Germinating Seeds
  misc_feature: MA Experiment ID: 20000184 Result: Down-regulated in Transcription
  misc_feature: MA Experiment 20000184 PARAMETER Experiment Name: At_Shoots__P Parameter: Age (day) Value: 7
  misc_feature: MA Experiment 20000184 PARAMETER Experiment Name: At_Shoots__P Parameter: Tissue Value: Shoots vs. Whole Plant
  misc_feature: MA Experiment ID: 20000234 Result: Down-regulated in Transcription
  misc_feature: MA Experiment 20000234 PARAMETER Experiment Name: At_Siliques_P Parameter: Age (day) Value: 21
  misc_feature: MA Experiment 20000234 PARAMETER Experiment Name: At_Siliques_P Parameter: Organism Value: A. thaliana
  misc_feature: MA Experiment 20000234 PARAMETER Experiment Name: At_Siliques_P Parameter: Plant Line Value: WS
  misc_feature: MA Experiment 20000234 PARAMETER Experiment Name: At_Siliques_P Parameter: Tissue Value: Less Than 5mm Siliques vs. Whole Plant
  misc_feature: MA Experiment ID: 20000235 Result: Down-regulated in Transcription
  misc_feature: MA Experiment 20000235 PARAMETER Experiment Name: At_Siliques_P Parameter: Age (day) Value: 21
  misc_feature: MA Experiment 20000235 PARAMETER Experiment Name: At_Siliques_P Parameter: Organism Value: A. thaliana
  misc_feature: MA Experiment 20000235 PARAMETER Experiment Name: At_Siliques_P Parameter: Plant Line Value: WS
  misc_feature: MA Experiment 20000235 PARAMETER Experiment Name: At_Siliques_P Parameter: Tissue Value: 5-10mm Siliques vs. Whole Plant
  misc_feature: MA Experiment ID: 20000438 Result: Down-regulated in Transcription
  misc_feature: MA Experiment 20000438 PARAMETER Experiment Name: At_Shoots__P Parameter: Age (day) Value: 14
  misc_feature: MA Experiment 20000438 PARAMETER Experiment Name: At_Shoots__P Parameter: Tissue Value: Shoots vs. Whole Plant
  misc_feature: MA Experiment ID: 20001451 Result: Up-regulated in Transcription
  misc_feature: MA Experiment 20001451 PARAMETER Experiment Name: At_Far-red-induction_P Parameter: Age (day) Value: 7
  misc_feature: MA Experiment 20001451 PARAMETER Experiment Name: At_Far-red-induction_P Parameter: Light Value: Far-red vs. White
  misc_feature: MA Experiment 20001451 PARAMETER Experiment Name: At_Far-red-induction_P Parameter: Organism Value: A. thaliana
  misc_feature: MA Experiment 20001451 PARAMETER Experiment Name: At_Far-red-induction_P Parameter: Plant Line Value: Columbia
  misc_feature: MA Experiment 20001451 PARAMETER Experiment Name: At_Far-red-induction_P Parameter: Timepoint (hr) Value: 24
  misc_feature: MA Experiment 20001451 PARAMETER Experiment Name: At_Far-red-induction_P Parameter: Tissue Value: Whole Plant
aggcctcatctcttactctctctctctgatcgtctttttcttttgattctgcttttttctgctaggtttctgagatcttccattcgtctcgaattaagttgctacgatgaagacagcgaaggggaaagataaagttaagaccacaaaggaagccttgaagccagttgatgacagaaaggtgggaaagaggaaggcaccggccgagaagcctactaaacgagagactcgtaaagaaaagaaggctaaaaaggacccaaacaaaccaaaaagagctcctagtgccttctttgtctttctagaagattttagggtcacgttcaagaaagaaaatccaaatgtgaaggccgtctctgctgttgggaaagctggagggcagaaatggaaggcaatgtctcaagctgaaaaagctccatatgaagagaaagctgcaaaaaggaaagctgaatatgagaagcaaatggatgcatacaacaaaaacttggaggaagggagtgatgaatctgaaaagtctagatctgagataaatgatgaagatgaagccagtggggaggaagaactactagagaaggaagcggcaggtgatgatgaagaagaagaagaggaagaagatgacgataatgatgacgacgaggaagaagactaaatcagggatagaaatcagattttgtatctcaagcttaactgcagatccttaagcagaagtaagtattttgtaatttgtgtgtcgacgagaactatagatctaaaatcgtgtgtatttttgtttttcttttcctaagaaagcgaaacagttgttagcatctctcaggatgtctgtttcagctttttgccgcaacaaacaatgtatcaatgtctgcgttagtgatcatccaaaccaaaaacgggagggggg

SEQ ID NO: 38499 - protein, 178 aa, Arabidopsis thaliana
  peptide (1)..(178): Ceres Seq. ID no. 15219022
  misc_feature (53)..(122): Pfam Name: HMG (high mobility group) box Pfam Description: HMG (high mobility group) box
  misc_feature (33)..(150): Homolog of NCBI NO: 18394898 NR Description: expressed protein [Arabidopsis thaliana]
  misc_feature (33)..(164): Homolog of NCBI NO: 25402921 NR Description: protein F2D10.18 [imported] - Arabidopsis
  misc_feature (36)..(150): Homolog of NCBI NO: 25402921 NR Description: protein F2D10.18 [imported] - Arabidopsis
  misc_feature (22)..(169): Homolog of NCBI NO: 7446212 NR Description: high mobility group protein - potato
  misc_feature (24)..(166): Homolog of NCBI NO: 729736 NR Description: HMG1/2-LIKE PROTEIN
  misc_feature (11)..(170): Homolog of NCBI NO: 541968 NR Description: high mobility group protein HMG-1 - garden pea
  misc_feature (36)..(150): Homolog of NCBI NO: 18394900 NR Description: expressed protein [Arabidopsis thaliana]
  misc_feature (24)..(175): Homolog of NCBI NO: 1052956 NR Description: high mobility group protein 2 HMG2 [Ipomoea nil]
  misc_feature (22)..(170): Homolog of NCBI NO: 7446213 NR Description: high mobility group protein HMG-1 - common
  misc_feature (1)..(178): Homolog of NCBI NO: 15231065 NR Description: high mobility group protein 2-related
MKTAKGKDKVKTTKEALKPVDDRKVGKRKAPAEKPTKRETRKEKKAKKDPNKPKRAPSAFFVFLEDFRVTFKKENPNVKAVSAVGKAGGQKWKAMSQAEKAPYEEKAAKRKAEYEKQMDAYNKNLEEGSDESEKSRSEINDEDEASGEEELLEKEAAGDDEEEEEEEDDDNDDDEEED

SEQ ID NO: 38500 - DNA, 1125 bp, Arabidopsis thaliana
  misc_feature (1)..(1125): Ceres Seq. ID no. 13645733
  misc_feature: MA Experiment ID: 20000184 Result: Down-regulated in Transcription
  misc_feature: MA Experiment 20000184 PARAMETER Experiment Name: At_Shoots__P Parameter: Age (day) Value: 7
  misc_feature: MA Experiment 20000184 PARAMETER Experiment Name: At_Shoots__P Parameter: Tissue Value: Shoots vs. Whole Plant
ggaacacggaaatattggcgcccagataatcttcttctgtgaagcattttaagtcgccgactccaatcaacagagcccagttattccatattatcgaattaattagggttcagagagatgggtaggaaaaagaaatctagggcttcgacaaccgaagaagatgagattgagatggataatgctggcccatcctctgagacaagtctttacgaggttcttggagttgaaagaagagccacttcacaggaaataagaaaagcataccataagttggcattgaagcttcaccctgataaaaatcaggatgataaggaagctaaagacaagttccagcagctgcaaaaagtgatatcaattcttggtgatgaagagaaaagggcagtctatgatcaaactggctcaattgatgatgctgatattcctggagatgcgtttgagaatttgcgggatttcttccgggacatgtataagaaggtcaacgaagctgatattgaagagtttgaggcaaactacaggggatctgagtcagagaagaaagacttgcttgagcttttcaacaagtttaagggtaaaatgaacaggctattctgctcaatgctttgctcggaccccaagcttgattcacaccgtttcaaagacatgcttgatgaggccattgcagcaggagaagtgaagtcaagcaaggcatatgagaaatgggcaaataaaatttcagaaacgaaaccgcccaccagtccattgaggaagaggaagaagaagaagtcagcagcaaaggattcagagacagatctttgcttgatgattgcgaaacgacaagaggagaggaaagggaaggtggactcgatgttttcatcacttatctctaggtatggtggtgatgcggaagcagagcccactgaagaagaatttgaagctgcccagagaaggattgaaagcaaaagaaaaccatccaagaagtctagaggaaagtagaggtcttaaagcagagttgtcttctagtagtatttgtgatggaacaagaatgtttattttctttcaaaattgcatcaatttcaaaattgcatcaatttcaaaaatcagtaaatatttcgattattgctttataaattgaggaattatcttctc

SEQ ID NO: 38501 - protein, 284 aa, Arabidopsis thaliana
  peptide (1)..(284): Ceres Seq. ID no. 13645734
  misc_feature (29)..(94): Pfam Name: DnaJ domain Pfam Description: DnaJ domain
  misc_feature (30)..(251): Homolog of NCBI NO: 23956266 NR Description: similar to DnaJ protein SB73
  misc_feature (30)..(251): Homolog of NCBI NO: 25513803 NR Description: J domain of DnaJ-like-protein 1 - rat
  misc_feature (30)..(251): Homolog of NCBI NO: 34868976 NR Description: similar to J domain of DnaJ-like-protein 1 - rat
  misc_feature (30)..(251): Homolog of NCBI NO: 27597059 NR Description: DnaJ homolog, subfamily C, member 9
  misc_feature (28)..(251): Homolog of NCBI NO: 39794528 NR Description: Unknown (protein for MGC:76175) [Silurana
  misc_feature (30)..(276): Homolog of NCBI NO: 32398706 NR Description: DNAJ protein-like, possible [Cryptosporidium
  misc_feature (19)..(167): Homolog of NCBI NO: 12322012 NR Description: DnaJ protein, putative, 3' partial; 1110-1
  misc_feature (19)..(284): Homolog of NCBI NO: 15230424 NR Description: DnaJ protein family [Arabidopsis thaliana]
  misc_feature (1)..(284): Homolog of NCBI NO: 2689720 NR Description: DnaJ homologue [Arabidopsis thaliana]
  misc_feature (1)..(284): Homolog of NCBI NO: 15240212 NR Description: DnaJ protein family [Arabidopsis thaliana]
MGRKKKSRASTTEEDEIEMDNAGPSSETSLYEVLGVERRATSQEIRKAYHKLALKLHPDKNQDDKEAKDKFQQLQKVISILGDEEKRAVYDQTGSIDDADIPGDAFENLRDFFRDMYKKVNEADIEEFEANYRGSESEKKDLLELFNKFKGKMNRLFCSMLCSDPKLDSHRFKDMLDEAIAAGEVKSSKAYEKWANKISETKPPTSPLRKRKKKKSAAKDSETDLCLMIAKRQEERKGKVDSMFSSLISRYGGDAEAEPTEEEFEAAQRRIESKRKPSKKSRGK

SEQ ID NO: 38502 - protein, 266 aa, Arabidopsis thaliana
  peptide (1)..(266): Ceres Seq. ID no. 13645735
  misc_feature (11)..(76): Pfam Name: DnaJ domain Pfam Description: DnaJ domain
  misc_feature (12)..(233): Homolog of NCBI NO: 23956266 NR Description: similar to DnaJ protein SB73
  misc_feature (12)..(233): Homolog of NCBI NO: 25513803 NR Description: J domain of DnaJ-like-protein 1 - rat
  misc_feature (12)..(233): Homolog of NCBI NO: 34868976 NR Description: similar to J domain of DnaJ-like-protein 1 - rat
  misc_feature (12)..(233): Homolog of NCBI NO: 27597059 NR Description: DnaJ homolog, subfamily C, member 9
  misc_feature (10)..(233): Homolog of NCBI NO: 39794528 NR Description: Unknown (protein for MGC:76175) [Silurana
  misc_feature (12)..(258): Homolog of NCBI NO: 32398706 NR Description: DNAJ protein-like, possible [Cryptosporidium
  misc_feature (1)..(149): Homolog of NCBI NO: 12322012 NR Description: DnaJ protein, putative, 3' partial; 1110-1
  misc_feature (1)..(266): Homolog of NCBI NO: 15230424 NR Description: DnaJ protein family [Arabidopsis thaliana]
  misc_feature (1)..(266): Homolog of NCBI NO: 2689720 NR Description: DnaJ homologue [Arabidopsis thaliana]
  misc_feature (1)..(266): Homolog of NCBI NO: 15240212 NR Description: DnaJ protein family [Arabidopsis thaliana]
MDNAGPSSETSLYEVLGVERRATSQEIRKAYHKLALKLHPDKNQDDKEAKDKFQQLQKVISILGDEEKRAVYDQTGSIDDADIPGDAFENLRDFFRDMYKKVNEADIEEFEANYRGSESEKKDLLELFNKFKGKMNRLFCSMLCSDPKLDSHRFKDMLDEAIAAGEVKSSKAYEKWANKISETKPPTSPLRKRKKKKSAAKDSETDLCLMIAKRQEERKGKVDSMFSSLISRYGGDAEAEPTEEEFEAAQRRIESKRKPSKKSRGK

SEQ ID NO: 38503 - protein, 169 aa, Arabidopsis thaliana
  peptide (1)..(169): Ceres Seq. ID no. 13645736
  misc_feature (1)..(136): Homolog of NCBI NO: 23956266 NR Description: similar to DnaJ protein SB73
  misc_feature (1)..(136): Homolog of NCBI NO: 25513803 NR Description: J domain of DnaJ-like-protein 1 - rat
  misc_feature (1)..(136): Homolog of NCBI NO: 34868976 NR Description: similar to J domain of DnaJ-like-protein 1 - rat
  misc_feature (1)..(136): Homolog of NCBI NO: 27597059 NR Description: DnaJ homolog, subfamily C, member 9
  misc_feature (1)..(136): Homolog of NCBI NO: 39794528 NR Description: Unknown (protein for MGC:76175) [Silurana
  misc_feature (1)..(161): Homolog of NCBI NO: 32398706 NR Description: DNAJ protein-like, possible [Cryptosporidium
  misc_feature (1)..(52): Homolog of NCBI NO: 12322012 NR Description: DnaJ protein, putative, 3' partial; 1110-1
  misc_feature (1)..(169): Homolog of NCBI NO: 15230424 NR Description: DnaJ protein family [Arabidopsis thaliana]
  misc_feature (1)..(169): Homolog of NCBI NO: 2689720 NR Description: DnaJ homologue [Arabidopsis thaliana]
  misc_feature (1)..(169): Homolog of NCBI NO: 15240212 NR Description: DnaJ protein family [Arabidopsis thaliana]
MYKKVNEADIEEFEANYRGSESEKKDLLELFNKFKGKMNRLFCSMLCSDPKLDSHRFKDMLDEAIAAGEVKSSKAYEKWANKISETKPPTSPLRKRKKKKSAAKDSETDLCLMIAKRQEERKGKVDSMFSSLISRYGGDAEAEPTEEEFEAAQRRIESKRKPSKKSRGK

SEQ ID NO: 38504 - DNA, 930 bp, Arabidopsis thaliana
  misc_feature (1)..(930): Ceres Seq. ID no. 12423074
  misc_feature: MA Experiment ID: 108594 Result: Up-regulated in Transcription
  misc_feature: MA Experiment 108594 PARAMETER Experiment Name: At_Ler-rhl_Root_cDNA_P Parameter: Plant Line Value: null
  misc_feature: MA Experiment ID: 20000069 Result: Down-regulated in Transcription
  misc_feature: MA Experiment 20000069 PARAMETER Experiment Name: At_100uM_ABA_Mutants_cDNA_P Parameter: Plant Line Value: CS23
  misc_feature: MA Experiment 20000069 PARAMETER Experiment Name: At_100uM_ABA_Mutants_cDNA_P Parameter: Timepoint (hr) Value: 6
  misc_feature: MA Experiment 20000069 PARAMETER Experiment Name: At_100uM_ABA_Mutants_cDNA_P Parameter: Tissue Value: Aerial
  misc_feature: MA Experiment 20000069 PARAMETER Experiment Name: At_100uM_ABA_Mutants_cDNA_P Parameter: Treatment Value: 100uM ABA vs. No Treatment
  misc_feature: MA Experiment ID: 20000070 Result: Down-regulated in Transcription
  misc_feature: MA Experiment 20000070 PARAMETER Experiment Name: At_100uM_ABA_Mutants_cDNA_P Parameter: Plant Line Value: CS24
  misc_feature: MA Experiment 20000070 PARAMETER Experiment Name: At_100uM_ABA_Mutants_cDNA_P Parameter: Timepoint (hr) Value: 6
  misc_feature: MA Experiment 20000070 PARAMETER Experiment Name: At_100uM_ABA_Mutants_cDNA_P Parameter: Tissue Value: Aerial
  misc_feature: MA Experiment 20000070 PARAMETER Experiment Name: At_100uM_ABA_Mutants_cDNA_P Parameter: Treatment Value: 100uM ABA vs. No Treatment
  misc_feature: MA Experiment ID: 20000185 Result: Up-regulated in Transcription
  misc_feature: MA Experiment 20000185 PARAMETER Experiment Name: At_Roots__P Parameter: Age (day) Value: 7 vs. 21
  misc_feature: MA Experiment 20000185 PARAMETER Experiment Name: At_Roots__P Parameter: Organism Value: A. thaliana
  misc_feature: MA Experiment 20000185 PARAMETER Experiment Name: At_Roots__P Parameter: Tissue Value: Roots vs. Whole Plant
  misc_feature: MA Experiment ID: 20000439 Result: Up-regulated in Transcription
  misc_feature: MA Experiment 20000439 PARAMETER Experiment Name: At_Roots__P Parameter: Age (day) Value: 14 vs. 21
  misc_feature: MA Experiment 20000439 PARAMETER Experiment Name: At_Roots__P Parameter: Organism Value: A. thaliana
  misc_feature: MA Experiment 20000439 PARAMETER Experiment Name: At_Roots__P Parameter: Tissue Value: Roots vs. Whole Plant
accaaaaatgccttttgcccctctctctctatatccaacccatgtctcctctttatctctctaactttccccttagagagattcctctttctctcaaactagggtttcctctctgaaaacaacaaaaatatcccaataattgcaaaatctacttgaagatttttcattctcctttcttataattaatgcccaagagagaaacaaagaagatcaaaccttctcaagaagttatcaaggaaggaccttttcttgttgcgatccatttaaaggggatatatatgtcgaactacacaaactcaccgtgtgcagcatgcaaattcctccggcgtaaatgcacgtcagactgcgtattcgcaccctattttccgccggaggaacctacaaagtttgcgaacgtccaccggatattcggggcaagcaatgtgagcaagatcctccacgaagtggctccccatcagcgggaagatgcggtcaactcgctggcttacgaggcggaagcacgacttaaagatccagtgtatggctgcgttggagcgatctcggtgctccaaagacaggtcttgaggttgcaaagggaactcgaggagacaaatgctgatctcatgaggtacgctggttgtctcggtggtgaaacgacgtcggcttatggtggtcggaggggttgactggtcaacgagagttgattagtcatcatcactctttgagaaaattagcggcggagaagtataaagagagagaggatggttgatgtgatggtaagtgttattagtcgtatgtatatatgtgtaaatatggggacatgcatgcatgtatatttatgtttattttcatgtatatacttatgcgtatgtgtaatttaacttgtaatttttttttcatgggagaggtcaaggaatatttttgatgatgttgaataactagatcttgctc

SEQ ID NO: 38505 - protein, 159 aa, Arabidopsis thaliana
  peptide (1)..(159): Ceres Seq. ID no. 12423075
  misc_feature (37)..(140): Homolog of NCBI NO: 18402268 NR Description: expressed protein
  misc_feature (36)..(144): Homolog of NCBI NO: 15240110 NR Description: putative protein; protein id: At5g66870.1
  misc_feature (36)..(159): Homolog of NCBI NO: 34907508 NR Description: B1099D03.24 [Oryza sativa (japonica
  misc_feature (33)..(142): Homolog of NCBI NO: 15218746 NR Description: unknown protein
  misc_feature (38)..(143): Homolog of NCBI NO: 34896184 NR Description: contains ESTs C98868(E3203),C98869(E3203)~similar
  misc_feature (33)..(155): Homolog of NCBI NO: 15242624 NR Description: putative protein
  misc_feature (32)..(159): Homolog of NCBI NO: 9294470 NR Description: gb|AAB60912.1~gene_id:MGF10.6~similar to unknown
  misc_feature (1)..(159): Homolog of NCBI NO: 21618134 NR Description: unknown [Arabidopsis thaliana]
  misc_feature (1)..(159): Homolog of NCBI NO: 29427827 NR Description: LOB domain protein 25
  misc_feature (1)..(159): Homolog of NCBI NO: 18405472 NR Description: expressed protein
MPKRETKKIKPSQEVIKEGPFLVAIHLKGIYMSNYTNSPCAACKFLRRKCTSDCVFAPYFPPEEPTKFANVHRIFGASNVSKILHEVAPHQREDAVNSLAYEAEARLKDPVYGCVGAISVLQRQVLRLQRELEETNADLMRYAGCLGGETTSAYGGRRG

SEQ ID NO: 38506 - protein, 128 aa, Arabidopsis thaliana
  peptide (1)..(128): Ceres Seq. ID no. 12423076
  misc_feature (6)..(109): Homolog of NCBI NO: 18402268 NR Description: expressed protein
  misc_feature (5)..(113): Homolog of NCBI NO: 15240110 NR Description: putative protein; protein id: At5g66870.1
  misc_feature (5)..(128): Homolog of NCBI NO: 34907508 NR Description: B1099D03.24 [Oryza sativa (japonica
  misc_feature (2)..(111): Homolog of NCBI NO: 15218746 NR Description: unknown protein
  misc_feature (7)..(112): Homolog of NCBI NO: 34896184 NR Description: contains ESTs C98868(E3203),C98869(E3203)~similar
  misc_feature (2)..(124): Homolog of NCBI NO: 15242624 NR Description: putative protein
  misc_feature (1)..(128): Homolog of NCBI NO: 9294470 NR Description: gb|AAB60912.1~gene_id:MGF10.6~similar to unknown
  misc_feature (1)..(128): Homolog of NCBI NO: 21618134 NR Description: unknown [Arabidopsis thaliana]
  misc_feature (1)..(128): Homolog of NCBI NO: 29427827 NR Description: LOB domain protein 25
  misc_feature (1)..(128): Homolog of NCBI NO: 18405472 NR Description: expressed protein
MSNYTNSPCAACKFLRRKCTSDCVFAPYFPPEEPTKFANVHRIFGASNVSKILHEVAPHQREDAVNSLAYEAEARLKDPVYGCVGAISVLQRQVLRLQRELEETNADLMRYAGCLGGETTSAYGGRRG

SEQ ID NO: 38507 - DNA, 976 bp, Arabidopsis thaliana
  misc_feature (1)..(976): Ceres Seq. ID no. 13488133
  misc_feature: MA Experiment ID: 20000111 Result: Up-regulated in Transcription
  misc_feature: MA Experiment 20000111 PARAMETER Experiment Name: At_42deg_Heat_cDNA_P Parameter: Temperature (deg C) Value: 42 vs. 22
  misc_feature: MA Experiment 20000111 PARAMETER Experiment Name: At_42deg_Heat_cDNA_P Parameter: Timepoint (hr) Value: 6
  misc_feature: MA Experiment 20000111 PARAMETER Experiment Name: At_42deg_Heat_cDNA_P Parameter: Tissue Value: Aerial
  misc_feature: MA Experiment ID: 20000113 Result: Up-regulated in Transcription
  misc_feature: MA Experiment 20000113 PARAMETER Experiment Name: At_42deg_Heat_cDNA_P Parameter: Temperature (deg C) Value: 42 vs. 22
  misc_feature: MA Experiment 20000113 PARAMETER Experiment Name: At_42deg_Heat_cDNA_P Parameter: Timepoint (hr) Value: 8
  misc_feature: MA Experiment 20000113 PARAMETER Experiment Name: At_42deg_Heat_cDNA_P Parameter: Tissue Value: Aerial
  misc_feature: MA Experiment ID: 20001911 Result: Up-regulated in Transcription
  misc_feature: MA Experiment 20001911 PARAMETER Experiment Name: At_Drought_Reproduction_P Parameter: Age (day) Value: 40
  misc_feature: MA Experiment 20001911 PARAMETER Experiment Name: At_Drought_Reproduction_P Parameter: Organism Value: A. thaliana
  misc_feature: MA Experiment 20001911 PARAMETER Experiment Name: At_Drought_Reproduction_P Parameter: Plant Line Value: WS
  misc_feature: MA Experiment 20001911 PARAMETER Experiment Name: At_Drought_Reproduction_P Parameter: Timepoint (day) Value: 10
  misc_feature: MA Experiment 20001911 PARAMETER Experiment Name: At_Drought_Reproduction_P Parameter: Tissue Value: Flowers
  misc_feature: MA Experiment 20001911 PARAMETER Experiment Name: At_Drought_Reproduction_P Parameter: Treatment Value: Drought vs. No Drought
aacaactccacgacgagaggaaaaaaaaaaaactcagagagacaaatctaaatggcgatgattacgcgcaacaccgccacgcgcctccctctcctcctccaatctcaacgcgccgtcgccgctgcctcggtctctcacctccacacatcccttcccgctctctctccctccacatcaccgacttcctacaccagacctggtcctccttcgacctcccctcctcctcctggtctctctaaagcggccgaatttgtgatctccaaggtcgatgatctcatgaactgggctcgtaccggatcgatctggcctatgacctttggtctcgcttgctgcgccgtcgaaatgatgcataccggtgctgctcgctacgatctcgatcgattcggtatcatcttcaggcctagtcctcgccagtctgattgtatgattgtcgccggtactcttaccaataagatggctccggctcttcgcaaggtttatgaccagatgcctgagccaaggtgggtgatttcaatgggaagttgtgccaatggaggtggatactatcactactcctactcggtggttcgaggatgtgacagaattgtcccagtcgacatatacgtcccggggtgcccaccaaccgctgaggctttgctctatggactactccagcttcagaagaaaatcaacaggcgcaaggatttcttgcattggtggaacaagtgagcttcgaacccgtcctccaatcgtgaaagggacttttttcagacagttttaccaaagtttggggataataaatcgtggacgtttcattgcatatttctttgtggtggagatgccatgtaaaggagtgtgtttctaagtttgttgtggaaacttaataaacttaagatgtttgttgtctgagttcttttatgggctcttttattatatatctctctctaccagttttcagctacatgctgactattgctaaatacctacatatatttat

SEQ ID NO: 38508 - protein, 218 aa, Arabidopsis thaliana; identical to SEQ ID NO: 29128
  peptide (1)..(218): Ceres Seq. ID no. 13488134
  misc_feature (96)..(203): Pfam Name: NADH ubiquinone oxidoreductase, 20 Kd subunit Pfam Description: NADH ubiquinone oxidoreductase, 20 Kd subunit
  misc_feature (20)..(218): Homolog of NCBI NO: 34862315 NR Description: similar to NADH dehydrogenase (ubiquinone) Fe-S
  misc_feature (58)..(218): Homolog of NCBI NO: 34328788 NR Description: NADH:ubiquinone oxidoreductase subunit 10;
  misc_feature (9)..(218): Homolog of NCBI NO: 1171865 NR Description: NADH-ubiquinone oxidoreductase 20 kDa subunit,
  misc_feature (33)..(218): Homolog of NCBI NO: 34910678 NR Description: putative NADH dehydrogenase (ubiquinone) chain
  misc_feature (1)..(218): Homolog of NCBI NO: 2499328 NR Description: NADH-ubiquinone oxidoreductase 20 kDa subunit,
  misc_feature (30)..(218): Homolog of NCBI NO: 9652190 NR Description: NADH-ubiquinone oxidoreductase subunit PSST
  misc_feature (1)..(218): Homolog of NCBI NO: 9652180 NR Description: NADH-ubiquinone oxidoreductase subunit PSST
  misc_feature (1)..(218): Homolog of NCBI NO: 11277624 NR Description: NADH2 dehydrogenase (ubiquinone) (EC 1.6.5.3)
  misc_feature (1)..(218): Homolog of NCBI NO: 1171866 NR Description: NADH-ubiquinone oxidoreductase 20 kDa subunit,
  misc_feature (1)..(218): Homolog of NCBI NO: 15239782 NR Description: NADH dehydrogenase (ubiquinone) [Arabidopsis

SEQ ID NO: 38509 - protein, 216 aa, Arabidopsis thaliana; identical to SEQ ID NO: 29129
  peptide (1)..(216): Ceres Seq. ID no. 13488135
  misc_feature (94)..(201): Pfam Name: NADH ubiquinone oxidoreductase, 20 Kd subunit Pfam Description: NADH ubiquinone oxidoreductase, 20 Kd subunit
  misc_feature (18)..(216): Homolog of NCBI NO: 34862315 NR Description: similar to NADH dehydrogenase (ubiquinone) Fe-S
  misc_feature (56)..(216): Homolog of NCBI NO: 34328788 NR Description: NADH:ubiquinone oxidoreductase subunit 10;
  misc_feature (7)..(216): Homolog of NCBI NO: 1171865 NR Description: NADH-ubiquinone oxidoreductase 20 kDa subunit,
  misc_feature (31)..(216): Homolog of NCBI NO: 34910678 NR Description: putative NADH dehydrogenase (ubiquinone) chain
  misc_feature (1)..(216): Homolog of NCBI NO: 2499328 NR Description: NADH-ubiquinone oxidoreductase 20 kDa subunit,
  misc_feature (28)..(216): Homolog of NCBI NO: 9652190 NR Description: NADH-ubiquinone oxidoreductase subunit PSST
  misc_feature (1)..(216): Homolog of NCBI NO: 9652180 NR Description: NADH-ubiquinone oxidoreductase subunit PSST
  misc_feature (1)..(216): Homolog of NCBI NO: 11277624 NR Description: NADH2 dehydrogenase (ubiquinone) (EC 1.6.5.3)
  misc_feature (1)..(216): Homolog of NCBI NO: 1171866 NR Description: NADH-ubiquinone oxidoreductase 20 kDa subunit,
  misc_feature (1)..(216): Homolog of NCBI NO: 15239782 NR Description: NADH dehydrogenase (ubiquinone) [Arabidopsis

SEQ ID NO: 38510 - protein, 143 aa, Arabidopsis thaliana; identical to SEQ ID NO: 29130
  peptide (1)..(143): Ceres Seq. ID no. 13488136
  misc_feature (21)..(128): Pfam Name: NADH ubiquinone oxidoreductase, 20 Kd subunit Pfam Description: NADH ubiquinone oxidoreductase, 20 Kd subunit
  misc_feature (1)..(143): Homolog of NCBI NO: 34862315 NR Description: similar to NADH dehydrogenase (ubiquinone) Fe-S
  misc_feature (1)..(143): Homolog of NCBI NO: 34328788 NR Description: NADH:ubiquinone oxidoreductase subunit 10;
  misc_feature (1)..(143): Homolog of NCBI NO: 1171865 NR Description: NADH-ubiquinone oxidoreductase 20 kDa subunit,
  misc_feature (1)..(143): Homolog of NCBI NO: 34910678 NR Description: putative NADH dehydrogenase (ubiquinone) chain
  misc_feature (1)..(143): Homolog of NCBI NO: 2499328 NR Description: NADH-ubiquinone oxidoreductase 20 kDa subunit,
  misc_feature (1)..(143): Homolog of NCBI NO: 9652190 NR Description: NADH-ubiquinone oxidoreductase subunit PSST
  misc_feature (1)..(143): Homolog of NCBI NO: 9652180 NR Description: NADH-ubiquinone oxidoreductase subunit PSST
  misc_feature (1)..(143): Homolog of NCBI NO: 11277624 NR Description: NADH2 dehydrogenase (ubiquinone) (EC 1.6.5.3)
  misc_feature (1)..(143): Homolog of NCBI NO: 1171866 NR Description: NADH-ubiquinone oxidoreductase 20 kDa subunit,
  misc_feature (1)..(143): Homolog of NCBI NO: 15239782 NR Description: NADH dehydrogenase (ubiquinone) [Arabidopsis

SEQ ID NO: 38511 - DNA, 677 bp, Arabidopsis thaliana; identical to SEQ ID NO: 23436
  misc_feature (1)..(677): Ceres Seq. ID no. 12561632
  misc_feature: MA Experiment ID: 20000166 Result: Down-regulated in Transcription
  misc_feature: MA Experiment 20000166 PARAMETER Experiment Name: At_100uM_ABA_P Parameter: Age (day) Value: 14
  misc_feature: MA Experiment 20000166 PARAMETER Experiment Name: At_100uM_ABA_P Parameter: Organism Value: A. thaliana
  misc_feature: MA Experiment 20000166 PARAMETER Experiment Name: At_100uM_ABA_P Parameter: Plant Line Value: WS
  misc_feature: MA Experiment 20000166 PARAMETER Experiment Name: At_100uM_ABA_P Parameter: Timepoint (hr) Value: 1
  misc_feature: MA Experiment 20000166 PARAMETER Experiment Name: At_100uM_ABA_P Parameter: Tissue Value: Aerial
  misc_feature: MA Experiment 20000166 PARAMETER Experiment Name: At_100uM_ABA_P Parameter: Treatment Value: 100uM ABA vs. No Treatment
  misc_feature: MA Experiment ID: 20000179 Result: Up-regulated in Transcription
  misc_feature: MA Experiment 20000179 PARAMETER Experiment Name: At_Germinating_Seeds_P Parameter: Age (hr) Value: 6 vs. 0
  misc_feature: MA Experiment 20000179 PARAMETER Experiment Name: At_Germinating_Seeds_P Parameter: Tissue Value: Germinating Seeds
  misc_feature: MA Experiment ID: 20000180 Result: Up-regulated in Transcription
  misc_feature: MA Experiment 20000180 PARAMETER Experiment Name: At_Germinating_Seeds_P Parameter: Age (hr) Value: 24 vs. 0
  misc_feature: MA Experiment 20000180 PARAMETER Experiment Name: At_Germinating_Seeds_P Parameter: Tissue Value: Germinating Seeds
  misc_feature: MA Experiment ID: 20000182 Result: Down-regulated in Transcription
  misc_feature: MA Experiment 20000182 PARAMETER Experiment Name: At_2mM_SA_P Parameter: Age (day) Value: 14
  misc_feature: MA Experiment 20000182 PARAMETER Experiment Name: At_2mM_SA_P Parameter: Organism Value: A. thaliana
  misc_feature: MA Experiment 20000182 PARAMETER Experiment Name: At_2mM_SA_P Parameter: Plant Line Value: WS
  misc_feature: MA Experiment 20000182 PARAMETER Experiment Name: At_2mM_SA_P Parameter: Timepoint (hr) Value: 6
  misc_feature: MA Experiment 20000182 PARAMETER Experiment Name: At_2mM_SA_P Parameter: Tissue Value: Aerial
  misc_feature: MA Experiment 20000182 PARAMETER Experiment Name: At_2mM_SA_P Parameter: Treatment Value: 2mM SA vs. No Treatment
  misc_feature: MA Experiment ID: 20000185 Result: Down-regulated in Transcription
  misc_feature: MA Experiment 20000185 PARAMETER Experiment Name: At_Roots__P Parameter: Age (day) Value: 7 vs. 21
  misc_feature: MA Experiment 20000185 PARAMETER Experiment Name: At_Roots__P Parameter: Organism Value: A. thaliana
  misc_feature: MA Experiment 20000185 PARAMETER Experiment Name: At_Roots__P Parameter: Tissue Value: Roots vs. Whole Plant
  misc_feature: MA Experiment ID: 20000227 Result: Up-regulated in Transcription
  misc_feature: MA Experiment 20000227 PARAMETER Experiment Name: At_Root-Tips-vs-Tops_P Parameter: Tissue Value: Root Tips vs. Root Tops
  misc_feature: MA Experiment ID: 20000234 Result: Down-regulated in Transcription
  misc_feature: MA Experiment 20000234 PARAMETER Experiment Name: At_Siliques_P Parameter: Age (day) Value: 21
  misc_feature: MA Experiment 20000234 PARAMETER Experiment Name: At_Siliques_P Parameter: Organism Value: A. thaliana
  misc_feature: MA Experiment 20000234 PARAMETER Experiment Name: At_Siliques_P Parameter: Plant Line Value: WS
  misc_feature: MA Experiment 20000234 PARAMETER Experiment Name: At_Siliques_P Parameter: Tissue Value: Less Than 5mm Siliques vs. Whole Plant
  misc_feature: MA Experiment ID: 20000264 Result: Down-regulated in Transcription
  misc_feature: MA Experiment 20000264 PARAMETER Experiment Name: At_Open_Flower_P Parameter: Age (day) Value: 21
  misc_feature: MA Experiment 20000264 PARAMETER Experiment Name: At_Open_Flower_P Parameter: Plant Line Value: WS
  misc_feature: MA Experiment 20000264 PARAMETER Experiment Name: At_Open_Flower_P Parameter: Tissue Value: Open Flower vs. Whole Plant
  misc_feature: MA Experiment ID: 20000265 Result: Down-regulated in Transcription
  misc_feature: MA Experiment 20000265 PARAMETER Experiment Name: At_Open_Flower_P Parameter: Age (day) Value: 21
  misc_feature: MA Experiment 20000265 PARAMETER Experiment Name: At_Open_Flower_P Parameter: Plant Line Value: WS
  misc_feature: MA Experiment 20000265 PARAMETER Experiment Name: At_Open_Flower_P Parameter: Tissue Value: Closed Flower vs. Whole Plant
  misc_feature: MA Experiment ID: 20000267 Result: Down-regulated in Transcription
  misc_feature: MA Experiment 20000267 PARAMETER Experiment Name: At_Drought_P Parameter: Age (day) Value: 7
  misc_feature: MA Experiment 20000267 PARAMETER Experiment Name: At_Drought_P Parameter: Organism Value: A. thaliana
  misc_feature: MA Experiment 20000267 PARAMETER Experiment Name: At_Drought_P Parameter: Plant Line Value: WS
  misc_feature: MA Experiment 20000267 PARAMETER Experiment Name: At_Drought_P Parameter: Timepoint (hr) Value: 6
  misc_feature: MA Experiment 20000267 PARAMETER Experiment Name: At_Drought_P Parameter: Tissue Value: Whole Plant
  misc_feature: MA Experiment 20000267 PARAMETER Experiment Name: At_Drought_P Parameter: Treatment Value: Drought vs. No Drought
  misc_feature: MA Experiment ID: 20000268 Result: Down-regulated in Transcription
  misc_feature: MA Experiment 20000268 PARAMETER Experiment Name: At_100mM_NaCl__P Parameter: Age (day) Value: 14
  misc_feature: MA Experiment 20000268 PARAMETER Experiment Name: At_100mM_NaCl__P Parameter: Organism Value: A. thaliana
  misc_feature: MA Experiment 20000268 PARAMETER Experiment Name: At_100mM_NaCl__P Parameter: Plant Line Value: WS
  misc_feature: MA Experiment 20000268 PARAMETER Experiment Name: At_100mM_NaCl__P Parameter: Timepoint (hr) Value: 6
  misc_feature: MA Experiment 20000268 PARAMETER Experiment Name: At_100mM_NaCl__P Parameter: Tissue Value: Whole Plant
  misc_feature: MA Experiment 20000268 PARAMETER Experiment Name: At_100mM_NaCl__P Parameter: Treatment Value: 100mM NaCl vs. No Treatment
  misc_feature: MA Experiment ID: 20000286 Result: Down-regulated in Transcription
  misc_feature: MA Experiment 20000286 PARAMETER Experiment Name: At_Open_Flower_P Parameter: Age (day) Value: 21
  misc_feature: MA Experiment 20000286 PARAMETER Experiment Name: At_Open_Flower_P Parameter: Plant Line Value: WS
  misc_feature: MA Experiment 20000286 PARAMETER Experiment Name: At_Open_Flower_P Parameter: Tissue Value: Half Open vs. Whole Plant
  misc_feature: MA Experiment ID: 20000308 Result: Down-regulated in Transcription
  misc_feature: MA Experiment 20000308 PARAMETER Experiment Name: At_100mM_NaCl__P Parameter: Age (day) Value: 17
  misc_feature: MA Experiment 20000308 PARAMETER Experiment Name: At_100mM_NaCl__P Parameter: Organism Value: A. thaliana
  misc_feature: MA Experiment 20000308 PARAMETER Experiment Name: At_100mM_NaCl__P Parameter: Plant Line Value: WS
  misc_feature: MA Experiment 20000308 PARAMETER Experiment Name: At_100mM_NaCl__P Parameter: Timepoint (hr) Value: 72
  misc_feature: MA Experiment 20000308 PARAMETER Experiment Name: At_100mM_NaCl__P Parameter: Tissue Value: Whole Plant
  misc_feature: MA Experiment 20000308 PARAMETER Experiment Name: At_100mM_NaCl__P Parameter: Treatment Value: 100mM NaCl vs. No Treatment
  misc_feature: MA Experiment ID: 20000436 Result: Down-regulated in Transcription
  misc_feature: MA Experiment 20000436 PARAMETER Experiment Name: At_Drought_P Parameter: Age (day) Value: 7
  misc_feature: MA Experiment 20000436 PARAMETER Experiment Name: At_Drought_P Parameter: Organism Value: A. thaliana
  misc_feature: MA Experiment 20000436 PARAMETER Experiment Name: At_Drought_P Parameter: Plant Line Value: WS
  misc_feature: MA Experiment 20000436 PARAMETER Experiment Name: At_Drought_P Parameter: Timepoint (hr) Value: 12
  misc_feature: MA Experiment 20000436 PARAMETER Experiment Name: At_Drought_P Parameter: Tissue Value: Whole Plant
  misc_feature: MA Experiment 20000436 PARAMETER Experiment Name: At_Drought_P Parameter: Treatment Value: Drought vs. No Drought
  misc_feature: MA Experiment ID: 20000437 Result: Down-regulated in Transcription
  misc_feature: MA Experiment 20000437 PARAMETER Experiment Name: At_Drought_P Parameter: Age (day) Value: 8
  misc_feature: MA Experiment 20000437 PARAMETER Experiment Name: At_Drought_P Parameter: Organism Value: A. thaliana
  misc_feature: MA Experiment 20000437 PARAMETER Experiment Name: At_Drought_P Parameter: Plant Line Value: WS
  misc_feature: MA Experiment 20000437 PARAMETER Experiment Name: At_Drought_P Parameter: Timepoint (hr) Value: 24
  misc_feature: MA Experiment 20000437 PARAMETER Experiment Name: At_Drought_P Parameter: Tissue Value: Whole Plant
  misc_feature: MA Experiment 20000437 PARAMETER Experiment Name: At_Drought_P Parameter: Treatment Value: Drought vs. No Drought
  misc_feature: MA Experiment ID: 20000439 Result: Down-regulated in Transcription
  misc_feature: MA Experiment 20000439 PARAMETER Experiment Name: At_Roots__P Parameter: Age (day) Value: 14 vs. 21
  misc_feature: MA Experiment 20000439 PARAMETER Experiment Name: At_Roots__P Parameter: Organism Value: A. thaliana
  misc_feature: MA Experiment 20000439 PARAMETER Experiment Name: At_Roots__P Parameter: Tissue Value: Roots vs. Whole Plant
  misc_feature: MA Experiment ID: 20000441 Result: Up-regulated in Transcription
  misc_feature: MA Experiment 20000441 PARAMETER Experiment Name: At_1uM_BR-BRZ__P Parameter: Tissue Value: Shoot Apices
  misc_feature: MA Experiment 20000441 PARAMETER Experiment Name: At_1uM_BR-BRZ__P Parameter: Treatment Value: 1uM BR vs. No Treatment
  misc_feature: MA Experiment ID: 20000443 Result: Up-regulated in Transcription
  misc_feature: MA Experiment 20000443 PARAMETER Experiment Name: At_1uM_BR-BRZ__P Parameter: Tissue Value: Shoot Apices
  misc_feature: MA Experiment 20000443 PARAMETER Experiment Name: At_1uM_BR-BRZ__P Parameter: Treatment Value: 1uM BRZ vs. No Treatment
  misc_feature: MA Experiment ID: 20000460 Result: Down-regulated in Transcription
  misc_feature: MA Experiment 20000460 PARAMETER Experiment Name: At_10percent_PEG_P Parameter: Age (day) Value: 12
  misc_feature: MA Experiment 20000460 PARAMETER Experiment Name: At_10percent_PEG_P Parameter: Organism Value: A. thaliana
  misc_feature: MA Experiment 20000460 PARAMETER Experiment Name: At_10percent_PEG_P Parameter: Plant Line Value: WS
  misc_feature: MA Experiment 20000460 PARAMETER Experiment Name: At_10percent_PEG_P Parameter: Timepoint (day) Value: 12
  misc_feature: MA Experiment 20000460 PARAMETER Experiment Name: At_10percent_PEG_P Parameter: Tissue Value: Whole Plant
  misc_feature: MA Experiment 20000460 PARAMETER Experiment Name: At_10percent_PEG_P Parameter: Treatment Value: 10percent PEG vs. No Treatment
  misc_feature: MA Experiment ID: 20000794 Result: Down-regulated in Transcription
  misc_feature: MA Experiment 20000794 PARAMETER Experiment Name: At_Petals_P Parameter: Age (day) Value: 23-25 days
  misc_feature: MA Experiment 20000794 PARAMETER Experiment Name: At_Petals_P Parameter: Plant Line Value: WS
  misc_feature: MA Experiment 20000794 PARAMETER Experiment Name: At_Petals_P Parameter: Tissue Value: Petals vs. Whole plant
  misc_feature: MA Experiment ID: 20001248 Result: Up-regulated in Transcription
  misc_feature: MA Experiment 20001248 PARAMETER Experiment Name: At_Far-red-induction_P Parameter: Age (day) Value: 7
  misc_feature: MA Experiment 20001248 PARAMETER Experiment Name: At_Far-red-induction_P Parameter: Light Value: Far-red vs. White
  misc_feature: MA Experiment 20001248 PARAMETER Experiment Name: At_Far-red-induction_P Parameter: Organism Value: A. thaliana
  misc_feature: MA Experiment 20001248 PARAMETER Experiment Name: At_Far-red-induction_P Parameter: Plant Line Value: Columbia
  misc_feature: MA Experiment 20001248 PARAMETER Experiment Name: At_Far-red-induction_P Parameter: Timepoint (hr) Value: 4
  misc_feature: MA Experiment 20001248 PARAMETER Experiment Name: At_Far-red-induction_P Parameter: Tissue Value: Whole Plant
  misc_feature: MA Experiment ID: 20001450 Result: Up-regulated in Transcription
  misc_feature: MA Experiment 20001450 PARAMETER Experiment Name: At_Far-red-induction_P Parameter: Age (day) Value: 7
  misc_feature: MA Experiment 20001450 PARAMETER Experiment Name: At_Far-red-induction_P Parameter: Light Value: Far-red vs. White
  misc_feature: MA Experiment 20001450 PARAMETER Experiment Name: At_Far-red-induction_P Parameter: Organism Value: A. thaliana
  misc_feature: MA Experiment 20001450 PARAMETER Experiment Name: At_Far-red-induction_P Parameter: Plant Line Value: Columbia
  misc_feature: MA Experiment 20001450 PARAMETER Experiment Name: At_Far-red-induction_P Parameter: Timepoint (hr) Value: 8
  misc_feature: MA Experiment 20001450 PARAMETER Experiment Name: At_Far-red-induction_P Parameter: Tissue Value: Whole Plant
  misc_feature: MA Experiment ID: 20001554 Result: Down-regulated in Transcription
  misc_feature: MA Experiment 20001554 PARAMETER Experiment Name: At_Drought_Soil_Dry_P Parameter: Age (day) Value: 21
  misc_feature: MA Experiment 20001554 PARAMETER Experiment Name: At_Drought_Soil_Dry_P Parameter: Organism Value: A. thaliana
  misc_feature: MA Experiment 20001554 PARAMETER Experiment Name: At_Drought_Soil_Dry_P Parameter: Plant Line Value: WS
  misc_feature: MA Experiment 20001554 PARAMETER Experiment Name: At_Drought_Soil_Dry_P Parameter: Post Timepoint (hr) Value: None
  misc_feature: MA Experiment 20001554 PARAMETER Experiment Name: At_Drought_Soil_Dry_P Parameter: Post-Treatment Value: None
  misc_feature: MA Experiment 20001554 PARAMETER Experiment Name: At_Drought_Soil_Dry_P Parameter: Timepoint (day) Value: 7
  misc_feature: MA Experiment 20001554 PARAMETER Experiment Name: At_Drought_Soil_Dry_P Parameter: Treatment Value: Drought vs. No Drought
  misc_feature: MA Experiment ID: 20001555 Result: Down-regulated in Transcription
  misc_feature: MA Experiment 20001555 PARAMETER Experiment Name: At_Drought_Soil_Dry_P Parameter: Age (day) Value: 24
  misc_feature: MA Experiment 20001555 PARAMETER Experiment Name: At_Drought_Soil_Dry_P Parameter: Organism Value: A. thaliana
  misc_feature: MA Experiment 20001555 PARAMETER Experiment Name: At_Drought_Soil_Dry_P Parameter: Plant Line Value: WS
  misc_feature: MA Experiment 20001555 PARAMETER Experiment Name: At_Drought_Soil_Dry_P Parameter: Post Timepoint (hr) Value: None
  misc_feature: MA Experiment 20001555 PARAMETER Experiment Name: At_Drought_Soil_Dry_P Parameter: Post-Treatment Value: None
  misc_feature: MA Experiment 20001555 PARAMETER Experiment Name: At_Drought_Soil_Dry_P Parameter: Timepoint (day) Value: 10
  misc_feature: MA Experiment 20001555 PARAMETER Experiment Name: At_Drought_Soil_Dry_P Parameter: Treatment Value: Drought vs. No Drought
  misc_feature: MA Experiment ID: 20001556 Result: Down-regulated in Transcription
  misc_feature: MA Experiment 20001556 PARAMETER Experiment Name: At_Drought_Soil_Dry_P Parameter: Age (day) Value: 26
  misc_feature: MA Experiment 20001556 PARAMETER Experiment Name: At_Drought_Soil_Dry_P Parameter: Organism Value: A. thaliana
  misc_feature: MA Experiment 20001556 PARAMETER Experiment Name: At_Drought_Soil_Dry_P Parameter: Plant Line Value: WS
  misc_feature: MA Experiment 20001556 PARAMETER Experiment Name: At_Drought_Soil_Dry_P Parameter: Post Timepoint (hr) Value: None
  misc_feature: MA Experiment 20001556 PARAMETER Experiment Name: At_Drought_Soil_Dry_P Parameter: Post-Treatment Value: None
  misc_feature: MA Experiment 20001556 PARAMETER Experiment Name: At_Drought_Soil_Dry_P Parameter: Timepoint (day) Value: 12
  misc_feature: MA Experiment 20001556 PARAMETER Experiment Name: At_Drought_Soil_Dry_P Parameter: Treatment Value: Drought vs. No Drought
  misc_feature: MA Experiment ID: 20001559 Result: Down-regulated in Transcription
  misc_feature: MA Experiment 20001559 PARAMETER Experiment Name: At_Drought_Soil_Dry_P Parameter: Age (day) Value: 28
  misc_feature: MA Experiment 20001559 PARAMETER Experiment Name: At_Drought_Soil_Dry_P Parameter: Organism Value: A. thaliana
  misc_feature: MA Experiment 20001559 PARAMETER Experiment Name: At_Drought_Soil_Dry_P Parameter: Plant Line Value: WS
  misc_feature: MA Experiment 20001559 PARAMETER Experiment Name: At_Drought_Soil_Dry_P Parameter: Post Timepoint (hr) Value: 29
  misc_feature: MA Experiment 20001559 PARAMETER Experiment Name: At_Drought_Soil_Dry_P Parameter: Post-Treatment Value: Re-Water vs. No Drought
  misc_feature: MA Experiment 20001559 PARAMETER Experiment Name: At_Drought_Soil_Dry_P Parameter: Timepoint (day) Value: 14
  misc_feature: MA Experiment 20001559 PARAMETER Experiment Name: At_Drought_Soil_Dry_P Parameter: Treatment Value: Drought vs. No Drought
  misc_feature: MA Experiment ID: 20001756 Result: Up-regulated in Transcription
  misc_feature: MA Experiment 20001756 PARAMETER Experiment Name: At_50mM_NH4NO3_L-to-H_P Parameter: Timepoint (hr) Value: 4
  misc_feature: MA Experiment 20001756 PARAMETER Experiment Name: At_50mM_NH4NO3_L-to-H_P Parameter: Tissue Value: Leaf
  misc_feature: MA Experiment 20001756 PARAMETER Experiment Name: At_50mM_NH4NO3_L-to-H_P Parameter: Treatment Value: 50mM NH4NO3 vs 100mM Mannitol
  misc_feature: MA Experiment ID: 20001757 Result: Up-regulated in Transcription
  misc_feature: MA Experiment 20001757 PARAMETER Experiment Name: At_50mM_NH4NO3_L-to-H_P Parameter: Timepoint (hr) Value: 6
  misc_feature: MA Experiment 20001757 PARAMETER Experiment Name: At_50mM_NH4NO3_L-to-H_P Parameter: Tissue Value: Leaf
  misc_feature: MA Experiment 20001757 PARAMETER Experiment Name: At_50mM_NH4NO3_L-to-H_P Parameter: Treatment Value: 50mM NH4NO3 vs 100mM Mannitol
  misc_feature: MA Experiment ID: 20001768 Result: Down-regulated in Transcription
  misc_feature: MA Experiment 20001768 PARAMETER Experiment Name: At_Far-red-enriched-adult_P Parameter: Age (day) Value: 28
  misc_feature: MA Experiment 20001768 PARAMETER Experiment Name: At_Far-red-enriched-adult_P Parameter: Light Value: Far-red enriched vs. White
  misc_feature: MA Experiment 20001768 PARAMETER Experiment Name: At_Far-red-enriched-adult_P Parameter: Organism Value: A. thaliana
  misc_feature: MA Experiment 20001768 PARAMETER Experiment Name: At_Far-red-enriched-adult_P Parameter: Plant Line Value: Columbia
  misc_feature: MA Experiment 20001768 PARAMETER Experiment Name: At_Far-red-enriched-adult_P Parameter: Timepoint (hr) Value: 1
  misc_feature: MA Experiment 20001768 PARAMETER Experiment Name: At_Far-red-enriched-adult_P Parameter: Tissue Value: Aerial
  misc_feature: MA Experiment ID: 20001904 Result: Down-regulated in Transcription
  misc_feature: MA Experiment 20001904 PARAMETER Experiment Name: At_Drought_Reproduction_P Parameter: Age (day) Value: 37
  misc_feature: MA Experiment 20001904 PARAMETER Experiment Name: At_Drought_Reproduction_P Parameter: Organism Value: A. thaliana
  misc_feature: MA Experiment 20001904 PARAMETER Experiment Name: At_Drought_Reproduction_P Parameter: Plant Line Value: WS
  misc_feature: MA Experiment 20001904 PARAMETER Experiment Name: At_Drought_Reproduction_P Parameter: Timepoint (day) Value: 7
  misc_feature: MA Experiment 20001904 PARAMETER Experiment Name: At_Drought_Reproduction_P Parameter: Tissue Value: Rosettes
  misc_feature: MA Experiment 20001904 PARAMETER Experiment Name: At_Drought_Reproduction_P Parameter: Treatment Value: Drought vs. No Drought
  misc_feature: MA Experiment ID: 20001906 Result: Down-regulated in Transcription
  misc_feature: MA Experiment 20001906 PARAMETER Experiment Name: At_Drought_Reproduction_P Parameter: Age (day) Value: 35
  misc_feature: MA Experiment 20001906 PARAMETER Experiment Name: At_Drought_Reproduction_P Parameter: Organism Value: A. thaliana
  misc_feature: MA Experiment 20001906 PARAMETER Experiment Name: At_Drought_Reproduction_P Parameter: Plant Line Value: WS
  misc_feature: MA Experiment 20001906 PARAMETER Experiment Name: At_Drought_Reproduction_P Parameter: Timepoint (day) Value: 5
  misc_feature: MA Experiment 20001906 PARAMETER Experiment Name: At_Drought_Reproduction_P Parameter: Tissue Value: Siliques
  misc_feature: MA Experiment 20001906 PARAMETER Experiment Name: At_Drought_Reproduction_P Parameter: Treatment Value: Drought vs. No Drought
  misc_feature: MA Experiment ID: 20001910 Result: Down-regulated in Transcription
  misc_feature: MA Experiment 20001910 PARAMETER Experiment Name: At_Drought_Reproduction_P Parameter: Age (day) Value: 37
  misc_feature: MA Experiment 20001910 PARAMETER Experiment Name: At_Drought_Reproduction_P Parameter: Organism Value: A. thaliana
  misc_feature: MA Experiment 20001910 PARAMETER Experiment Name: At_Drought_Reproduction_P Parameter: Plant Line Value: WS
  misc_feature: MA Experiment 20001910 PARAMETER Experiment Name: At_Drought_Reproduction_P Parameter: Timepoint (day) Value: 7
  misc_feature: MA Experiment 20001910 PARAMETER Experiment Name: At_Drought_Reproduction_P Parameter: Tissue Value: Flowers
  misc_feature: MA Experiment 20001910 PARAMETER Experiment Name: At_Drought_Reproduction_P Parameter: Treatment Value: Drought vs. No Drought
  misc_feature: MA Experiment ID: 20001911 Result: Down-regulated in Transcription
  misc_feature: MA Experiment 20001911 PARAMETER Experiment Name: At_Drought_Reproduction_P Parameter: Age (day) Value: 40
  misc_feature: MA Experiment 20001911 PARAMETER Experiment Name: At_Drought_Reproduction_P Parameter: Organism Value: A. thaliana
  misc_feature: MA Experiment 20001911 PARAMETER Experiment Name: At_Drought_Reproduction_P Parameter: Plant Line Value: WS
  misc_feature: MA Experiment 20001911 PARAMETER Experiment Name: At_Drought_Reproduction_P Parameter: Timepoint (day) Value: 10
  misc_feature: MA Experiment 20001911 PARAMETER Experiment Name: At_Drought_Reproduction_P Parameter: Tissue Value: Flowers
  misc_feature: MA Experiment 20001911 PARAMETER Experiment Name: At_Drought_Reproduction_P Parameter: Treatment Value: Drought vs. No Drought

SEQ ID NO: 38512 - protein, 153 aa, Arabidopsis thaliana; identical to SEQ ID NO: 23437
  peptide (1)..(153): Ceres Seq. ID no. 12561633
  misc_feature (71)..(152): Pfam Name: Protease inhibitor/seed storage/LTP family Pfam Description: Protease inhibitor/seed storage/LTP family
  misc_feature (71)..(152): Pfam Name: Protease inhibitor/seed storage/LTP family Pfam Description: Protease inhibitor/seed storage/LTP family
  misc_feature (71)..(152): Pfam Name: Protease inhibitor/seed storage/LTP family Pfam Description: Protease inhibitor/seed storage/LTP family
  misc_feature (20)..(152): Homolog of NCBI NO: 15221484 NR Description: similar to 14KD proline-rich protein DC2.15
  misc_feature (48)..(153): Homolog of NCBI NO: 7488729 NR Description: CIC protein, cold-inducible - alfalfa
  misc_feature (20)..(153): Homolog of NCBI NO: 10798752 NR Description: P-rich protein EIG-I30 [Nicotiana tabacum]
  misc_feature (35)..(152): Homolog of NCBI NO: 2129871 NR Description: proline-rich protein, 14K - kidney bean
  misc_feature (20)..(152): Homolog of NCBI NO: 10798758 NR Description: P-rich protein Nt-SubC29 [Nicotiana tabacum]
  misc_feature (20)..(152): Homolog of NCBI NO: 15221484 NR Description: similar to 14KD proline-rich protein DC2.15
  misc_feature (20)..(153): Homolog of NCBI NO: 10798752 NR Description: P-rich protein EIG-I30 [Nicotiana tabacum]
  misc_feature (20)..(152): Homolog of NCBI NO: 10798758 NR Description: P-rich protein Nt-SubC29 [Nicotiana tabacum]
  misc_feature (35)..(152): Homolog of NCBI NO: 2129871 NR Description: proline-rich protein, 14K - kidney bean
  misc_feature (20)..(153): Homolog of NCBI NO: 10798752 NR Description: P-rich protein EIG-I30 [Nicotiana tabacum]
  misc_feature (48)..(153): Homolog of NCBI NO: 7488729 NR Description: CIC protein, cold-inducible - alfalfa
  misc_feature (20)..(152): Homolog of NCBI NO: 15221484 NR Description: similar to 14KD proline-rich protein DC2.15
  misc_feature (20)..(153): Homolog of NCBI NO: 18406723 NR Description: expressed protein
  misc_feature (20)..(153): Homolog of NCBI NO: 481236 NR Description: hypothetical protein - Madagascar periwinkle
  misc_feature (20)..(153): Homolog of NCBI NO: 4454097 NR Description: hybrid proline-rich protein [Catharanthus roseus]
  misc_feature (20)..(153): Homolog of NCBI NO: 7484770 NR Description: extensin like protein - black poplar
  misc_feature (20)..(153): Homolog of NCBI NO: 112697 NR Description: 14 KD PROLINE-RICH PROTEIN DC2.15 PRECURSOR
  misc_feature (20)..(153): Homolog of NCBI NO: 18406723 NR Description: expressed protein
  misc_feature (20)..(153): Homolog of NCBI NO: 481236 NR Description: hypothetical protein - Madagascar periwinkle
  misc_feature (20)..(153): Homolog of NCBI NO: 4454097 NR Description: hybrid proline-rich protein [Catharanthus roseus]
  misc_feature (20)..(153): Homolog of NCBI NO: 7484770 NR Description: extensin like protein - black poplar
  misc_feature (20)..(153): Homolog of NCBI NO: 112697 NR Description: 14 KD PROLINE-RICH PROTEIN DC2.15 PRECURSOR
  misc_feature (20)..(152): Homolog of NCBI NO: 10798758 NR Description: P-rich protein Nt-SubC29 [Nicotiana tabacum]
  misc_feature (35)..(152): Homolog of NCBI NO: 2129871 NR Description: proline-rich protein, 14K - kidney bean
  misc_feature (48)..(153): Homolog of NCBI NO: 7488729 NR Description: CIC protein, cold-inducible - alfalfa
  misc_feature (20)..(153): Homolog of NCBI NO: 112697 NR Description: 14 KD PROLINE-RICH PROTEIN DC2.15 PRECURSOR
  misc_feature (20)..(153): Homolog of NCBI NO: 7484770 NR Description: extensin like protein - black poplar
  misc_feature (20)..(153): Homolog of NCBI NO: 4454097 NR Description: hybrid proline-rich protein [Catharanthus roseus]
  misc_feature (20)..(153): Homolog of NCBI NO: 481236 NR Description: hypothetical protein - Madagascar periwinkle
  misc_feature (20)..(153): Homolog of NCBI NO: 18406723 NR Description: expressed protein

SEQ ID NO: 38513 - protein, 134 aa, Arabidopsis thaliana; identical to SEQ ID NO: 23438
  peptide (1)..(134): Ceres Seq. ID no. 12561634
  misc_feature (52)..(133): Pfam Name: Protease inhibitor/seed storage/LTP family Pfam Description: Protease inhibitor/seed storage/LTP family
  misc_feature (52)..(133): Pfam Name: Protease inhibitor/seed storage/LTP family Pfam Description: Protease inhibitor/seed storage/LTP family
  misc_feature (52)..(133): Pfam Name: Protease inhibitor/seed storage/LTP family Pfam Description: Protease inhibitor/seed storage/LTP family
  misc_feature (1)..(133): Homolog of NCBI NO: 15221484 NR Description: similar to 14KD proline-rich protein DC2.15
  misc_feature (29)..(134): Homolog of NCBI NO: 7488729 NR Description: CIC protein, cold-inducible - alfalfa
  misc_feature (1)..(134): Homolog of NCBI NO: 10798752 NR Description: P-rich protein EIG-I30 [Nicotiana tabacum]
  misc_feature (16)..(133): Homolog of NCBI NO: 2129871 NR Description: proline-rich protein, 14K - kidney bean
  misc_feature (1)..(133): Homolog of NCBI NO: 10798758 NR Description: P-rich protein Nt-SubC29 [Nicotiana tabacum]
  misc_feature (1)..(133): Homolog of NCBI NO: 15221484 NR Description: similar to 14KD proline-rich protein DC2.15
  misc_feature (1)..(134): Homolog of NCBI NO: 10798752 NR Description: P-rich protein EIG-I30 [Nicotiana tabacum]
  misc_feature (1)..(133): Homolog of NCBI NO: 10798758 NR Description: P-rich protein Nt-SubC29 [Nicotiana tabacum]
  misc_feature (16)..(133): Homolog of NCBI NO: 2129871 NR Description: proline-rich protein, 14K - kidney bean
  misc_feature (1)..(134): Homolog of NCBI NO: 10798752 NR Description: P-rich protein EIG-I30 [Nicotiana tabacum]
  misc_feature (29)..(134): Homolog of NCBI NO: 7488729 NR Description: CIC protein, cold-inducible - alfalfa
  misc_feature (1)..(133): Homolog of NCBI NO: 15221484 NR Description: similar to 14KD proline-rich protein DC2.15
  misc_feature (1)..(134): Homolog of NCBI NO: 18406723 NR Description: expressed protein
  misc_feature (1)..(134): Homolog of NCBI NO: 481236 NR Description: hypothetical protein - Madagascar periwinkle
  misc_feature (1)..(134): Homolog of NCBI NO: 4454097 NR Description: hybrid proline-rich protein [Catharanthus roseus]
  misc_feature (1)..(134): Homolog of NCBI NO: 7484770 NR Description: extensin like protein - black poplar
  misc_feature (1)..(134): Homolog of NCBI NO: 112697 NR Description: 14 KD PROLINE-RICH PROTEIN DC2.15 PRECURSOR
  misc_feature (1)..(134): Homolog of NCBI NO: 18406723 NR Description: expressed protein
  misc_feature (1)..(134): Homolog of NCBI NO: 481236 NR Description: hypothetical protein - Madagascar periwinkle
  misc_feature (1)..(134): Homolog of NCBI NO: 4454097 NR Description: hybrid proline-rich protein [Catharanthus roseus]
  misc_feature (1)..(134): Homolog of NCBI NO: 7484770 NR Description: extensin like protein - black poplar
  misc_feature (1)..(134): Homolog of NCBI NO: 112697 NR Description: 14 KD PROLINE-RICH PROTEIN DC2.15 PRECURSOR
  misc_feature (1)..(133): Homolog of NCBI NO: 10798758 NR Description: P-rich protein Nt-SubC29 [Nicotiana tabacum]
  misc_feature (16)..(133): Homolog of NCBI NO: 2129871 NR Description: proline-rich protein, 14K - kidney bean
  misc_feature (29)..(134): Homolog of NCBI NO: 7488729 NR Description: CIC protein, cold-inducible - alfalfa
  misc_feature (1)..(134): Homolog of NCBI NO: 112697 NR Description: 14 KD PROLINE-RICH PROTEIN DC2.15 PRECURSOR
  misc_feature (1)..(134): Homolog of NCBI NO: 7484770 NR Description: extensin like protein - black poplar
  misc_feature (1)..(134): Homolog of NCBI NO: 4454097 NR Description: hybrid proline-rich protein [Catharanthus roseus]
  misc_feature (1)..(134): Homolog of NCBI NO: 481236 NR Description: hypothetical protein - Madagascar periwinkle
  misc_feature (1)..(134): Homolog of NCBI NO: 18406723 NR Description: expressed protein

SEQ ID NO: 38514 - DNA, 1402 bp, Arabidopsis thaliana
  misc_feature (1)..(1402): Ceres Seq. ID no. 12337871
  misc_feature: MA Experiment ID: 108434 Result: Down-regulated in Transcription
  misc_feature: MA Experiment 108434 PARAMETER Experiment Name: At_Root_Tips_cDNA_P Parameter: Tissue Value: Root Tips
  misc_feature: MA Experiment ID: 108435 Result: Down-regulated in Transcription
  misc_feature: MA Experiment 108435 PARAMETER Experiment Name: At_stm_Mutants_cDNA_P Parameter: Plant Line Value: wt Landsburg vs stm
  misc_feature: MA Experiment 108435 PARAMETER Experiment Name: At_stm_Mutants_cDNA_P Parameter: Tissue Value: Shoot Apical Meristem Region
  misc_feature: MA Experiment ID: 108501 Result: Up-regulated in Transcription
  misc_feature: MA Experiment 108501 PARAMETER Experiment Name: At_ap2_floral_buds_cDNA_P Parameter: Plant Line Value: ap2 (Ler.)
  misc_feature: MA Experiment 108501 PARAMETER Experiment Name: At_ap2_floral_buds_cDNA_P Parameter: Tissue Value: Closed Flower
  misc_feature: MA Experiment ID: 20000069 Result: Up-regulated in Transcription
  misc_feature: MA Experiment 20000069 PARAMETER Experiment Name: At_100uM_ABA_Mutants_cDNA_P Parameter: Plant Line Value: CS23
  misc_feature: MA Experiment 20000069 PARAMETER Experiment Name: At_100uM_ABA_Mutants_cDNA_P Parameter: Timepoint (hr) Value: 6
  misc_feature: MA Experiment 20000069 PARAMETER Experiment Name: At_100uM_ABA_Mutants_cDNA_P Parameter: Tissue Value: Aerial
  misc_feature: MA Experiment 20000069 PARAMETER Experiment Name: At_100uM_ABA_Mutants_cDNA_P Parameter: Treatment Value: 100uM ABA vs. No Treatment
  misc_feature: MA Experiment ID: 20000070 Result: Up-regulated in Transcription
  misc_feature: MA Experiment 20000070 PARAMETER Experiment Name: At_100uM_ABA_Mutants_cDNA_P Parameter: Plant Line Value: CS24
  misc_feature: MA Experiment 20000070 PARAMETER Experiment Name: At_100uM_ABA_Mutants_cDNA_P Parameter: Timepoint (hr) Value: 6
  misc_feature: MA Experiment 20000070 PARAMETER Experiment Name: At_100uM_ABA_Mutants_cDNA_P Parameter: Tissue Value: Aerial
  misc_feature: MA Experiment 20000070 PARAMETER Experiment Name: At_100uM_ABA_Mutants_cDNA_P Parameter: Treatment Value: 100uM ABA vs. No Treatment
  misc_feature: MA Experiment ID: 20000071 Result: Up-regulated in Transcription
  misc_feature: MA Experiment 20000071 PARAMETER Experiment Name: At_100uM_ABA_Mutants_cDNA_P Parameter: Plant Line Value: CS8104
  misc_feature: MA Experiment 20000071 PARAMETER Experiment Name: At_100uM_ABA_Mutants_cDNA_P Parameter: Timepoint (hr) Value: 6
  misc_feature: MA Experiment 20000071 PARAMETER Experiment Name: At_100uM_ABA_Mutants_cDNA_P Parameter: Tissue Value: Aerial
  misc_feature: MA Experiment 20000071 PARAMETER Experiment Name: At_100uM_ABA_Mutants_cDNA_P Parameter: Treatment Value: 100uM ABA vs. No Treatment
  misc_feature: MA Experiment ID: 20000072 Result: Up-regulated in Transcription
  misc_feature: MA Experiment 20000072 PARAMETER Experiment Name: At_100uM_ABA_Mutants_cDNA_P Parameter: Plant Line Value: CS8105
  misc_feature: MA Experiment 20000072 PARAMETER Experiment Name: At_100uM_ABA_Mutants_cDNA_P Parameter: Timepoint (hr) Value: 6
  misc_feature: MA Experiment 20000072 PARAMETER Experiment Name: At_100uM_ABA_Mutants_cDNA_P Parameter: Tissue Value: Aerial
  misc_feature: MA Experiment 20000072 PARAMETER Experiment Name: At_100uM_ABA_Mutants_cDNA_P Parameter: Treatment Value: 100uM ABA vs. No Treatment
  misc_feature: MA Experiment ID: 20000086 Result: Up-regulated in Transcription
  misc_feature: MA Experiment 20000086 PARAMETER Experiment Name: At_100uM_ABA_Mutants_cDNA_P Parameter: Plant Line Value: CS22
  misc_feature: MA Experiment 20000086 PARAMETER Experiment Name: At_100uM_ABA_Mutants_cDNA_P Parameter: Timepoint (hr) Value: 6
  misc_feature: MA Experiment 20000086 PARAMETER Experiment Name: At_100uM_ABA_Mutants_cDNA_P Parameter: Tissue Value: Aerial
  misc_feature: MA Experiment 20000086 PARAMETER Experiment Name: At_100uM_ABA_Mutants_cDNA_P Parameter: Treatment Value: 100uM ABA vs. No Treatment
  misc_feature: MA Experiment ID: 20000087 Result: Up-regulated in Transcription
  misc_feature: MA Experiment 20000087 PARAMETER Experiment Name: At_100uM_ABA_Mutants_cDNA_P Parameter: Plant Line Value: WS
  misc_feature: MA Experiment 20000087 PARAMETER Experiment Name: At_100uM_ABA_Mutants_cDNA_P Parameter: Timepoint (hr) Value: 6
  misc_feature: MA Experiment 20000087 PARAMETER Experiment Name: At_100uM_ABA_Mutants_cDNA_P Parameter: Tissue Value: Aerial
  misc_feature: MA Experiment 20000087 PARAMETER Experiment Name: At_100uM_ABA_Mutants_cDNA_P Parameter: Treatment Value: 100uM ABA vs. No Treatment
  misc_feature: MA Experiment ID: 20000088 Result: Up-regulated in Transcription
  misc_feature: MA Experiment 20000088 PARAMETER Experiment Name: At_100uM_ABA_Mutants_cDNA_P Parameter: Plant Line Value: Landsberg
  misc_feature: MA Experiment 20000088 PARAMETER Experiment Name: At_100uM_ABA_Mutants_cDNA_P Parameter: Timepoint (hr) Value: 6
  misc_feature: MA Experiment 20000088 PARAMETER Experiment Name: At_100uM_ABA_Mutants_cDNA_P Parameter: Tissue Value: Aerial
  misc_feature: MA Experiment 20000088 PARAMETER Experiment Name: At_100uM_ABA_Mutants_cDNA_P Parameter: Treatment Value: 100uM ABA vs. No Treatment
  misc_feature: MA Experiment ID: 20000089 Result: Up-regulated in Transcription
  misc_feature: MA Experiment ID: 20000090 Result: Up-regulated in Transcription
  misc_feature: MA Experiment ID: 20000111 Result: Down-regulated in Transcription
  misc_feature: MA Experiment 20000111 PARAMETER Experiment Name: At_42deg_Heat_cDNA_P Parameter: Temperature (deg C) Value: 42 vs. 22
  misc_feature: MA Experiment 20000111 PARAMETER Experiment Name: At_42deg_Heat_cDNA_P Parameter: Timepoint (hr) Value: 6
  misc_feature: MA Experiment 20000111 PARAMETER Experiment Name: At_42deg_Heat_cDNA_P Parameter: Tissue Value: Aerial
  misc_feature: MA Experiment ID: 20000117 Result: Up-regulated in Transcription
  misc_feature: MA Experiment 20000117 PARAMETER Experiment Name: At_100uM_ABA_Mutants_cDNA_P Parameter: Plant Line Value: Columbia
  misc_feature: MA Experiment 20000117 PARAMETER Experiment Name: At_100uM_ABA_Mutants_cDNA_P Parameter: Timepoint (hr) Value: 6
  misc_feature: MA Experiment 20000117 PARAMETER Experiment Name: At_100uM_ABA_Mutants_cDNA_P Parameter: Tissue Value: Aerial
  misc_feature: MA Experiment 20000117 PARAMETER Experiment Name: At_100uM_ABA_Mutants_cDNA_P Parameter: Treatment Value: 100uM ABA vs. No Treatment
  misc_feature: MA Experiment ID: 20000144 Result: Down-regulated in Transcription
  misc_feature: MA Experiment 20000144 PARAMETER Experiment Name: At_42deg_Heat_cDNA_P Parameter: Temperature (deg C) Value: 42 vs. 22
  misc_feature: MA Experiment 20000144 PARAMETER Experiment Name: At_42deg_Heat_cDNA_P Parameter: Timepoint (hr) Value: 1
  misc_feature: MA Experiment 20000144 PARAMETER Experiment Name: At_42deg_Heat_cDNA_P Parameter: Tissue Value: Aerial
  misc_feature: MA Experiment ID: 20000173 Result: Down-regulated in Transcription
  misc_feature: MA Experiment 20000173 PARAMETER Experiment Name: At_42deg_Heat_P Parameter: Age (day) Value: 14
  misc_feature: MA Experiment 20000173 PARAMETER Experiment Name: At_42deg_Heat_P Parameter: Organism Value: A. thaliana
  misc_feature: MA Experiment 20000173 PARAMETER Experiment Name: At_42deg_Heat_P Parameter: Plant Line Value: WS
  misc_feature: MA Experiment 20000173 PARAMETER Experiment Name: At_42deg_Heat_P Parameter: Temperature (deg C) Value: 42 vs. 22
  misc_feature: MA Experiment 20000173 PARAMETER Experiment Name: At_42deg_Heat_P Parameter: Timepoint (hr) Value: 6
  misc_feature: MA Experiment 20000173 PARAMETER Experiment Name: At_42deg_Heat_P Parameter: Tissue Value: Aerial
  misc_feature: MA Experiment ID: 20000182 Result: Up-regulated in Transcription
  misc_feature: MA Experiment 20000182 PARAMETER Experiment Name: At_2mM_SA_P Parameter: Age (day) Value: 14
  misc_feature: MA Experiment 20000182 PARAMETER Experiment Name: At_2mM_SA_P Parameter: Organism Value: A. thaliana
  misc_feature: MA Experiment 20000182 PARAMETER Experiment Name: At_2mM_SA_P Parameter: Plant Line Value: WS
  misc_feature: MA Experiment 20000182 PARAMETER Experiment Name: At_2mM_SA_P Parameter: Timepoint (hr) Value: 6
  misc_feature: MA Experiment 20000182 PARAMETER Experiment Name: At_2mM_SA_P Parameter: Tissue Value: Aerial
  misc_feature: MA Experiment 20000182 PARAMETER Experiment Name: At_2mM_SA_P Parameter: Treatment Value: 2mM SA vs. No Treatment
  misc_feature: MA Experiment ID: 20000184 Result: Down-regulated in Transcription
  misc_feature: MA Experiment 20000184 PARAMETER Experiment Name: At_Shoots__P Parameter: Age (day) Value: 7
  misc_feature: MA Experiment 20000184 PARAMETER Experiment Name: At_Shoots__P Parameter: Tissue Value: Shoots vs. Whole Plant
  misc_feature: MA Experiment ID: 20000185 Result: Down-regulated in Transcription
  misc_feature: MA Experiment 20000185 PARAMETER Experiment Name: At_Roots__P Parameter: Age (day) Value: 7 vs. 21
  misc_feature: MA Experiment 20000185 PARAMETER Experiment Name: At_Roots__P Parameter: Organism Value: A. thaliana
  misc_feature: MA Experiment 20000185 PARAMETER Experiment Name: At_Roots__P Parameter: Tissue Value: Roots vs. Whole Plant
  misc_feature: MA Experiment ID: 20000213 Result: Up-regulated in Transcription
  misc_feature: MA Experiment 20000213 PARAMETER Experiment Name: At_4deg_Cold_P Parameter: Timepoint (hr) Value: 2
  misc_feature: MA Experiment ID: 20000234 Result: Down-regulated in Transcription
  misc_feature: MA Experiment 20000234 PARAMETER Experiment Name: At_Siliques_P Parameter: Age (day) Value: 21
  misc_feature: MA Experiment 20000234 PARAMETER Experiment Name: At_Siliques_P Parameter: Organism Value: A. thaliana
  misc_feature: MA Experiment 20000234 PARAMETER Experiment Name: At_Siliques_P Parameter: Plant Line Value: WS
  misc_feature: MA Experiment 20000234 PARAMETER Experiment Name: At_Siliques_P Parameter: Tissue Value: Less Than 5mm Siliques vs. Whole Plant
  misc_feature: MA Experiment ID: 20000264 Result: Down-regulated in Transcription
  misc_feature: MA Experiment 20000264 PARAMETER Experiment Name: At_Open_Flower_P Parameter: Age (day) Value: 21
  misc_feature: MA Experiment 20000264 PARAMETER Experiment Name: At_Open_Flower_P Parameter: Plant Line Value: WS
  misc_feature: MA Experiment 20000264 PARAMETER Experiment Name: At_Open_Flower_P Parameter: Tissue Value: Open Flower vs. Whole Plant
  misc_feature: MA Experiment ID: 20000265 Result: Down-regulated in Transcription
  misc_feature: MA Experiment 20000265 PARAMETER Experiment Name: At_Open_Flower_P Parameter: Age (day) Value: 21
  misc_feature: MA Experiment 20000265 PARAMETER Experiment Name: At_Open_Flower_P Parameter: Plant Line Value: WS
  misc_feature: MA Experiment 20000265 PARAMETER Experiment Name: At_Open_Flower_P Parameter: Tissue Value: Closed Flower vs. Whole Plant
  misc_feature: MA Experiment ID: 20000286 Result: Down-regulated in Transcription
  misc_feature: MA Experiment 20000286 PARAMETER Experiment Name: At_Open_Flower_P Parameter: Age (day) Value: 21
  misc_feature: MA Experiment 20000286 PARAMETER Experiment Name: At_Open_Flower_P Parameter: Plant Line Value: WS
  misc_feature: MA Experiment 20000286 PARAMETER Experiment Name: At_Open_Flower_P Parameter: Tissue Value: Half Open vs. Whole Plant
  misc_feature: MA Experiment ID: 20000438 Result: Down-regulated in Transcription
  misc_feature: MA Experiment 20000438 PARAMETER Experiment Name: At_Shoots__P Parameter: Age (day) Value: 14
  misc_feature: MA Experiment 20000438 PARAMETER Experiment Name: At_Shoots__P Parameter: Tissue Value: Shoots vs. Whole Plant
  misc_feature: MA Experiment ID: 20000439 Result: Down-regulated in Transcription
  misc_feature: MA Experiment 20000439 PARAMETER Experiment Name: At_Roots__P Parameter: Age (day) Value: 14 vs. 21
  misc_feature: MA Experiment 20000439 PARAMETER Experiment Name: At_Roots__P Parameter: Organism Value: A. thaliana
  misc_feature: MA Experiment 20000439 PARAMETER Experiment Name: At_Roots__P Parameter: Tissue Value: Roots vs. Whole Plant
  misc_feature: MA Experiment ID: 20000495 Result: Down-regulated in Transcription
  misc_feature: MA Experiment 20000495 PARAMETER Experiment Name: At_Guard_Cells_P Parameter: Harvest Date Value: 8/2/2002
  misc_feature: MA Experiment 20000495 PARAMETER Experiment Name: At_Guard_Cells_P Parameter: Organism Value: A. thaliana
  misc_feature: MA Experiment 20000495 PARAMETER Experiment Name: At_Guard_Cells_P Parameter: Tissue Value: Guard Cells vs. Leaves
  misc_feature: MA Experiment ID: 20000576 Result: Down-regulated in Transcription
  misc_feature: MA Experiment 20000576 PARAMETER Experiment Name: At_100uM_ABA_Mutants__P Parameter: Organism Value: A. thaliana
  misc_feature: MA Experiment 20000576 PARAMETER Experiment Name: At_100uM_ABA_Mutants__P Parameter: Plant Line Value: CS23
  misc_feature: MA Experiment 20000576 PARAMETER Experiment Name: At_100uM_ABA_Mutants__P Parameter: Timepoint (hr) Value: 6
  misc_feature: MA Experiment 20000576 PARAMETER Experiment Name: At_100uM_ABA_Mutants__P Parameter: Tissue Value: Whole Plant
  misc_feature: MA Experiment 20000576 PARAMETER Experiment Name: At_100uM_ABA_Mutants__P Parameter: Treatment Value: 1uM ABA vs. No Treatment
  misc_feature: MA Experiment ID: 20000709 Result: Up-regulated in Transcription
  misc_feature: MA Experiment 20000709 PARAMETER Experiment Name: At_15mM_NH4NO3_L-to-H_P Parameter: Age (hr) Value: 14
  misc_feature: MA Experiment 20000709 PARAMETER Experiment Name: At_15mM_NH4NO3_L-to-H_P Parameter: Organism Value: A. thaliana
  misc_feature: MA Experiment 20000709 PARAMETER Experiment Name: At_15mM_NH4NO3_L-to-H_P Parameter: Plant Line Value: WS
  misc_feature: MA Experiment 20000709 PARAMETER Experiment Name: At_15mM_NH4NO3_L-to-H_P Parameter: Timepoint (hr) Value: 4
  misc_feature: MA Experiment 20000709 PARAMETER Experiment Name: At_15mM_NH4NO3_L-to-H_P Parameter: Tissue Value: Aerial
  misc_feature: MA Experiment 20000709 PARAMETER Experiment Name: At_15mM_NH4NO3_L-to-H_P Parameter: Treatment Value: 15mM NH4NO3 vs. 30mM Mannitol
  misc_feature: MA Experiment ID: 20000794 Result: Down-regulated in Transcription
  misc_feature: MA Experiment 20000794 PARAMETER Experiment Name: At_Petals_P Parameter: Age (day) Value: 23-25 days
  misc_feature: MA Experiment 20000794 PARAMETER Experiment Name: At_Petals_P Parameter: Plant Line Value: WS
  misc_feature: MA Experiment 20000794 PARAMETER Experiment Name: At_Petals_P Parameter: Tissue Value: Petals vs. Whole plant
  misc_feature: MA Experiment ID: 20001247 Result: Down-regulated in Transcription
  misc_feature: MA Experiment 20001247 PARAMETER Experiment Name: At_Far-red-induction_P Parameter: Age (day) Value: 7
  misc_feature: MA Experiment 20001247 PARAMETER Experiment Name: At_Far-red-induction_P Parameter: Light Value: Far-red vs. White
  misc_feature: MA Experiment 20001247 PARAMETER Experiment Name: At_Far-red-induction_P Parameter: Organism Value: A. thaliana
  misc_feature: MA Experiment 20001247 PARAMETER Experiment Name: At_Far-red-induction_P Parameter: Plant Line Value: Columbia
  misc_feature: MA Experiment 20001247 PARAMETER Experiment Name: At_Far-red-induction_P Parameter: Timepoint (hr) Value: 1
  misc_feature: MA Experiment 20001247 PARAMETER Experiment Name: At_Far-red-induction_P Parameter: Tissue Value: Whole Plant
  misc_feature: MA Experiment ID: 20001450 Result: Down-regulated in Transcription
  misc_feature: MA Experiment 20001450 PARAMETER Experiment Name: At_Far-red-induction_P Parameter: Age (day) Value: 7
  misc_feature: MA Experiment 20001450 PARAMETER Experiment Name: At_Far-red-induction_P Parameter: Light Value: Far-red vs. White
  misc_feature: MA Experiment 20001450 PARAMETER Experiment Name: At_Far-red-induction_P Parameter: Organism Value: A. thaliana
  misc_feature: MA Experiment 20001450 PARAMETER Experiment Name: At_Far-red-induction_P Parameter: Plant Line Value: Columbia
  misc_feature: MA Experiment 20001450 PARAMETER Experiment Name: At_Far-red-induction_P Parameter: Timepoint (hr) Value: 8
  misc_feature: MA Experiment 20001450 PARAMETER Experiment Name: At_Far-red-induction_P Parameter: Tissue Value: Whole Plant
  misc_feature: MA Experiment ID: 20001451 Result: Down-regulated in Transcription
  misc_feature: MA Experiment 20001451 PARAMETER Experiment Name: At_Far-red-induction_P Parameter: Age (day) Value: 7
  misc_feature: MA Experiment 20001451 PARAMETER Experiment Name: At_Far-red-induction_P Parameter: Light Value: Far-red vs. White
  misc_feature: MA Experiment 20001451 PARAMETER Experiment Name: At_Far-red-induction_P Parameter: Organism Value: A. thaliana
  misc_feature: MA Experiment 20001451 PARAMETER Experiment Name: At_Far-red-induction_P Parameter: Plant Line Value: Columbia
  misc_feature: MA Experiment 20001451 PARAMETER Experiment Name: At_Far-red-induction_P Parameter: Timepoint (hr) Value: 24
  misc_feature: MA Experiment 20001451 PARAMETER Experiment Name: At_Far-red-induction_P Parameter: Tissue Value: Whole Plant
  misc_feature: MA Experiment ID: 20001555 Result: Down-regulated in Transcription
  misc_feature: MA Experiment 20001555 PARAMETER Experiment Name: At_Drought_Soil_Dry_P Parameter: Age (day) Value: 24
  misc_feature: MA Experiment 20001555 PARAMETER Experiment Name: At_Drought_Soil_Dry_P Parameter: Organism Value: A. thaliana
  misc_feature: MA Experiment 20001555 PARAMETER Experiment Name: At_Drought_Soil_Dry_P Parameter: Plant Line Value: WS
  misc_feature: MA Experiment 20001555 PARAMETER Experiment Name: At_Drought_Soil_Dry_P Parameter: Post Timepoint (hr) Value: None
  misc_feature: MA Experiment 20001555 PARAMETER Experiment Name: At_Drought_Soil_Dry_P Parameter: Post-Treatment Value: None
  misc_feature: MA Experiment 20001555 PARAMETER Experiment Name: At_Drought_Soil_Dry_P Parameter: Timepoint (day) Value: 10
  misc_feature: MA Experiment 20001555 PARAMETER Experiment Name: At_Drought_Soil_Dry_P Parameter: Treatment Value: Drought vs. No Drought
  misc_feature: MA Experiment ID: 20001907 Result: Down-regulated in Transcription
  misc_feature: MA Experiment 20001907 PARAMETER Experiment Name: At_Drought_Reproduction_P Parameter: Age (day) Value: 37
  misc_feature: MA Experiment 20001907 PARAMETER Experiment Name: At_Drought_Reproduction_P Parameter: Organism Value: A. thaliana
  misc_feature: MA Experiment 20001907 PARAMETER Experiment Name: At_Drought_Reproduction_P Parameter: Plant Line Value: WS
  misc_feature: MA Experiment 20001907 PARAMETER Experiment Name: At_Drought_Reproduction_P Parameter: Timepoint (day) Value: 7
  misc_feature: MA Experiment 20001907 PARAMETER Experiment Name: At_Drought_Reproduction_P Parameter: Tissue Value: Siliques
  misc_feature: MA Experiment 20001907 PARAMETER Experiment Name: At_Drought_Reproduction_P Parameter: Treatment Value: Drought vs. No Drought
atcttcgaaaccccattactctcaaatccaaccaacctttcaaaacagaacacgaagacatggaccgaacacaatctccaaagacagctctgttcgccgtgttggcaacactccttgtcttaaccgtgaacggccagtcactttgtaagacacacaggttcaccaataacctcgccttcgcagattgctctgacctctcggccttaggctctttccttcactggacctacaatgaacaaaacggtaccgtctcaatcgcctatcgccaccctggaacctctgcttcttcttgggttgcttggggacttaacccaagtagtactcagatggttgggacgcaagctctagtagccttcacaaacacaacaactaaccaattccaggcctatacctcttccgtgagttcctatggtacgcggctcgaacgtagtagcctaagtttcggtgtgagtggcctctccgcgactctggtcagtggcgaggttacgatctttgcaactcttgagttgtctccgaatctgatcacggccaaccagctttggcaggtgggacctgttgtcaacggtgttcctgcgagtcatcaaacctcaggagataatatgagatcgagtggtaggattgatttccggactggtcaggcatcagctggtggtggtggttccggtgacaggctgaggaagagaaacacgcatggagtactaaatgcggtcagctggggagtactaatgccaatgggagcaatgatggctcggtacatgaaagtcttcgccgatccaacatggttctatctccacattgcctttcaagtgtcgggttacgtcatcggggtagccggttgggccaccggaatcaagcttggtaacgactcaccaggcacatcttactcaacccatcgtaaccttggaatagcactcttcacatttgccacacttcaagtatttgctctgcttgtaaggccaaagccagaccacaaatatcgaacgtactggaacgtgtaccatcacaccgttggatacacgaccatcatcctctctattgtcaacattttcaaaggattcgacattttggacccggaggataaatggcgatgggcttacattgggatcctcatctttcttggtgcttgtgtccttattctcgagccactcacttggttcattgttcttcgccgtaagagccgtggaggtaacacagtcgctgcaccaacttcgagcaagtactctaacggcgtcaatggtaccaccaccactggaccacatcaccaggacgcctagtttcactttttgtttctacacttgttcttgtttgttctacttctactcgattttggattcttttttgatttgatattttgtaggctcatgtatgtattatgtatacaattttattcattgtgttatag

SEQ ID NO: 38515 - protein, 423 aa, Arabidopsis thaliana
  peptide (1)..(423): Ceres Seq. ID no. 12337872
  misc_feature (109)..(237): Pfam Name: Protein of unknown function (DUF568) Pfam Description: Protein of unknown function (DUF568)
  misc_feature (20)..(392): Homolog of NCBI NO: 15235545 NR Description: putative protein
  misc_feature (30)..(409): Homolog of NCBI NO: 24414270 NR Description: Putative membrane protein [Oryza sativa (japonica
  misc_feature (48)..(408): Homolog of NCBI NO: 15238124 NR Description: putative protein; protein id: At5g47530.1
  misc_feature (32)..(397): Homolog of NCBI NO: 18086563 NR Description: AT4g17280/dl4675c [Arabidopsis thaliana]
  misc_feature (28)..(421): Homolog of NCBI NO: 13785213 NR Description: putative membrane protein [Solanum tuberosum]
  misc_feature (28)..(421): Homolog of NCBI NO: 13785207 NR Description: putative membrane protein [Solanum tuberosum]
  misc_feature (28)..(421): Homolog of NCBI NO: 13785211 NR Description: putative membrane protein [Solanum tuberosum]
  misc_feature (30)..(423): Homolog of NCBI NO: 13785209 NR Description: putative membrane protein [Solanum tuberosum]
  misc_feature (20)..(423): Homolog of NCBI NO: 21592781 NR Description: putative membrane protein [Arabidopsis thaliana]
  misc_feature (20)..(423): Homolog of NCBI NO: 18421491 NR Description: Expressed protein
LRNPITLKSNQPFKTEHEDMDRTQSPKTALFAVLATLLVLTVNGQSLCKTHRFTNNLAFADCSDLSALGSFLHWTYNEQNGTVSIAYRHPGTSASSWVAWGLNPSSTQMVGTQALVAFTNTTTNQFQAYTSSVSSYGTRLERSSLSFGVSGLSATLVSGEVTIFATLELSPNLITANQLWQVGPVVNGVPASHQTSGDNMRSSGRIDFRTGQASAGGGGSGDRLRKRNTHGVLNAVSWGVLMPMGAMMARYMKVFADPTWFYLHIAFQVSGYVIGVAGWATGIKLGNDSPGTSYSTHRNLGIALFTFATLQVFALLVRPKPDHKYRTYWNVYHHTVGYTTIILSIVNIFKGFDILDPEDKWRWAYIGILIFLGACVLILEPLTWFIVLRRKSRGGNTVAAPTSSKYSNGVNGTTTTGPHHQDA

SEQ ID NO: 38516 - protein, 404 aa, Arabidopsis thaliana
  peptide (1)..(404): Ceres Seq. ID no. 12337873
  misc_feature (90)..(218): Pfam Name: Protein of unknown function (DUF568) Pfam Description: Protein of unknown function (DUF568)
  misc_feature (1)..(373): Homolog of NCBI NO: 15235545 NR Description: putative protein
  misc_feature (11)..(390): Homolog of NCBI NO: 24414270 NR Description: Putative membrane protein [Oryza sativa (japonica
  misc_feature (29)..(389): Homolog of NCBI NO: 15238124 NR Description: putative protein; protein id: At5g47530.1
  misc_feature (13)..(378): Homolog of NCBI NO: 18086563 NR Description: AT4g17280/dl4675c [Arabidopsis thaliana]
  misc_feature (9)..(402): Homolog of NCBI NO: 13785213 NR Description: putative membrane protein [Solanum tuberosum]
  misc_feature (9)..(402): Homolog of NCBI NO: 13785207 NR Description: putative membrane protein [Solanum tuberosum]
  misc_feature (9)..(402): Homolog of NCBI NO: 13785211 NR Description: putative membrane protein [Solanum tuberosum]
  misc_feature (11)..(404): Homolog of NCBI NO: 13785209 NR Description: putative membrane protein [Solanum tuberosum]
  misc_feature (1)..(404): Homolog of NCBI NO: 21592781 NR Description: putative membrane protein [Arabidopsis thaliana]
  misc_feature (1)..(404): Homolog of NCBI NO: 18421491 NR Description: Expressed protein
MDRTQSPKTALFAVLATLLVLTVNGQSLCKTHRFTNNLAFADCSDLSALGSFLHWTYNEQNGTVSIAYRHPGTSASSWVAWGLNPSSTQMVGTQALVAFTNTTTNQFQAYTSSVSSYGTRLERSSLSFGVSGLSATLVSGEVTIFATLELSPNLITANQLWQVGPVVNGVPASHQTSGDNMRSSGRIDFRTGQASAGGGGSGDRLRKRNTHGVLNAVSWGVLMPMGAMMARYMKVFADPTWFYLHIAFQVSGYVIGVAGWATGIKLGNDSPGTSYSTHRNLGIALFTFATLQVFALLVRPKPDHKYRTYWNVYHHTVGYTTIILSIVNIFKGFDILDPEDKWRWAYIGILIFLGACVLILEPLTWFIVLRRKSRGGNTVAAPTSSKYSNGVNGTTTTGPHHQDA

SEQ ID NO: 38517 - protein, 315 aa, Arabidopsis thaliana; identical to SEQ ID NO: 22045
  peptide (1)..(315): Ceres Seq. ID no. 12337874
  misc_feature (1)..(129): Pfam Name: Protein of unknown function (DUF568) Pfam Description: Protein of unknown function (DUF568)
  misc_feature (1)..(284): Homolog of NCBI NO: 15235545 NR Description: putative protein
  misc_feature (1)..(301): Homolog of NCBI NO: 24414270 NR Description: Putative membrane protein [Oryza sativa (japonica
  misc_feature (1)..(300): Homolog of NCBI NO: 15238124 NR Description: putative protein; protein id: At5g47530.1
  misc_feature (1)..(289): Homolog of NCBI NO: 18086563 NR Description: AT4g17280/dl4675c [Arabidopsis thaliana]
  misc_feature (1)..(313): Homolog of NCBI NO: 13785213 NR Description: putative membrane protein [Solanum tuberosum]
  misc_feature (1)..(313): Homolog of NCBI NO: 13785207 NR Description: putative membrane protein [Solanum tuberosum]
  misc_feature (1)..(313): Homolog of NCBI NO: 13785211 NR Description: putative membrane protein [Solanum tuberosum]
  misc_feature (1)..(315): Homolog of NCBI NO: 13785209 NR Description: putative membrane protein [Solanum tuberosum]
  misc_feature (1)..(315): Homolog of NCBI NO: 21592781 NR Description: putative membrane protein [Arabidopsis thaliana]
  misc_feature (1)..(315): Homolog of NCBI NO: 18421491 NR Description: Expressed protein

SEQ ID NO: 38518 - DNA, 1028 bp, Arabidopsis thaliana
  misc_feature (1)..(1028): Ceres Seq. ID no. 12325605
  misc_feature: MA Experiment ID: 20000185 Result: Down-regulated in Transcription
  misc_feature: MA Experiment 20000185 PARAMETER Experiment Name: At_Roots__P Parameter: Age (day) Value: 7 vs. 21
  misc_feature: MA Experiment 20000185 PARAMETER Experiment Name: At_Roots__P Parameter: Organism Value: A. thaliana
  misc_feature: MA Experiment 20000185 PARAMETER Experiment Name: At_Roots__P Parameter: Tissue Value: Roots vs. Whole Plant
  misc_feature: MA Experiment ID: 20000227 Result: Down-regulated in Transcription
  misc_feature: MA Experiment 20000227 PARAMETER Experiment Name: At_Root-Tips-vs-Tops_P Parameter: Tissue Value: Root Tips vs. Root Tops
  misc_feature: MA Experiment ID: 20000286 Result: Down-regulated in Transcription
  misc_feature: MA Experiment 20000286 PARAMETER Experiment Name: At_Open_Flower_P Parameter: Age (day) Value: 21
  misc_feature: MA Experiment 20000286 PARAMETER Experiment Name: At_Open_Flower_P Parameter: Plant Line Value: WS
  misc_feature: MA Experiment 20000286 PARAMETER Experiment Name: At_Open_Flower_P Parameter: Tissue Value: Half Open vs. Whole Plant
  misc_feature: MA Experiment ID: 20000439 Result: Down-regulated in Transcription
  misc_feature: MA Experiment 20000439 PARAMETER Experiment Name: At_Roots__P Parameter: Age (day) Value: 14 vs. 21
  misc_feature: MA Experiment 20000439 PARAMETER Experiment Name: At_Roots__P Parameter: Organism Value: A. thaliana
  misc_feature: MA Experiment 20000439 PARAMETER Experiment Name: At_Roots__P Parameter: Tissue Value: Roots vs. Whole Plant
agaacgattcgcttatctttcccttatttcttttctcaggggatacagagagaagccaaagctaatagaagcacgaacggcgtcgggttagtccgacggaggaaccatgtcctcgtctcttcttctctccggttctactgtatcttcttcgtttatcgctccatctaagccttctctcgtacgaaattccagtaagacatcactgttaccatttcgtaatgtttcgagaagcttcaaaaccgtcaagtgcaccgttgattcttcatatggaggcaatgttcccacgttccctcggacgagagtttgggacccgtacaaacgtctaggagttagtccatatgcttccgaggaagaaatctgggcctctcgtaactttcttttacagcagtacgctggacatgaaagaagcgaagagtctatagaaggagcctttgagaagcttctcatgtctagttttatcagaaggaagaagactaaaatcaatcttaaatcaaagttgaagaagaaagttgaggaatctcctccgtggctcaaagctcttctcgatttcgttgaaatgcctcccatggacactattttcagaagacttttcctctttgccttcatgggtggttggagtatcatgaactctgcagaaggcggtcctgcgtttcaggtggcggtatcattggctgcgtgcgtatattttctgaatgagaagacaaagagcttggggagagcttgcttaatcggaattggagctttagttgccgggtggttctgcggttcgttaatcattcccatgattccgacgtttctcattcagcctacatggacactcgagctcctaacatcactggtcgcttatgtgtttttgtttctttcttgtactttcctcaagtaagttacgttgtggttttatccaaactctttttgttcttttcgcccagacatttacagaacctttcggaaaaattagtgaaagttgttaagtgtttgattggtttcacagttttcttttatgcgttaatgtaaatgacttcaacgtg

SEQ ID NO: 38519 - protein, 258 aa, Arabidopsis thaliana
  peptide (1)..(258): Ceres Seq. ID no. 12325606
  misc_feature (69)..(258): Homolog of NCBI NO: 16329734 NR Description: unknown protein [Synechocystis sp. PCC 6803]
  misc_feature (70)..(258): Homolog of NCBI NO: 23039527 NR Description: hypothetical protein [Trichodesmium erythraeum
  misc_feature (68)..(258): Homolog of NCBI NO: 23129945 NR Description: hypothetical protein [Nostoc punctiforme]
  misc_feature (69)..(258): Homolog of NCBI NO: 17230751 NR Description: hypothetical protein [Nostoc sp. PCC 7120]
  misc_feature (25)..(258): Homolog of NCBI NO: 18409276 NR Description: putative protein
  misc_feature (12)..(258): Homolog of NCBI NO: 11357625 NR Description: hypothetical protein F24M12.180 - Arabidopsis
  misc_feature (145)..(258): Homolog of NCBI NO: 37573058 NR Description: unknown protein [Oryza sativa (japonica
  misc_feature (1)..(258): Homolog of NCBI NO: 15237199 NR Description: putative protein; protein id: At5g23040.1
  misc_feature (69)..(258): Homolog of NCBI NO: 16329734 NR Description: unknown protein [Synechocystis sp. PCC 6803]
  misc_feature (70)..(258): Homolog of NCBI NO: 23039527 NR Description: hypothetical protein [Trichodesmium erythraeum
  misc_feature (68)..(258): Homolog of NCBI NO: 23129945 NR Description: hypothetical protein [Nostoc punctiforme]
  misc_feature (69)..(258): Homolog of NCBI NO: 17230751 NR Description: hypothetical protein [Nostoc sp. PCC 7120]
  misc_feature (25)..(258): Homolog of NCBI NO: 18409276 NR Description: putative protein
  misc_feature (12)..(258): Homolog of NCBI NO: 11357625 NR Description: hypothetical protein F24M12.180 - Arabidopsis
  misc_feature (145)..(258): Homolog of NCBI NO: 37573058 NR Description: unknown protein [Oryza sativa (japonica
  misc_feature (1)..(258): Homolog of NCBI NO: 15237199 NR Description: putative protein; protein id: At5g23040.1
MSSSLLLSGSTVSSSFIAPSKPSLVRNSSKTSLLPFRNVSRSFKTVKCTVDSSYGGNVPTFPRTRVWDPYKRLGVSPYASEEEIWASRNFLLQQYAGHERSEESIEGAFEKLLMSSFIRRKKTKINLKSKLKKKVEESPPWLKALLDFVEMPPMDTIFRRLFLFAFMGGWSIMNSAEGGPAFQVAVSLAACVYFLNEKTKSLGRACLIGIGALVAGWFCGSLIIPMIPTFLIQPTWTLELLTSLVAYVFLFLSCTFLK

SEQ ID NO: 38520 - protein, 145 aa, Arabidopsis thaliana
  peptide (1)..(145): Ceres Seq. ID no. 12325607
  misc_feature (1)..(145): Homolog of NCBI NO: 16329734 NR Description: unknown protein [Synechocystis sp. PCC 6803]
  misc_feature (1)..(145): Homolog of NCBI NO: 23039527 NR Description: hypothetical protein [Trichodesmium erythraeum
  misc_feature (1)..(145): Homolog of NCBI NO: 23129945 NR Description: hypothetical protein [Nostoc punctiforme]
  misc_feature (1)..(145): Homolog of NCBI NO: 17230751 NR Description: hypothetical protein [Nostoc sp. PCC 7120]
  misc_feature (1)..(145): Homolog of NCBI NO: 18409276 NR Description: putative protein
  misc_feature (1)..(145): Homolog of NCBI NO: 11357625 NR Description: hypothetical protein F24M12.180 - Arabidopsis
  misc_feature (32)..(145): Homolog of NCBI NO: 37573058 NR Description: unknown protein [Oryza sativa (japonica
  misc_feature (1)..(145): Homolog of NCBI NO: 15237199 NR Description: putative protein; protein id: At5g23040.1
  misc_feature (1)..(145): Homolog of NCBI NO: 16329734 NR Description: unknown protein [Synechocystis sp. PCC 6803]
  misc_feature (1)..(145): Homolog of NCBI NO: 23039527 NR Description: hypothetical protein [Trichodesmium erythraeum
  misc_feature (1)..(145): Homolog of NCBI NO: 23129945 NR Description: hypothetical protein [Nostoc punctiforme]
  misc_feature (1)..(145): Homolog of NCBI NO: 17230751 NR Description: hypothetical protein [Nostoc sp. PCC 7120]
  misc_feature (1)..(145): Homolog of NCBI NO: 18409276 NR Description: putative protein
  misc_feature (1)..(145): Homolog of NCBI NO: 11357625 NR Description: hypothetical protein F24M12.180 - Arabidopsis
  misc_feature (32)..(145): Homolog of NCBI NO: 37573058 NR Description: unknown protein [Oryza sativa (japonica
  misc_feature (1)..(145): Homolog of NCBI NO: 15237199 NR Description: putative protein; protein id: At5g23040.1
MSSFIRRKKTKINLKSKLKKKVEESPPWLKALLDFVEMPPMDTIFRRLFLFAFMGGWSIMNSAEGGPAFQVAVSLAACVYFLNEKTKSLGRACLIGIGALVAGWFCGSLIIPMIPTFLIQPTWTLELLTSLVAYVFLFLSCTFLK

SEQ ID NO: 38521 - DNA, 443 bp, Arabidopsis thaliana
  misc_feature (1)..(443): Ceres Seq. ID no. 12385620
  misc_feature: MA Experiment ID: 108434 Result: Up-regulated in Transcription
  misc_feature: MA Experiment 108434 PARAMETER Experiment Name: At_Root_Tips_cDNA_P Parameter: Tissue Value: Root Tips
  misc_feature: MA Experiment ID: 108462 Result: Down-regulated in Transcription
  misc_feature: MA Experiment 108462 PARAMETER Experiment Name: At_Germinating_Seeds_cDNA_P Parameter: Age (day) Value: 2 vs. 0
  misc_feature: MA Experiment 108462 PARAMETER Experiment Name: At_Germinating_Seeds_cDNA_P Parameter: Tissue Value: Germinating Seeds
  misc_feature: MA Experiment ID: 108463 Result: Down-regulated in Transcription
  misc_feature: MA Experiment 108463 PARAMETER Experiment Name: At_Germinating_Seeds_cDNA_P Parameter: Age (day) Value: 3 vs. 0
  misc_feature: MA Experiment 108463 PARAMETER Experiment Name: At_Germinating_Seeds_cDNA_P Parameter: Tissue Value: Germinating Seeds
  misc_feature: MA Experiment ID: 108561 Result: Down-regulated in Transcription
  misc_feature: MA Experiment 108561 PARAMETER Experiment Name: At_100uM_ABA_cDNA_P Parameter: Timepoint (hr) Value: 6
  misc_feature: MA Experiment 108561 PARAMETER Experiment Name: At_100uM_ABA_cDNA_P Parameter: Tissue Value: Aerial
  misc_feature: MA Experiment 108561 PARAMETER Experiment Name: At_100uM_ABA_cDNA_P Parameter: Treatment Value: 100uM ABA vs. No Treatment
  misc_feature: MA Experiment ID: 108573 Result: Down-regulated in Transcription
  misc_feature: MA Experiment 108573 PARAMETER Experiment Name: At_Drought_cDNA_P Parameter: Timepoint (hr) Value: 6
  misc_feature: MA Experiment 108573 PARAMETER Experiment Name: At_Drought_cDNA_P Parameter: Tissue Value: Aerial
  misc_feature: MA Experiment 108573 PARAMETER Experiment Name: At_Drought_cDNA_P Parameter: Treatment Value: Drought vs. No Drought
  misc_feature: MA Experiment ID: 20000184 Result: Up-regulated in Transcription
  misc_feature: MA Experiment 20000184 PARAMETER Experiment Name: At_Shoots__P Parameter: Age (day) Value: 7
  misc_feature: MA Experiment 20000184 PARAMETER Experiment Name: At_Shoots__P Parameter: Tissue Value: Shoots vs. Whole Plant
  misc_feature: MA Experiment ID: 20000227 Result: Up-regulated in Transcription
  misc_feature: MA Experiment 20000227 PARAMETER Experiment Name: At_Root-Tips-vs-Tops_P Parameter: Tissue Value: Root Tips vs. Root Tops
  misc_feature: MA Experiment ID: 20000234 Result: Up-regulated in Transcription
  misc_feature: MA Experiment 20000234 PARAMETER Experiment Name: At_Siliques_P Parameter: Age (day) Value: 21
  misc_feature: MA Experiment 20000234 PARAMETER Experiment Name: At_Siliques_P Parameter: Organism Value: A. thaliana
  misc_feature: MA Experiment 20000234 PARAMETER Experiment Name: At_Siliques_P Parameter: Plant Line Value: WS
  misc_feature: MA Experiment 20000234 PARAMETER Experiment Name: At_Siliques_P Parameter: Tissue Value: Less Than 5mm Siliques vs. Whole Plant
  misc_feature: MA Experiment ID: 20000235 Result: Up-regulated in Transcription
  misc_feature: MA Experiment 20000235 PARAMETER Experiment Name: At_Siliques_P Parameter: Age (day) Value: 21
  misc_feature: MA Experiment 20000235 PARAMETER Experiment Name: At_Siliques_P Parameter: Organism Value: A. thaliana
  misc_feature: MA Experiment 20000235 PARAMETER Experiment Name: At_Siliques_P Parameter: Plant Line Value: WS
  misc_feature: MA Experiment 20000235 PARAMETER Experiment Name: At_Siliques_P Parameter: Tissue Value: 5-10mm Siliques vs. Whole Plant
  misc_feature: MA Experiment ID: 20000264 Result: Up-regulated in Transcription
  misc_feature: MA Experiment 20000264 PARAMETER Experiment Name: At_Open_Flower_P Parameter: Age (day) Value: 21
  misc_feature: MA Experiment 20000264 PARAMETER Experiment Name: At_Open_Flower_P Parameter: Plant Line Value: WS
  misc_feature: MA Experiment 20000264 PARAMETER Experiment Name: At_Open_Flower_P Parameter: Tissue Value: Open Flower vs. Whole Plant
  misc_feature: MA Experiment ID: 20000437 Result: Down-regulated in Transcription
  misc_feature: MA Experiment 20000437 PARAMETER Experiment Name: At_Drought_P Parameter: Age (day) Value: 8
  misc_feature: MA Experiment 20000437 PARAMETER Experiment Name: At_Drought_P Parameter: Organism Value: A. thaliana
  misc_feature: MA Experiment 20000437 PARAMETER Experiment Name: At_Drought_P Parameter: Plant Line Value: WS
  misc_feature: MA Experiment 20000437 PARAMETER Experiment Name: At_Drought_P Parameter: Timepoint (hr) Value: 24
  misc_feature: MA Experiment 20000437 PARAMETER Experiment Name: At_Drought_P Parameter: Tissue Value: Whole Plant
  misc_feature: MA Experiment 20000437 PARAMETER Experiment Name: At_Drought_P Parameter: Treatment Value: Drought vs. No Drought
  misc_feature: MA Experiment ID: 20000794 Result: Down-regulated in Transcription
  misc_feature: MA Experiment 20000794 PARAMETER Experiment Name: At_Petals_P Parameter: Age (day) Value: 23-25 days
  misc_feature: MA Experiment 20000794 PARAMETER Experiment Name: At_Petals_P Parameter: Plant Line Value: WS
  misc_feature: MA Experiment 20000794 PARAMETER Experiment Name: At_Petals_P Parameter: Tissue Value: Petals vs. Whole plant
  misc_feature: MA Experiment ID: 20001557 Result: Up-regulated in Transcription
  misc_feature: MA Experiment 20001557 PARAMETER Experiment Name: At_Drought_Soil_Dry_P Parameter: Age (day) Value: 27
  misc_feature: MA Experiment 20001557 PARAMETER Experiment Name: At_Drought_Soil_Dry_P Parameter: Organism Value: A. thaliana
  misc_feature: MA Experiment 20001557 PARAMETER Experiment Name: At_Drought_Soil_Dry_P Parameter: Plant Line Value: WS
  misc_feature: MA Experiment 20001557 PARAMETER Experiment Name: At_Drought_Soil_Dry_P Parameter: Post Timepoint (hr) Value: 3
  misc_feature: MA Experiment 20001557 PARAMETER Experiment Name: At_Drought_Soil_Dry_P Parameter: Post-Treatment Value: Re-Water vs. No Drought
  misc_feature: MA Experiment 20001557 PARAMETER Experiment Name: At_Drought_Soil_Dry_P Parameter: Timepoint (day) Value: 13
  misc_feature: MA Experiment 20001557 PARAMETER Experiment Name: At_Drought_Soil_Dry_P Parameter: Treatment Value: Drought vs. No Drought
  misc_feature: MA Experiment ID: 20001558 Result: Up-regulated in Transcription
  misc_feature: MA Experiment 20001558 PARAMETER Experiment Name: At_Drought_Soil_Dry_P Parameter: Age (day) Value: 27
  misc_feature: MA Experiment 20001558 PARAMETER Experiment Name: At_Drought_Soil_Dry_P Parameter: Organism Value: A. thaliana
  misc_feature: MA Experiment 20001558 PARAMETER Experiment Name: At_Drought_Soil_Dry_P Parameter: Plant Line Value: WS
  misc_feature: MA Experiment 20001558 PARAMETER Experiment Name: At_Drought_Soil_Dry_P Parameter: Post Timepoint (hr) Value: 6
  misc_feature: MA Experiment 20001558 PARAMETER Experiment Name: At_Drought_Soil_Dry_P Parameter: Post-Treatment Value: Re-Water vs. No Drought
  misc_feature: MA Experiment 20001558 PARAMETER Experiment Name: At_Drought_Soil_Dry_P Parameter: Timepoint (day) Value: 13
  misc_feature: MA Experiment 20001558 PARAMETER Experiment Name: At_Drought_Soil_Dry_P Parameter: Treatment Value: Drought vs. No Drought
  misc_feature: MA Experiment ID: 20001560 Result: Up-regulated in Transcription
  misc_feature: MA Experiment 20001560 PARAMETER Experiment Name: At_Drought_Soil_Dry_P Parameter: Age (day) Value: 28
  misc_feature: MA Experiment 20001560 PARAMETER Experiment Name: At_Drought_Soil_Dry_P Parameter: Organism Value: A. thaliana
  misc_feature: MA Experiment 20001560 PARAMETER Experiment Name: At_Drought_Soil_Dry_P Parameter: Plant Line Value: WS
  misc_feature: MA Experiment 20001560 PARAMETER Experiment Name: At_Drought_Soil_Dry_P Parameter: Post Timepoint (hr) Value: None
  misc_feature: MA Experiment 20001560 PARAMETER Experiment Name: At_Drought_Soil_Dry_P Parameter: Post-Treatment Value: None
  misc_feature: MA Experiment 20001560 PARAMETER Experiment Name: At_Drought_Soil_Dry_P Parameter: Timepoint (day) Value: 14
  misc_feature: MA Experiment 20001560 PARAMETER Experiment Name: At_Drought_Soil_Dry_P Parameter: Treatment Value: Drought vs. No Drought
  misc_feature: MA Experiment ID: 20001757 Result: Up-regulated in Transcription
  misc_feature: MA Experiment 20001757 PARAMETER Experiment Name: At_50mM_NH4NO3_L-to-H_P Parameter: Timepoint (hr) Value: 6
  misc_feature: MA Experiment 20001757 PARAMETER Experiment Name: At_50mM_NH4NO3_L-to-H_P Parameter: Tissue Value: Leaf
  misc_feature: MA Experiment 20001757 PARAMETER Experiment Name: At_50mM_NH4NO3_L-to-H_P Parameter: Treatment Value: 50mM NH4NO3 vs 100mM Mannitol
gctcattagggtttctcatctacgacggcgtggtgttcctccttcctgctctgaaaaatggcgaagagaaccaagaaggttggaatcgtcggcaaatacggaacacgttatcaggaagcagattaagaagatggaggtcagccagcacagcaagtacttctgtgagttctgtggcaagtacggagtgaagcgaaaggctgttggtatctggggttgcaaggattgtggcaaggtcaaggcaggtggtgcttacacaatgaacaccgccagtgcggtcactgttagaagcacgatcagaaggttgagggagcagatcgagggttaaaagtctgctggctttttatatttggtttccttgttttgacaatttaagttttgcaaactctatgcttgtgattttgaatcaagacttatacattgagcagtttaagcaggtttttatt

SEQ ID NO: 38522 - protein, 107 aa, Arabidopsis thaliana
  peptide (1)..(107): Ceres Seq. ID no. 12385621
  misc_feature (37)..(104): Homolog of NCBI NO: 33637090 NR Description: N1 [Toxoplasma gondii]
  misc_feature (37)..(103): Homolog of NCBI NO: 7441206 NR Description: ribosomal protein L37a
  misc_feature (37)..(106): Homolog of NCBI NO: 6093889 NR Description: 60S RIBOSOMAL PROTEIN L37A
  misc_feature (37)..(107): Homolog of NCBI NO: 11358898 NR Description: translation initiation factor eIF-4 gamma homolog
  misc_feature (37)..(106): Homolog of NCBI NO: 15228411 NR Description: putative 60S ribosomal protein L37a; protein id:
  misc_feature (37)..(106): Homolog of NCBI NO: 6831602 NR Description: 60S RIBOSOMAL PROTEIN L37A
  misc_feature (37)..(107): Homolog of NCBI NO: 6831607 NR Description: 60S ribosomal protein L37a
  misc_feature (37)..(106): Homolog of NCBI NO: 34911166 NR Description: putative 60S ribosomal protein L37a
  misc_feature (37)..(107): Homolog of NCBI NO: 1173045 NR Description: 60S RIBOSOMAL PROTEIN L37A
  misc_feature (37)..(107): Homolog of NCBI NO: 18411538 NR Description: Expressed protein
LIRVSHLRRRGVPPSCSEKWRREPRRLESSANTEHVIRKQIKKMEVSQHSKYFCEFCGKYGVKRKAVGIWGCKDCGKVKAGGAYTMNTASAVTVRSTIRRLREQIEG

SEQ ID NO: 38523 - protein, 64 aa, Arabidopsis thaliana; identical to SEQ ID NO: 30082
  peptide (1)..(64): Ceres Seq. ID no. 12385622
  misc_feature (1)..(61): Homolog of NCBI NO: 33637090 NR Description: N1 [Toxoplasma gondii]
  misc_feature (1)..(60): Homolog of NCBI NO: 7441206 NR Description: ribosomal protein L37a
  misc_feature (1)..(63): Homolog of NCBI NO: 6093889 NR Description: 60S RIBOSOMAL PROTEIN L37A
  misc_feature (1)..(64): Homolog of NCBI NO: 11358898 NR Description: translation initiation factor eIF-4 gamma homolog
  misc_feature (1)..(63): Homolog of NCBI NO: 15228411 NR Description: putative 60S ribosomal protein L37a; protein id:
  misc_feature (1)..(63): Homolog of NCBI NO: 6831602 NR Description: 60S RIBOSOMAL PROTEIN L37A
  misc_feature (1)..(64): Homolog of NCBI NO: 6831607 NR Description: 60S ribosomal protein L37a
  misc_feature (1)..(63): Homolog of NCBI NO: 34911166 NR Description: putative 60S ribosomal protein L37a
  misc_feature (1)..(64): Homolog of NCBI NO: 1173045 NR Description: 60S RIBOSOMAL PROTEIN L37A
  misc_feature (1)..(64): Homolog of NCBI NO: 18411538 NR Description: Expressed protein

SEQ ID NO: 38524 - protein, 61 aa, Arabidopsis thaliana
  peptide (1)..(61): Ceres Seq. ID no. 12385623
SLGFLIYDGVVFLLPALKNGEENQEGWNRRQIRNTLSGSRLRRWRSASTASTSVSSVASTE

SEQ ID NO: 38525 - DNA, 578 bp, Arabidopsis thaliana
  misc_feature (1)..(578): Ceres Seq. ID no. 12423144
  misc_feature: MA Experiment ID: 108435 Result: Up-regulated in Transcription
  misc_feature: MA Experiment 108435 PARAMETER Experiment Name: At_stm_Mutants_cDNA_P Parameter: Plant Line Value: wt Landsburg vs stm
  misc_feature: MA Experiment 108435 PARAMETER Experiment Name: At_stm_Mutants_cDNA_P Parameter: Tissue Value: Shoot Apical Meristem Region
  misc_feature: MA Experiment ID: 108462 Result: Down-regulated in Transcription
  misc_feature: MA Experiment 108462 PARAMETER Experiment Name: At_Germinating_Seeds_cDNA_P Parameter: Age (day) Value: 2 vs. 0
  misc_feature: MA Experiment 108462 PARAMETER Experiment Name: At_Germinating_Seeds_cDNA_P Parameter: Tissue Value: Germinating Seeds
  misc_feature: MA Experiment ID: 108463 Result: Down-regulated in Transcription
  misc_feature: MA Experiment 108463 PARAMETER Experiment Name: At_Germinating_Seeds_cDNA_P Parameter: Age (day) Value: 3 vs. 0
  misc_feature: MA Experiment 108463 PARAMETER Experiment Name: At_Germinating_Seeds_cDNA_P Parameter: Tissue Value: Germinating Seeds
  misc_feature: MA Experiment ID: 108464 Result: Down-regulated in Transcription
  misc_feature: MA Experiment 108464 PARAMETER Experiment Name: At_Germinating_Seeds_cDNA_P Parameter: Age (day) Value: 4 vs. 0
  misc_feature: MA Experiment 108464 PARAMETER Experiment Name: At_Germinating_Seeds_cDNA_P Parameter: Tissue Value: Germinating Seeds
  misc_feature: MA Experiment ID: 20000113 Result: Up-regulated in Transcription
  misc_feature: MA Experiment 20000113 PARAMETER Experiment Name: At_42deg_Heat_cDNA_P Parameter: Temperature (deg C) Value: 42 vs. 22
  misc_feature: MA Experiment 20000113 PARAMETER Experiment Name: At_42deg_Heat_cDNA_P Parameter: Timepoint (hr) Value: 8
  misc_feature: MA Experiment 20000113 PARAMETER Experiment Name: At_42deg_Heat_cDNA_P Parameter: Tissue Value: Aerial
caagttgatgcagagtttcaaatctaaggaatatgtgagagagacctttgcttggatgcattactactggttcctcacaaatgaaggtattgactttcttaggacttaccttaatctcccatctgagattgttcctgctactctgaagaagcaacagaagcctcttggtcgaccttttggaggtggtggtgaccgtccccgtggccctcctcgtggtgatggagagaggaggtttggtgacagagatggataccgtggaggtcctaaatcaggtggagagtatggtgacaaggctggagcacctgctgattaccagcctggcttcaggggtggagctagtggagcaaggcaagggtttggtcgtggagctggtcgttttggtggtggtgctggtccagctgctggatctgatctaccttgaaaaggactttcttgtttctttttggtcttatttaaggttacatagcaccttattgagaacgaatgtgtcttttggaactttgtttctttctcttaaaccatttcacaatatgattgtttttttacgttagaattttatgaagaaatgttggatcgtt

SEQ ID NO: 38526 - protein, 139 aa, Arabidopsis thaliana
  peptide (1)..(139): Ceres Seq. ID no. 12423145
  misc_feature (1)..(55): Pfam Name: Plectin/S10 domain Pfam Description: Plectin/S10 domain
  misc_feature (1)..(125): Homolog of NCBI NO: 32967647 NR Description: Ribosomal protein S10 [Danio rerio]
  misc_feature (1)..(124): Homolog of NCBI NO: 24266976 NR Description: ribosomal protein S10 [Branchiostoma belcheri]
  misc_feature (1)..(125): Homolog of NCBI NO: 585934 NR Description: 40S RIBOSOMAL PROTEIN S10
  misc_feature (1)..(130): Homolog of NCBI NO: 34905824 NR Description: putative ribosomal protein S10
  misc_feature (1)..(136): Homolog of NCBI NO: 20140213 NR Description: 40S ribosomal protein S10
  misc_feature (1)..(136): Homolog of NCBI NO: 34897532 NR Description: OSJNBa0042L16.3 [Oryza sativa (japonica
  misc_feature (1)..(139): Homolog of NCBI NO: 15237217 NR Description: putative protein
  misc_feature (1)..(139): Homolog of NCBI NO: 20139798 NR Description: 40S ribosomal protein S10-3
  misc_feature (1)..(139): Homolog of NCBI NO: 15235985 NR Description: putative ribosomal protein S10
  misc_feature (1)..(139): Homolog of NCBI NO: 15238099 NR Description: putative protein
KLMQSFKSKEYVRETFAWMHYYWFLTNEGIDFLRTYLNLPSEIVPATLKKQQKPLGRPFGGGGDRPRGPPRGDGERRFGDRDGYRGGPKSGGEYGDKAGAPADYQPGFRGGASGARQGFGRGAGRFGGGAGPAAGSDLP

SEQ ID NO: 38527 - protein, 137 aa, Arabidopsis thaliana
  peptide (1)..(137): Ceres Seq. ID no. 12423146
  misc_feature (1)..(53): Pfam Name: Plectin/S10 domain Pfam Description: Plectin/S10 domain
  misc_feature (1)..(123): Homolog of NCBI NO: 32967647 NR Description: Ribosomal protein S10 [Danio rerio]
  misc_feature (1)..(122): Homolog of NCBI NO: 24266976 NR Description: ribosomal protein S10 [Branchiostoma belcheri]
  misc_feature (1)..(123): Homolog of NCBI NO: 585934 NR Description: 40S RIBOSOMAL PROTEIN S10
  misc_feature (1)..(128): Homolog of NCBI NO: 34905824 NR Description: putative ribosomal protein S10
  misc_feature (1)..(134): Homolog of NCBI NO: 20140213 NR Description: 40S ribosomal protein S10
  misc_feature (1)..(134): Homolog of NCBI NO: 34897532 NR Description: OSJNBa0042L16.3 [Oryza sativa (japonica
  misc_feature (1)..(137): Homolog of NCBI NO: 15237217 NR Description: putative protein
  misc_feature (1)..(137): Homolog of NCBI NO: 20139798 NR Description: 40S ribosomal protein S10-3
  misc_feature (1)..(137): Homolog of NCBI NO: 15235985 NR Description: putative ribosomal protein S10
  misc_feature (1)..(137): Homolog of NCBI NO: 15238099 NR Description: putative protein
MQSFKSKEYVRETFAWMHYYWFLTNEGIDFLRTYLNLPSEIVPATLKKQQKPLGRPFGGGGDRPRGPPRGDGERRFGDRDGYRGGPKSGGEYGDKAGAPADYQPGFRGGASGARQGFGRGAGRFGGGAGPAAGSDLP

SEQ ID NO: 38528 - protein, 121 aa, Arabidopsis thaliana
  peptide (1)..(121): Ceres Seq. ID no. 12423147
  misc_feature (1)..(107): Homolog of NCBI NO: 32967647 NR Description: Ribosomal protein S10 [Danio rerio]
  misc_feature (1)..(106): Homolog of NCBI NO: 24266976 NR Description: ribosomal protein S10 [Branchiostoma belcheri]
  misc_feature (1)..(107): Homolog of NCBI NO: 585934 NR Description: 40S RIBOSOMAL PROTEIN S10
  misc_feature (1)..(112): Homolog of NCBI NO: 34905824 NR Description: putative ribosomal protein S10
  misc_feature (1)..(118): Homolog of NCBI NO: 20140213 NR Description: 40S ribosomal protein S10
  misc_feature (1)..(118): Homolog of NCBI NO: 34897532 NR Description: OSJNBa0042L16.3 [Oryza sativa (japonica
  misc_feature (1)..(121): Homolog of NCBI NO: 15237217 NR Description: putative protein
  misc_feature (1)..(121): Homolog of NCBI NO: 20139798 NR Description: 40S ribosomal protein S10-3
  misc_feature (1)..(121): Homolog of NCBI NO: 15235985 NR Description: putative ribosomal protein S10
  misc_feature (1)..(121): Homolog of NCBI NO: 15238099 NR Description: putative protein
MHYYWFLTNEGIDFLRTYLNLPSEIVPATLKKQQKPLGRPFGGGGDRPRGPPRGDGERRFGDRDGYRGGPKSGGEYGDKAGAPADYQPGFRGGASGARQGFGRGAGRFGGGAGPAAGSDLP

SEQ ID NO: 38529 - DNA, 1705 bp, Arabidopsis thaliana
  misc_feature (1)..(1705): Ceres Seq. ID no. 12396597
  misc_feature: MA Experiment ID: 108461 Result: Up-regulated in Transcription
  misc_feature: MA Experiment 108461 PARAMETER Experiment Name: At_Germinating_Seeds_cDNA_P Parameter: Age (day) Value: 1 vs. 0
  misc_feature: MA Experiment 108461 PARAMETER Experiment Name: At_Germinating_Seeds_cDNA_P Parameter: Tissue Value: Germinating Seeds
  misc_feature: MA Experiment ID: 108462 Result: Up-regulated in Transcription
  misc_feature: MA Experiment 108462 PARAMETER Experiment Name: At_Germinating_Seeds_cDNA_P Parameter: Age (day) Value: 2 vs. 0
  misc_feature: MA Experiment 108462 PARAMETER Experiment Name: At_Germinating_Seeds_cDNA_P Parameter: Tissue Value: Germinating Seeds
  misc_feature: MA Experiment ID: 108463 Result: Up-regulated in Transcription
  misc_feature: MA Experiment 108463 PARAMETER Experiment Name: At_Germinating_Seeds_cDNA_P Parameter: Age (day) Value: 3 vs. 0
  misc_feature: MA Experiment 108463 PARAMETER Experiment Name: At_Germinating_Seeds_cDNA_P Parameter: Tissue Value: Germinating Seeds
  misc_feature: MA Experiment ID: 108464 Result: Up-regulated in Transcription
  misc_feature: MA Experiment 108464 PARAMETER Experiment Name: At_Germinating_Seeds_cDNA_P Parameter: Age (day) Value: 4 vs. 0
  misc_feature: MA Experiment 108464 PARAMETER Experiment Name: At_Germinating_Seeds_cDNA_P Parameter: Tissue Value: Germinating Seeds
  misc_feature: MA Experiment ID: 108573 Result: Up-regulated in Transcription
  misc_feature: MA Experiment 108573 PARAMETER Experiment Name: At_Drought_cDNA_P Parameter: Timepoint (hr) Value: 6
  misc_feature: MA Experiment 108573 PARAMETER Experiment Name: At_Drought_cDNA_P Parameter: Tissue Value: Aerial
  misc_feature: MA Experiment 108573 PARAMETER Experiment Name: At_Drought_cDNA_P Parameter: Treatment Value: Drought vs. No Drought
  misc_feature: MA Experiment ID: 108595 Result: Down-regulated in Transcription
  misc_feature: MA Experiment 108595 PARAMETER Experiment Name: At_Ler-pi_Ovule_cDNA_P Parameter: Plant Line Value: null
  misc_feature: MA Experiment ID: 20000087 Result: Down-regulated in Transcription
  misc_feature: MA Experiment 20000087 PARAMETER Experiment Name: At_100uM_ABA_Mutants_cDNA_P Parameter: Plant Line Value: WS
  misc_feature: MA Experiment 20000087 PARAMETER Experiment Name: At_100uM_ABA_Mutants_cDNA_P Parameter: Timepoint (hr) Value: 6
  misc_feature: MA Experiment 20000087 PARAMETER Experiment Name: At_100uM_ABA_Mutants_cDNA_P Parameter: Tissue Value: Aerial
  misc_feature: MA Experiment 20000087 PARAMETER Experiment Name: At_100uM_ABA_Mutants_cDNA_P Parameter: Treatment Value: 100uM ABA vs. No Treatment
  misc_feature: MA Experiment ID: 20000090 Result: Down-regulated in Transcription
  misc_feature: MA Experiment ID: 20000794 Result: Up-regulated in Transcription
  misc_feature: MA Experiment 20000794 PARAMETER Experiment Name: At_Petals_P Parameter: Age (day) Value: 23-25 days
  misc_feature: MA Experiment 20000794 PARAMETER Experiment Name: At_Petals_P Parameter: Plant Line Value: WS
  misc_feature: MA Experiment 20000794 PARAMETER Experiment Name: At_Petals_P Parameter: Tissue Value: Petals vs. Whole plant
atacacacaattcaatatttgacttcacatagagagagatagagagatggcgacggaaacggaagttgtagctccggtaacggtaagcaacggcggaagcaaaggatgttgcaagtacggtggtcctggttacgcgactcctctcgccgctatgtctggtccatcggagaaacttatctacgtaaccgccgtctacaccggaactggaatagataaaccggattatttggcgacggtggatgtagatccaagctcgccttcgtattcaagtgttattcatagattaccaatgccttttgttggtgatgagcttcatcattctggttggaactcttgtagttcttgccatggtgatgcttctgttgatagacgttatctcgtgttaccgtctcttatatctggtcgcatttatgcgattgatactaaggaaaacccgagggctccgtctttgtataagtatgttgatcctaaagagattgctgataagactggattggcgtttcctcacacggctcattgcctcgccacgggcgagatcttggtgtcctgtcttggagatgaagaggggaatgctaaggggaatgggtttcttcttcttgactctgattttaacatcaagaataggtgggagaaancaggacatagtcctttgtatgggtatgatgttctagatgtttttggtaccaacctcggcacaagaccatgatcagcacatcttggggagcacctaaagccttctctaaaggtttcaatcttcagcacgttgctgatggcttgtatggaagtcatctacatgtttatagttggccaggaggtgaaatgaaacaattaattgaccttggaccgactggtctcttacctttggagattagattcttgcatgatccatctaaagatacagggtttgttgggagtgccttgtcgagtaatatgataagatttttcaagaacagtgatgaaacatggagccatgaggttgttatatcggttaaaccgttgaaagtcgaaaactggatacttccagaaatgccggggctaatcaccgacttcttgatctccctcgatgaccgatttatttactttgtgaactggctccatggagacattcgtcagtacaacatagaggaccctaaaaaccctgtattaacagggcaaatttgggttggaggattactacaaaagggcagtcctgttaaggcggttggagaagacggaaacactttccagttcgaggttcctcagatcaaggggaaatctttacgaggtggacctcaaatgattcagctgagcctcgatgggaaacgattgtatgcaacaaactcgctgtttagcgcatgggatcgtcagttttatcctgaaatcatggagaaaggctcacacataattcagattgatgttgatacagaaaaaggtggtctcaccataaaccctgatttctttgtggactttggtgatgaaccagacggtccttcactagcccacgagatgagatatccaggtggagactgcacttccgatatctggatttgaatttggctttgtttagagtgtgttttgtgttaagtttaaattgagttttattatttgttgtgtgtttagtagagttgaataaaaaagggagtaagatgactcagacaattaacacttgtttgtacattttgactcctatgtgtcttaagtaataaaactttctacaattcgactg

SEQ ID NO: 38530 - protein, 275 aa, Arabidopsis thaliana
  peptide (1)..(275): Ceres Seq. ID no. 12396598
  misc_feature (1)..(275): Pfam Name: 56kDa selenium binding protein (SBP56) Pfam Description: 56kDa selenium binding protein (SBP56)
  misc_feature (1)..(275): Homolog of NCBI NO: 15229520 NR Description: selenium binding protein, putative; protein id:
  misc_feature (1)..(275): Homolog of NCBI NO: 15485716 NR Description: selenium binding protein [Lotus japonicus]
  misc_feature (1)..(275): Homolog of NCBI NO: 20340239 NR Description: putative selenium-binding protein [Thellungiella
  misc_feature (1)..(275): Homolog of NCBI NO: 15485720 NR Description: selenium binding protein [Medicago sativa]
  misc_feature (1)..(275): Homolog of NCBI NO: 25348077 NR Description: selenium-binding protein like [imported] -
  misc_feature (1)..(275): Homolog of NCBI NO: 22530900 NR Description: selenium-binding protein-like protein
  misc_feature (1)..(275): Homolog of NCBI NO: 13605825 NR Description: AT4g14040/dl3061c [Arabidopsis thaliana]
  misc_feature (1)..(275): Homolog of NCBI NO: 15236386 NR Description: selenium-binding protein like
  misc_feature (1)..(275): Homolog of NCBI NO: 15485232 NR Description: selenium binding protein [Arabidopsis thaliana]
  misc_feature (1)..(275): Homolog of NCBI NO: 15236385 NR Description: selenium-binding protein like
MISTSWGAPKAFSKGFNLQHVADGLYGSHLHVYSWPGGEMKQLIDLGPTGLLPLEIRFLHDPSKDTGFVGSALSSNMIRFFKNSDETWSHEVVISVKPLKVENWILPEMPGLITDFLISLDDRFIYFVNWLHGDIRQYNIEDPKNPVLTGQIWVGGLLQKGSPVKAVGEDGNTFQFEVPQIKGKSLRGGPQMIQLSLDGKRLYATNSLFSAWDRQFYPEIMEKGSHIIQIDVDTEKGGLTINPDFFVDFGDEPDGPSLAHEMRYPGGDCTSDIWI

SEQ ID NO: 38531 - protein, 236 aa, Arabidopsis thaliana
  peptide (1)..(236): Ceres Seq. ID no. 12396599
  misc_feature (1)..(236): Pfam Name: 56kDa selenium binding protein (SBP56) Pfam Description: 56kDa selenium binding protein (SBP56)
  misc_feature (1)..(236): Homolog of NCBI NO: 15229520 NR Description: selenium binding protein, putative; protein id:
  misc_feature (1)..(236): Homolog of NCBI NO: 15485716 NR Description: selenium binding protein [Lotus japonicus]
  misc_feature (1)..(236): Homolog of NCBI NO: 20340239 NR Description: putative selenium-binding protein [Thellungiella
  misc_feature (1)..(236): Homolog of NCBI NO: 15485720 NR Description: selenium binding protein [Medicago sativa]
  misc_feature (1)..(236): Homolog of NCBI NO: 25348077 NR Description: selenium-binding protein like [imported] -
  misc_feature (1)..(236): Homolog of NCBI NO: 22530900 NR Description: selenium-binding protein-like protein
  misc_feature (1)..(236): Homolog of NCBI NO: 13605825 NR Description: AT4g14040/dl3061c [Arabidopsis thaliana]
  misc_feature (1)..(236): Homolog of NCBI NO: 15236386 NR Description: selenium-binding protein like
  misc_feature (1)..(236): Homolog of NCBI NO: 15485232 NR Description: selenium binding protein [Arabidopsis thaliana]
  misc_feature (1)..(236): Homolog of NCBI NO: 15236385 NR Description: selenium-binding protein like
MKQLIDLGPTGLLPLEIRFLHDPSKDTGFVGSALSSNMIRFFKNSDETWSHEVVISVKPLKVENWILPEMPGLITDFLISLDDRFIYFVNWLHGDIRQYNIEDPKNPVLTGQIWVGGLLQKGSPVKAVGEDGNTFQFEVPQIKGKSLRGGPQMIQLSLDGKRLYATNSLFSAWDRQFYPEIMEKGSHIIQIDVDTEKGGLTINPDFFVDFGDEPDGPSLAHEMRYPGGDCTSDIWI

SEQ ID NO: 38532 - protein, 219 aa, Arabidopsis thaliana
  peptide (1)..(219): Ceres Seq. ID no. 12396600
  misc_feature (22)..(206): Pfam Name: 56kDa selenium binding protein (SBP56) Pfam Description: 56kDa selenium binding protein (SBP56)
  misc_feature (15)..(206): Homolog of NCBI NO: 15229520 NR Description: selenium binding protein, putative; protein id:
  misc_feature (20)..(206): Homolog of NCBI NO: 15485716 NR Description: selenium binding protein [Lotus japonicus]
  misc_feature (82)..(206): Homolog of NCBI NO: 20340239 NR Description: putative selenium-binding protein [Thellungiella
  misc_feature (9)..(206): Homolog of NCBI NO: 15485720 NR Description: selenium binding protein [Medicago sativa]
  misc_feature (1)..(206): Homolog of NCBI NO: 25348077 NR Description: selenium-binding protein like [imported] -
  misc_feature (1)..(206): Homolog of NCBI NO: 22530900 NR Description: selenium-binding protein-like protein
  misc_feature (5)..(206): Homolog of NCBI NO: 13605825 NR Description: AT4g14040/dl3061c [Arabidopsis thaliana]
  misc_feature (1)..(206): Homolog of NCBI NO: 15236386 NR Description: selenium-binding protein like
  misc_feature (25)..(205): Homolog of NCBI NO: 15485232 NR Description: selenium binding protein [Arabidopsis thaliana]
  misc_feature (1)..(206): Homolog of NCBI NO: 15236385 NR Description: selenium-binding protein like
  misc_feature (197)..(197): Xaa is any aa, unknown or other
MATETEVVAPVTVSNGGSKGCCKYGGPGYATPLAAMSGPSEKLIYVTAVYTGTGIDKPDYLATVDVDPSSPSYSSVIHRLPMPFVGDELHHSGWNSCSSCHGDASVDRRYLVLPSLISGRIYAIDTKENPRAPSLYKYVDPKEIADKTGLAFPHTAHCLATGEILVSCLGDEEGNAKGNGFLLLDSDFNIKNRWEKXGHSPLYGYDVLDVFGTNLGTRP

SEQ ID NO: 38533 - DNA, 847 bp, Arabidopsis thaliana
  misc_feature (1)..(847): Ceres Seq. ID no. 13487178
  misc_feature: MA Experiment ID: 108462 Result: Down-regulated in Transcription
  misc_feature: MA Experiment 108462 PARAMETER Experiment Name: At_Germinating_Seeds_cDNA_P Parameter: Age (day) Value: 2 vs. 0
  misc_feature: MA Experiment 108462 PARAMETER Experiment Name: At_Germinating_Seeds_cDNA_P Parameter: Tissue Value: Germinating Seeds
  misc_feature: MA Experiment ID: 108464 Result: Down-regulated in Transcription
  misc_feature: MA Experiment 108464 PARAMETER Experiment Name: At_Germinating_Seeds_cDNA_P Parameter: Age (day) Value: 4 vs. 0
  misc_feature: MA Experiment 108464 PARAMETER Experiment Name: At_Germinating_Seeds_cDNA_P Parameter: Tissue Value: Germinating Seeds
  misc_feature: MA Experiment ID: 108573 Result: Up-regulated in Transcription
  misc_feature: MA Experiment 108573 PARAMETER Experiment Name: At_Drought_cDNA_P Parameter: Timepoint (hr) Value: 6
  misc_feature: MA Experiment 108573 PARAMETER Experiment Name: At_Drought_cDNA_P Parameter: Tissue Value: Aerial
  misc_feature: MA Experiment 108573 PARAMETER Experiment Name: At_Drought_cDNA_P Parameter: Treatment Value: Drought vs. No Drought
  misc_feature: MA Experiment ID: 108668 Result: Down-regulated in Transcription
  misc_feature: MA Experiment 108668 PARAMETER Experiment Name: At_2mM_SA_cDNA_P Parameter: Plant Line Value: WS
  misc_feature: MA Experiment 108668 PARAMETER Experiment Name: At_2mM_SA_cDNA_P Parameter: Timepoint (hr) Value: 6
  misc_feature: MA Experiment 108668 PARAMETER Experiment Name: At_2mM_SA_cDNA_P Parameter: Treatment Value: 2mM SA vs. No Treatment
  misc_feature: MA Experiment ID: 20000111 Result: Up-regulated in Transcription
  misc_feature: MA Experiment 20000111 PARAMETER Experiment Name: At_42deg_Heat_cDNA_P Parameter: Temperature (deg C) Value: 42 vs. 22
  misc_feature: MA Experiment 20000111 PARAMETER Experiment Name: At_42deg_Heat_cDNA_P Parameter: Timepoint (hr) Value: 6
  misc_feature: MA Experiment 20000111 PARAMETER Experiment Name: At_42deg_Heat_cDNA_P Parameter: Tissue Value: Aerial
  misc_feature: MA Experiment ID: 20000180 Result: Down-regulated in Transcription
  misc_feature: MA Experiment 20000180 PARAMETER Experiment Name: At_Germinating_Seeds_P Parameter: Age (hr) Value: 24 vs. 0
  misc_feature: MA Experiment 20000180 PARAMETER Experiment Name: At_Germinating_Seeds_P Parameter: Tissue Value: Germinating Seeds
  misc_feature: MA Experiment ID: 20000227 Result: Down-regulated in Transcription
  misc_feature: MA Experiment 20000227 PARAMETER Experiment Name: At_Root-Tips-vs-Tops_P Parameter: Tissue Value: Root Tips vs. Root Tops
  misc_feature: MA Experiment ID: 20000234 Result: Up-regulated in Transcription
  misc_feature: MA Experiment 20000234 PARAMETER Experiment Name: At_Siliques_P Parameter: Age (day) Value: 21
  misc_feature: MA Experiment 20000234 PARAMETER Experiment Name: At_Siliques_P Parameter: Organism Value: A. thaliana
  misc_feature: MA Experiment 20000234 PARAMETER Experiment Name: At_Siliques_P Parameter: Plant Line Value: WS
  misc_feature: MA Experiment 20000234 PARAMETER Experiment Name: At_Siliques_P Parameter: Tissue Value: Less Than 5mm Siliques vs. Whole Plant
  misc_feature: MA Experiment ID: 20000264 Result: Up-regulated in Transcription
  misc_feature: MA Experiment 20000264 PARAMETER Experiment Name: At_Open_Flower_P Parameter: Age (day) Value: 21
  misc_feature: MA Experiment 20000264 PARAMETER Experiment Name: At_Open_Flower_P Parameter: Plant Line Value: WS
  misc_feature: MA Experiment 20000264 PARAMETER Experiment Name: At_Open_Flower_P Parameter: Tissue Value: Open Flower vs. Whole Plant
  misc_feature: MA Experiment ID: 20000265 Result: Up-regulated in Transcription
  misc_feature: MA Experiment 20000265 PARAMETER Experiment Name: At_Open_Flower_P Parameter: Age (day) Value: 21
  misc_feature: MA Experiment 20000265 PARAMETER Experiment Name: At_Open_Flower_P Parameter: Plant Line Value: WS
  misc_feature: MA Experiment 20000265 PARAMETER Experiment Name: At_Open_Flower_P Parameter: Tissue Value: Closed Flower vs. Whole Plant
  misc_feature: MA Experiment ID: 20000286 Result: Up-regulated in Transcription
  misc_feature: MA Experiment 20000286 PARAMETER Experiment Name: At_Open_Flower_P Parameter: Age (day) Value: 21
  misc_feature: MA Experiment 20000286 PARAMETER Experiment Name: At_Open_Flower_P Parameter: Plant Line Value: WS
  misc_feature: MA Experiment 20000286 PARAMETER Experiment Name: At_Open_Flower_P Parameter: Tissue Value: Half Open vs. Whole Plant
  misc_feature: MA Experiment ID: 20000436 Result: Up-regulated in Transcription
  misc_feature: MA Experiment 20000436 PARAMETER Experiment Name: At_Drought_P Parameter: Age (day) Value: 7
  misc_feature: MA Experiment 20000436 PARAMETER Experiment Name: At_Drought_P Parameter: Organism Value: A. thaliana
  misc_feature: MA Experiment 20000436 PARAMETER Experiment Name: At_Drought_P Parameter: Plant Line Value: WS
  misc_feature: MA Experiment 20000436 PARAMETER Experiment Name: At_Drought_P Parameter: Timepoint (hr) Value: 12
  misc_feature: MA Experiment 20000436 PARAMETER Experiment Name: At_Drought_P Parameter: Tissue Value: Whole Plant
  misc_feature: MA Experiment 20000436 PARAMETER Experiment Name: At_Drought_P Parameter: Treatment Value: Drought vs. No Drought
  misc_feature: MA Experiment ID: 20000437 Result: Up-regulated in Transcription
  misc_feature: MA Experiment 20000437 PARAMETER Experiment Name: At_Drought_P Parameter: Age (day) Value: 8
  misc_feature: MA Experiment 20000437 PARAMETER Experiment Name: At_Drought_P Parameter: Organism Value: A. thaliana
  misc_feature: MA Experiment 20000437 PARAMETER Experiment Name: At_Drought_P Parameter: Plant Line Value: WS
  misc_feature: MA Experiment 20000437 PARAMETER Experiment Name: At_Drought_P Parameter: Timepoint (hr) Value: 24
  misc_feature: MA Experiment 20000437 PARAMETER Experiment Name: At_Drought_P Parameter: Tissue Value: Whole Plant
  misc_feature: MA Experiment 20000437 PARAMETER Experiment Name: At_Drought_P Parameter: Treatment Value: Drought vs. No Drought
  misc_feature: MA Experiment ID: 20000495 Result: Up-regulated in Transcription
  misc_feature: MA Experiment 20000495 PARAMETER Experiment Name: At_Guard_Cells_P Parameter: Harvest Date Value: 8/2/2002
  misc_feature: MA Experiment 20000495 PARAMETER Experiment Name: At_Guard_Cells_P Parameter: Organism Value: A. thaliana
  misc_feature: MA Experiment 20000495 PARAMETER Experiment Name: At_Guard_Cells_P Parameter: Tissue Value: Guard Cells vs. Leaves
  misc_feature: MA Experiment ID: 20001450 Result: Down-regulated in Transcription
  misc_feature: MA Experiment 20001450 PARAMETER Experiment Name: At_Far-red-induction_P Parameter: Age (day) Value: 7
  misc_feature: MA Experiment 20001450 PARAMETER Experiment Name: At_Far-red-induction_P Parameter: Light Value: Far-red vs. White
  misc_feature: MA Experiment 20001450 PARAMETER Experiment Name: At_Far-red-induction_P Parameter: Organism Value: A. thaliana
  misc_feature: MA Experiment 20001450 PARAMETER Experiment Name: At_Far-red-induction_P Parameter: Plant Line Value: Columbia
  misc_feature: MA Experiment 20001450 PARAMETER Experiment Name: At_Far-red-induction_P Parameter: Timepoint (hr) Value: 8
  misc_feature: MA Experiment 20001450 PARAMETER Experiment Name: At_Far-red-induction_P Parameter: Tissue Value: Whole Plant
  misc_feature: MA Experiment ID: 20001556 Result: Up-regulated in Transcription
  misc_feature: MA Experiment 20001556 PARAMETER Experiment Name: At_Drought_Soil_Dry_P Parameter: Age (day) Value: 26
  misc_feature: MA Experiment 20001556 PARAMETER Experiment Name: At_Drought_Soil_Dry_P Parameter: Organism Value: A. thaliana
  misc_feature: MA Experiment 20001556 PARAMETER Experiment Name: At_Drought_Soil_Dry_P Parameter: Plant Line Value: WS
  misc_feature: MA Experiment 20001556 PARAMETER Experiment Name: At_Drought_Soil_Dry_P Parameter: Post Timepoint (hr) Value: None
  misc_feature: MA Experiment 20001556 PARAMETER Experiment Name: At_Drought_Soil_Dry_P Parameter: Post-Treatment Value: None
  misc_feature: MA Experiment 20001556 PARAMETER Experiment Name: At_Drought_Soil_Dry_P Parameter: Timepoint (day) Value: 12
  misc_feature: MA Experiment 20001556 PARAMETER Experiment Name: At_Drought_Soil_Dry_P Parameter: Treatment Value: Drought vs. No Drought
  misc_feature: MA Experiment ID: 20001559 Result: Up-regulated in Transcription
  misc_feature: MA Experiment 20001559 PARAMETER Experiment Name: At_Drought_Soil_Dry_P Parameter: Age (day) Value: 28
  misc_feature: MA Experiment 20001559 PARAMETER Experiment Name: At_Drought_Soil_Dry_P Parameter: Organism Value: A. thaliana
  misc_feature: MA Experiment 20001559 PARAMETER Experiment Name: At_Drought_Soil_Dry_P Parameter: Plant Line Value: WS
  misc_feature: MA Experiment 20001559 PARAMETER Experiment Name: At_Drought_Soil_Dry_P Parameter: Post Timepoint (hr) Value: 29
  misc_feature: MA Experiment 20001559 PARAMETER Experiment Name: At_Drought_Soil_Dry_P Parameter: Post-Treatment Value: Re-Water vs. No Drought
  misc_feature: MA Experiment 20001559 PARAMETER Experiment Name: At_Drought_Soil_Dry_P Parameter: Timepoint (day) Value: 14
  misc_feature: MA Experiment 20001559 PARAMETER Experiment Name: At_Drought_Soil_Dry_P Parameter: Treatment Value: Drought vs. No Drought
  misc_feature: MA Experiment ID: 20001560 Result: Up-regulated in Transcription
  misc_feature: MA Experiment 20001560 PARAMETER Experiment Name: At_Drought_Soil_Dry_P Parameter: Age (day) Value: 28
  misc_feature: MA Experiment 20001560 PARAMETER Experiment Name: At_Drought_Soil_Dry_P Parameter: Organism Value: A. thaliana
  misc_feature: MA Experiment 20001560 PARAMETER Experiment Name: At_Drought_Soil_Dry_P Parameter: Plant Line Value: WS
  misc_feature: MA Experiment 20001560 PARAMETER Experiment Name: At_Drought_Soil_Dry_P Parameter: Post Timepoint (hr) Value: None
  misc_feature: MA Experiment 20001560 PARAMETER Experiment Name: At_Drought_Soil_Dry_P Parameter: Post-Treatment Value: None
  misc_feature: MA Experiment 20001560 PARAMETER Experiment Name: At_Drought_Soil_Dry_P Parameter: Timepoint (day) Value: 14
  misc_feature: MA Experiment 20001560 PARAMETER Experiment Name: At_Drought_Soil_Dry_P Parameter: Treatment Value: Drought vs. No Drought
  misc_feature: MA Experiment ID: 20001904 Result: Up-regulated in Transcription
  misc_feature: MA Experiment 20001904 PARAMETER Experiment Name: At_Drought_Reproduction_P Parameter: Age (day) Value: 37
  misc_feature: MA Experiment 20001904 PARAMETER Experiment Name: At_Drought_Reproduction_P Parameter: Organism Value: A. thaliana
  misc_feature: MA Experiment 20001904 PARAMETER Experiment Name: At_Drought_Reproduction_P Parameter: Plant Line Value: WS
  misc_feature: MA Experiment 20001904 PARAMETER Experiment Name: At_Drought_Reproduction_P Parameter: Timepoint (day) Value: 7
  misc_feature: MA Experiment 20001904 PARAMETER Experiment Name: At_Drought_Reproduction_P Parameter: Tissue Value: Rosettes
  misc_feature: MA Experiment 20001904 PARAMETER Experiment Name: At_Drought_Reproduction_P Parameter: Treatment Value: Drought vs. No Drought
  misc_feature: MA Experiment ID: 20001905 Result: Up-regulated in Transcription
  misc_feature: MA Experiment 20001905 PARAMETER Experiment Name: At_Drought_Reproduction_P Parameter: Age (day) Value: 40
  misc_feature: MA Experiment 20001905 PARAMETER Experiment Name: At_Drought_Reproduction_P Parameter: Organism Value: A. thaliana
  misc_feature: MA Experiment 20001905 PARAMETER Experiment Name: At_Drought_Reproduction_P Parameter: Plant Line Value: WS
  misc_feature: MA Experiment 20001905 PARAMETER Experiment Name: At_Drought_Reproduction_P Parameter: Timepoint (day) Value: 10
  misc_feature: MA Experiment 20001905 PARAMETER Experiment Name: At_Drought_Reproduction_P Parameter: Tissue Value: Rosettes
  misc_feature: MA Experiment 20001905 PARAMETER Experiment Name: At_Drought_Reproduction_P Parameter: Treatment Value: Drought vs. No Drought
  misc_feature: MA Experiment ID: 20001911 Result: Up-regulated in Transcription
  misc_feature: MA Experiment 20001911 PARAMETER Experiment Name: At_Drought_Reproduction_P Parameter: Age (day) Value: 40
  misc_feature: MA Experiment 20001911 PARAMETER Experiment Name: At_Drought_Reproduction_P Parameter: Organism Value: A. thaliana
  misc_feature: MA Experiment 20001911 PARAMETER Experiment Name: At_Drought_Reproduction_P Parameter: Plant Line Value: WS
  misc_feature: MA Experiment 20001911 PARAMETER Experiment Name: At_Drought_Reproduction_P Parameter: Timepoint (day) Value: 10
  misc_feature: MA Experiment 20001911 PARAMETER Experiment Name: At_Drought_Reproduction_P Parameter: Tissue Value: Flowers
  misc_feature: MA Experiment 20001911 PARAMETER Experiment Name: At_Drought_Reproduction_P Parameter: Treatment Value: Drought vs. No Drought
ctcattttccaccattaaaaaacctctctactctctcctcaaaaactcaaaagagcaaaaaaaagagaagaagaatcaaaatcccacacaatggcaacacactcttccttcaccgcaacaacacctctctttctcatcgttcttctatccctatcctccgtctcagttctcggcgcatctcaccaccacgcaacggcgccggctccgtctgtagactgttcgactctcatactcaacatggctgactgtttatccttcgtttcgagcggaggcacggtggcgaaaccggaaggtacatgttgctctggtcttaagacggtgcttaaagctgactctcagtgtctatgtgaagcgtttaagagcagtgcttctcttggagttactttgaatatcactaaggcttctactcttcccgccgcatgcaagcttcacgctccttctatcgctacttgtggattgtctgttgctccaagtactgctccaggtcttgctccaggagtagctgctgctggacctgagacagccggatttctagctccaaatccttcttcagggaacgatggatcttctttgattccgacctcgttcacaactgtactcagtgccgtactgttcgttttgttcttctctagtgcgtaaaaaaaaacctgaatcttttttcaccagctagatttggctgtatgaaattgattaatggtttttattagggttaatctatgtatgttttggagtgttctgtttttagaccatatcggtttctctattactagcgtttactcttttagtttatgttattactttgtctcacaacattggtccttttattcgatctatcgcttattcctcc

SEQ ID NO: 38534 - protein, 182 aa, Arabidopsis thaliana
  peptide (1)..(182): Ceres Seq. ID no. 13487179
  misc_feature (43)..(121): Pfam Name: Protease inhibitor/seed storage/LTP family Pfam Description: Protease inhibitor/seed storage/LTP family
  misc_feature (13)..(154): Homolog of NCBI NO: 15220327 NR Description: protease inhibitor/seed storage/lipid transfer
  misc_feature (7)..(131): Homolog of NCBI NO: 18415958 NR Description: lipid transfer protein family [Arabidopsis
  misc_feature (14)..(168): Homolog of NCBI NO: 30680828 NR Description: protease inhibitor/seed storage/lipid transfer
  misc_feature (14)..(181): Homolog of NCBI NO: 7487610 NR Description: hypothetical protein T3F12.2 - Arabidopsis
  misc_feature (7)..(174): Homolog of NCBI NO: 30682659 NR Description: lipid transfer protein family [Arabidopsis
  misc_feature (14)..(179): Homolog of NCBI NO: 27765012 NR Description: At2g13820 [Arabidopsis thaliana]
  misc_feature (14)..(179): Homolog of NCBI NO: 15225509 NR Description: protease inhibitor/seed storage/lipid transfer
  misc_feature (1)..(182): Homolog of NCBI NO: 10176956 NR Description: contains similarity to nonspecific lipid-transfer
  misc_feature (1)..(182): Homolog of NCBI NO: 21618136 NR Description: nonspecific lipid-transfer protein-like protein
  misc_feature (1)..(182): Homolog of NCBI NO: 18424785 NR Description: protease inhibitor/seed storage/lipid transfer
MATHSSFTATTPLFLIVLLSLSSVSVLGASHHHATAPAPSVDCSTLILNMADCLSFVSSGGTVAKPEGTCCSGLKTVLKADSQCLCEAFKSSASLGVTLNITKASTLPAACKLHAPSIATCGLSVAPSTAPGLAPGVAAAGPETAGFLAPNPSSGNDGSSLIPTSFTTVLSAVLFVLFFSSA

SEQ ID NO: 38535 - protein, 133 aa, Arabidopsis thaliana
  peptide (1)..(133): Ceres Seq. ID no. 13487180
  misc_feature (1)..(72): Pfam Name: Protease inhibitor/seed storage/LTP family Pfam Description: Protease inhibitor/seed storage/LTP family
  misc_feature (1)..(105): Homolog of NCBI NO: 15220327 NR Description: protease inhibitor/seed storage/lipid transfer
  misc_feature (1)..(82): Homolog of NCBI NO: 18415958 NR Description: lipid transfer protein family [Arabidopsis
  misc_feature (1)..(119): Homolog of NCBI NO: 30680828 NR Description: protease inhibitor/seed storage/lipid transfer
  misc_feature (1)..(132): Homolog of NCBI NO: 7487610 NR Description: hypothetical protein T3F12.2 - Arabidopsis
  misc_feature (1)..(125): Homolog of NCBI NO: 30682659 NR Description: lipid transfer protein family [Arabidopsis
  misc_feature (1)..(130): Homolog of NCBI NO: 27765012 NR Description: At2g13820 [Arabidopsis thaliana]
  misc_feature (1)..(130): Homolog of NCBI NO: 15225509 NR Description: protease inhibitor/seed storage/lipid transfer
  misc_feature (1)..(133): Homolog of NCBI NO: 10176956 NR Description: contains similarity to nonspecific lipid-transfer
  misc_feature (1)..(133): Homolog of NCBI NO: 21618136 NR Description: nonspecific lipid-transfer protein-like protein
  misc_feature (1)..(133): Homolog of NCBI NO: 18424785 NR Description: protease inhibitor/seed storage/lipid transfer
MADCLSFVSSGGTVAKPEGTCCSGLKTVLKADSQCLCEAFKSSASLGVTLNITKASTLPAACKLHAPSIATCGLSVAPSTAPGLAPGVAAAGPETAGFLAPNPSSGNDGSSLIPTSFTTVLSAVLFVLFFSSA

SEQ ID NO: 38536 - DNA, 486 bp, Arabidopsis thaliana
  misc_feature (1)..(486): Ceres Seq. ID no. 12323140
  misc_feature: MA Experiment ID: 20000180 Result: Up-regulated in Transcription
  misc_feature: MA Experiment 20000180 PARAMETER Experiment Name: At_Germinating_Seeds_P Parameter: Age (hr) Value: 24 vs. 0
  misc_feature: MA Experiment 20000180 PARAMETER Experiment Name: At_Germinating_Seeds_P Parameter: Tissue Value: Germinating Seeds
  misc_feature: MA Experiment ID: 20000439 Result: Up-regulated in Transcription
  misc_feature: MA Experiment 20000439 PARAMETER Experiment Name: At_Roots__P Parameter: Age (day) Value: 14 vs. 21
  misc_feature: MA Experiment 20000439 PARAMETER Experiment Name: At_Roots__P Parameter: Organism Value: A. thaliana
  misc_feature: MA Experiment 20000439 PARAMETER Experiment Name: At_Roots__P Parameter: Tissue Value: Roots vs. Whole Plant
  misc_feature: MA Experiment ID: 20000527 Result: Down-regulated in Transcription
  misc_feature: MA Experiment 20000527 PARAMETER Experiment Name: At_10percent_PEG_P Parameter: Age (day) Value: 20
  misc_feature: MA Experiment 20000527 PARAMETER Experiment Name: At_10percent_PEG_P Parameter: Organism Value: A. thaliana
  misc_feature: MA Experiment 20000527 PARAMETER Experiment Name: At_10percent_PEG_P Parameter: Plant Line Value: WS
  misc_feature: MA Experiment 20000527 PARAMETER Experiment Name: At_10percent_PEG_P Parameter: Timepoint (day) Value: 20
  misc_feature: MA Experiment 20000527 PARAMETER Experiment Name: At_10percent_PEG_P Parameter: Tissue Value: Whole Plant
  misc_feature: MA Experiment 20000527 PARAMETER Experiment Name: At_10percent_PEG_P Parameter: Treatment Value: 10percent PEG vs. No Treatment
  misc_feature: MA Experiment ID: 20001451 Result: Up-regulated in Transcription
  misc_feature: MA Experiment 20001451 PARAMETER Experiment Name: At_Far-red-induction_P Parameter: Age (day) Value: 7
  misc_feature: MA Experiment 20001451 PARAMETER Experiment Name: At_Far-red-induction_P Parameter: Light Value: Far-red vs. White
  misc_feature: MA Experiment 20001451 PARAMETER Experiment Name: At_Far-red-induction_P Parameter: Organism Value: A. thaliana
  misc_feature: MA Experiment 20001451 PARAMETER Experiment Name: At_Far-red-induction_P Parameter: Plant Line Value: Columbia
  misc_feature: MA Experiment 20001451 PARAMETER Experiment Name: At_Far-red-induction_P Parameter: Timepoint (hr) Value: 24
  misc_feature: MA Experiment 20001451 PARAMETER Experiment Name: At_Far-red-induction_P Parameter: Tissue Value: Whole Plant
  misc_feature: MA Experiment ID: 20001557 Result: Up-regulated in Transcription
  misc_feature: MA Experiment 20001557 PARAMETER Experiment Name: At_Drought_Soil_Dry_P Parameter: Age (day) Value: 27
  misc_feature: MA Experiment 20001557 PARAMETER Experiment Name: At_Drought_Soil_Dry_P Parameter: Organism Value: A. thaliana
  misc_feature: MA Experiment 20001557 PARAMETER Experiment Name: At_Drought_Soil_Dry_P Parameter: Plant Line Value: WS
  misc_feature: MA Experiment 20001557 PARAMETER Experiment Name: At_Drought_Soil_Dry_P Parameter: Post Timepoint (hr) Value: 3
  misc_feature: MA Experiment 20001557 PARAMETER Experiment Name: At_Drought_Soil_Dry_P Parameter: Post-Treatment Value: Re-Water vs. No Drought
  misc_feature: MA Experiment 20001557 PARAMETER Experiment Name: At_Drought_Soil_Dry_P Parameter: Timepoint (day) Value: 13
  misc_feature: MA Experiment 20001557 PARAMETER Experiment Name: At_Drought_Soil_Dry_P Parameter: Treatment Value: Drought vs. No Drought
atggcttttcctagttgtgtttcggttgcaatcacggctatgatgctacttgtaacatgttgtcattgtgcaacataccaagaacaattcatgggtccacaaaacgcagcaagagctcatttaaggctcaaaccgctaaagtgggacgccaaattggcccgttacgcgcaatggtgggctaaccagagacgcggtgactgcgccttgacccattccaatggaccctatggtgagaatctcttttggggctcaggcaatagatggggtccatctcaagccgcctatggatggttgtctgaagcaaggagctataactatagatctaactcgtgcaactccgagatgtgtggccattacacacaaatcgtgtggaagaacacacaaaagattggttgcgctcacgtgatctgcaatggcggaggaggcgtattcttgacttgcaattatgatccaccggggaattttcttggtaggaagccttattga

SEQ ID NO: 38537 - protein, 161 aa, Arabidopsis thaliana
  peptide (1)..(161): Ceres Seq. ID no. 12323141
  misc_feature (31)..(148): Pfam Name: SCP-like extracellular protein Pfam Description: SCP-like extracellular protein
  misc_feature (1)..(161): Homolog of NCBI NO: 548589 NR Description: Pathogenesis-related protein PRB1-3 precursor
  misc_feature (15)..(161): Homolog of NCBI NO: 34914936 NR Description: putative pathogenesis-related protein precursor
  misc_feature (5)..(161): Homolog of NCBI NO: 3702665 NR Description: pathogenisis-related protein 1.2 [Triticum
  misc_feature (7)..(161): Homolog of NCBI NO: 480679 NR Description: pathogenesis-related protein 1a - barley
  misc_feature (5)..(161): Homolog of NCBI NO: 7442179 NR Description: pathogenesis related protein-1 - maize
  misc_feature (20)..(161): Homolog of NCBI NO: 15235992 NR Description: putative pathogenesis-related protein; protein
  misc_feature (25)..(161): Homolog of NCBI NO: 15235994 NR Description: putative pathogenesis-related protein; protein
  misc_feature (25)..(161): Homolog of NCBI NO: 2500715 NR Description: Pathogenesis-related protein PR-1 precursor
  misc_feature (30)..(161): Homolog of NCBI NO: 22327916 NR Description: similar to putative pathogenesis-related protein
  misc_feature (1)..(161): Homolog of NCBI NO: 15234704 NR Description: PR-1-like protein; protein id: At4g30320.1
MAFPSCVSVAITAMMLLVTCCHCATYQEQFMGPQNAARAHLRLKPLKWDAKLARYAQWWANQRRGDCALTHSNGPYGENLFWGSGNRWGPSQAAYGWLSEARSYNYRSNSCNSEMCGHYTQIVWKNTQKIGCAHVICNGGGGVFLTCNYDPPGNFLGRKPY

SEQ ID NO: 38538 - protein, 148 aa, Arabidopsis thaliana
  peptide (1)..(148): Ceres Seq. ID no. 12323142
  misc_feature (18)..(135): Pfam Name: SCP-like extracellular protein Pfam Description: SCP-like extracellular protein
  misc_feature (1)..(148): Homolog of NCBI NO: 548589 NR Description: Pathogenesis-related protein PRB1-3 precursor
  misc_feature (2)..(148): Homolog of NCBI NO: 34914936 NR Description: putative pathogenesis-related protein precursor
  misc_feature (1)..(148): Homolog of NCBI NO: 3702665 NR Description: pathogenisis-related protein 1.2 [Triticum
  misc_feature (1)..(148): Homolog of NCBI NO: 480679 NR Description: pathogenesis-related protein 1a - barley
  misc_feature (1)..(148): Homolog of NCBI NO: 7442179 NR Description: pathogenesis related protein-1 - maize
  misc_feature (7)..(148): Homolog of NCBI NO: 15235992 NR Description: putative pathogenesis-related protein; protein
  misc_feature (12)..(148): Homolog of NCBI NO: 15235994 NR Description: putative pathogenesis-related protein; protein
  misc_feature (12)..(148): Homolog of NCBI NO: 2500715 NR Description: Pathogenesis-related protein PR-1 precursor
  misc_feature (17)..(148): Homolog of NCBI NO: 22327916 NR Description: similar to putative pathogenesis-related protein
  misc_feature (1)..(148): Homolog of NCBI NO: 15234704 NR Description: PR-1-like protein; protein id: At4g30320.1
MMLLVTCCHCATYQEQFMGPQNAARAHLRLKPLKWDAKLARYAQWWANQRRGDCALTHSNGPYGENLFWGSGNRWGPSQAAYGWLSEARSYNYRSNSCNSEMCGHYTQIVWKNTQKIGCAHVICNGGGGVFLTCNYDPPGNFLGRKPY

SEQ ID NO: 38539 - protein, 147 aa, Arabidopsis thaliana
  peptide (1)..(147): Ceres Seq. ID no. 12323143
  misc_feature (17)..(134): Pfam Name: SCP-like extracellular protein Pfam Description: SCP-like extracellular protein
  misc_feature (1)..(147): Homolog of NCBI NO: 548589 NR Description: Pathogenesis-related protein PRB1-3 precursor
  misc_feature (1)..(147): Homolog of NCBI NO: 34914936 NR Description: putative pathogenesis-related protein precursor
  misc_feature (1)..(147): Homolog of NCBI NO: 3702665 NR Description: pathogenisis-related protein 1.2 [Triticum
  misc_feature (1)..(147): Homolog of NCBI NO: 480679 NR Description: pathogenesis-related protein 1a - barley
  misc_feature (1)..(147): Homolog of NCBI NO: 7442179 NR Description: pathogenesis related protein-1 - maize
  misc_feature (6)..(147): Homolog of NCBI NO: 15235992 NR Description: putative pathogenesis-related protein; protein
  misc_feature (11)..(147): Homolog of NCBI NO: 15235994 NR Description: putative pathogenesis-related protein; protein
  misc_feature (11)..(147): Homolog of NCBI NO: 2500715 NR Description: Pathogenesis-related protein PR-1 precursor
  misc_feature (16)..(147): Homolog of NCBI NO: 22327916 NR Description: similar to putative pathogenesis-related protein
  misc_feature (1)..(147): Homolog of NCBI NO: 15234704 NR Description: PR-1-like protein; protein id: At4g30320.1
MLLVTCCHCATYQEQFMGPQNAARAHLRLKPLKWDAKLARYAQWWANQRRGDCALTHSNGPYGENLFWGSGNRWGPSQAAYGWLSEARSYNYRSNSCNSEMCGHYTQIVWKNTQKIGCAHVICNGGGGVFLTCNYDPPGNFLGRKPY

SEQ ID NO: 38540 - DNA, 855 bp, Arabidopsis thaliana
  misc_feature (1)..(855): Ceres Seq. ID no. 13592318
  misc_feature: MA Experiment ID: 108668 Result: Down-regulated in Transcription
  misc_feature: MA Experiment 108668 PARAMETER Experiment Name: At_2mM_SA_cDNA_P Parameter: Plant Line Value: WS
  misc_feature: MA Experiment 108668 PARAMETER Experiment Name: At_2mM_SA_cDNA_P Parameter: Timepoint (hr) Value: 6
  misc_feature: MA Experiment 108668 PARAMETER Experiment Name: At_2mM_SA_cDNA_P Parameter: Treatment Value: 2mM SA vs. No Treatment
  misc_feature: MA Experiment ID: 20000184 Result: Up-regulated in Transcription
  misc_feature: MA Experiment 20000184 PARAMETER Experiment Name: At_Shoots__P Parameter: Age (day) Value: 7
  misc_feature: MA Experiment 20000184 PARAMETER Experiment Name: At_Shoots__P Parameter: Tissue Value: Shoots vs. Whole Plant
  misc_feature: MA Experiment ID: 20000227 Result: Up-regulated in Transcription
  misc_feature: MA Experiment 20000227 PARAMETER Experiment Name: At_Root-Tips-vs-Tops_P Parameter: Tissue Value: Root Tips vs. Root Tops
  misc_feature: MA Experiment ID: 20001759 Result: Down-regulated in Transcription
  misc_feature: MA Experiment 20001759 PARAMETER Experiment Name: At_50mM_NH4NO3_L-to-H_P Parameter: Timepoint (hr) Value: 1
  misc_feature: MA Experiment 20001759 PARAMETER Experiment Name: At_50mM_NH4NO3_L-to-H_P Parameter: Tissue Value: Siliques
  misc_feature: MA Experiment 20001759 PARAMETER Experiment Name: At_50mM_NH4NO3_L-to-H_P Parameter: Treatment Value: 50mM NH4NO3 vs 100mM Mannitol
acatttcctcactcaactctctcattctcactaacagagagaaaaagcaaaagcaaaaatggctcgatctttcgctattgctgtgatctgtatcgtcctcatcgccggcgttactggtcaagctccgacttcaccaccaaccgctacaccagctccaccaactccaacaactcctccaccagcagcaactcctcctcctgtctcagcaccaccaccagtcacaacatctcctcctccagtcaccactgctcctcctccagcaaatccaccaccaccagtctcttctcctcctcctgcttctcctccaccagctactcctcctccagtcgcttctcctcctcctcccgttgcttctcctccaccagcaactcctcctcccgtcgctactcctcccccagctcctctagcttcccctcctgctcaagttccagctccagcaccgaccacgaagccagattctccatctccatctccgtcatctagcccacctcttccatcaagcgacgctcctggacctagcaccgattctatctctcctgctcctagccccactgatgtgaacgaccagaatggagctagcaagatggtttcgagcttagtatttggatctgttctcgtctgatttatgatctaagtggaatcttttgtgactgtgttacttgcatttatttttatgtcgtctttgtttgttccactgtattgcttgggactgaattcttttgggatttattatctttcggagaggatactattgagagcttgagatggagatagcaggatattttgattgcagatacttttgtggcttcatttctcattccatttgattattagtgtactacattccttttctcc

SEQ ID NO: 38541 - protein, 187 aa, Arabidopsis thaliana
  peptide (1)..(187): Ceres Seq. ID no. 13592319
  misc_feature (14)..(171): Pfam Name: Formin Homology 2 Domain Pfam Description: Formin Homology 2 Domain
  misc_feature (14)..(171): Pfam Name: Formin Homology 2 Domain Pfam Description: Formin Homology 2 Domain
  misc_feature (19)..(164): Homolog of NCBI NO: 6523547 NR Description: hydroxyproline-rich glycoprotein DZ-HRGP
  misc_feature (23)..(164): Homolog of NCBI NO: 6523547 NR Description: hydroxyproline-rich glycoprotein DZ-HRGP
  misc_feature (22)..(164): Homolog of NCBI NO: 5917664 NR Description: extensin-like protein [Lycopersicon esculentum]
  misc_feature (7)..(180): Homolog of NCBI NO: 1084362 NR Description: extensin-like protein S3 - alfalfa
  misc_feature (26)..(183): Homolog of NCBI NO: 1084362 NR Description: extensin-like protein S3 - alfalfa
  misc_feature (19)..(164): Homolog of NCBI NO: 6523547 NR Description: hydroxyproline-rich glycoprotein DZ-HRGP
  misc_feature (22)..(164): Homolog of NCBI NO: 5917664 NR Description: extensin-like protein [Lycopersicon esculentum]
  misc_feature (26)..(183): Homolog of NCBI NO: 1084362 NR Description: extensin-like protein S3 - alfalfa
  misc_feature (1)..(187): Homolog of NCBI NO: 15226024 NR Description: arabinogalactan-protein (AGP9) [Arabidopsis
  misc_feature (1)..(187): Homolog of NCBI NO: 13265426 NR Description: At2g14890 [Arabidopsis thaliana]
  misc_feature (5)..(187): Homolog of NCBI NO: 7441828 NR Description: extensin-like cell wall protein - sea-island
  misc_feature (5)..(171): Homolog of NCBI NO: 7441829 NR Description: proline-rich cell wall protein - upland cotton
  misc_feature (19)..(187): Homolog of NCBI NO: 7441829 NR Description: proline-rich cell wall protein - upland cotton
  misc_feature (7)..(180): Homolog of NCBI NO: 1084362 NR Description: extensin-like protein S3 - alfalfa
  misc_feature (23)..(164): Homolog of NCBI NO: 6523547 NR Description: hydroxyproline-rich glycoprotein DZ-HRGP
  misc_feature (19)..(187): Homolog of NCBI NO: 7441829 NR Description: proline-rich cell wall protein - upland cotton
  misc_feature (5)..(171): Homolog of NCBI NO: 7441829 NR Description: proline-rich cell wall protein - upland cotton
  misc_feature (5)..(187): Homolog of NCBI NO: 7441828 NR Description: extensin-like cell wall protein - sea-island
  misc_feature (1)..(187): Homolog of NCBI NO: 13265426 NR Description: At2g14890 [Arabidopsis thaliana]
  misc_feature (1)..(187): Homolog of NCBI NO: 15226024 NR Description: arabinogalactan-protein (AGP9) [Arabidopsis
MARSFAIAVICIVLIAGVTGQAPTSPPTATPAPPTPTTPPPAATPPPVSAPPPVTTSPPPVTTAPPPANPPPPVSSPPPASPPPATPPPVASPPPPVASPPPATPPPVATPPPAPLASPPAQVPAPAPTTKPDSPSPSPSSSPPLPSSDAPGPSTDSISPAPSPTDVNDQNGASKMVSSLVFGSVLV

SEQ ID NO: 38542 - protein, 160 aa, Arabidopsis thaliana
  peptide (1)..(160): Ceres Seq. ID no. 13592320
  misc_feature (40)..(158): Pfam Name: Lipoprotein amino terminal region Pfam Description: Lipoprotein amino terminal region
  misc_feature (40)..(158): Pfam Name: Lipoprotein amino terminal region Pfam Description: Lipoprotein amino terminal region
TFPHSTLSFSLTERKSKSKNGSIFRYCCDLYRPHRRRYWSSSDFTTNRYTSSTNSNNSSTSSNSSSCLSTTTSHNISSSSHHCSSSSKSTTTSLFSSSCFSSTSYSSSSRFSSSSRCFSSTSNSSSRRYSSPSSSSFPSCSSSSSSTDHEARFSISISVI

SEQ ID NO: 38543 - DNA, 1481 bp, Arabidopsis thaliana
  misc_feature (1)..(1481): Ceres Seq. ID no. 12482305
  misc_feature: MA Experiment ID: 108462 Result: Down-regulated in Transcription
  misc_feature: MA Experiment 108462 PARAMETER Experiment Name: At_Germinating_Seeds_cDNA_P Parameter: Age (day) Value: 2 vs. 0
  misc_feature: MA Experiment 108462 PARAMETER Experiment Name: At_Germinating_Seeds_cDNA_P Parameter: Tissue Value: Germinating Seeds
  misc_feature: MA Experiment ID: 108463 Result: Down-regulated in Transcription
  misc_feature: MA Experiment 108463 PARAMETER Experiment Name: At_Germinating_Seeds_cDNA_P Parameter: Age (day) Value: 3 vs. 0
  misc_feature: MA Experiment 108463 PARAMETER Experiment Name: At_Germinating_Seeds_cDNA_P Parameter: Tissue Value: Germinating Seeds
  misc_feature: MA Experiment ID: 108464 Result: Down-regulated in Transcription
  misc_feature: MA Experiment 108464 PARAMETER Experiment Name: At_Germinating_Seeds_cDNA_P Parameter: Age (day) Value: 4 vs. 0
  misc_feature: MA Experiment 108464 PARAMETER Experiment Name: At_Germinating_Seeds_cDNA_P Parameter: Tissue Value: Germinating Seeds
  misc_feature: MA Experiment ID: 20000069 Result: Down-regulated in Transcription
  misc_feature: MA Experiment 20000069 PARAMETER Experiment Name: At_100uM_ABA_Mutants_cDNA_P Parameter: Plant Line Value: CS23
  misc_feature: MA Experiment 20000069 PARAMETER Experiment Name: At_100uM_ABA_Mutants_cDNA_P Parameter: Timepoint (hr) Value: 6
  misc_feature: MA Experiment 20000069 PARAMETER Experiment Name: At_100uM_ABA_Mutants_cDNA_P Parameter: Tissue Value: Aerial
  misc_feature: MA Experiment 20000069 PARAMETER Experiment Name: At_100uM_ABA_Mutants_cDNA_P Parameter: Treatment Value: 100uM ABA vs. No Treatment
  misc_feature: MA Experiment ID: 20000070 Result: Down-regulated in Transcription
  misc_feature: MA Experiment 20000070 PARAMETER Experiment Name: At_100uM_ABA_Mutants_cDNA_P Parameter: Plant Line Value: CS24
  misc_feature: MA Experiment 20000070 PARAMETER Experiment Name: At_100uM_ABA_Mutants_cDNA_P Parameter: Timepoint (hr) Value: 6
  misc_feature: MA Experiment 20000070 PARAMETER Experiment Name: At_100uM_ABA_Mutants_cDNA_P Parameter: Tissue Value: Aerial
  misc_feature: MA Experiment 20000070 PARAMETER Experiment Name: At_100uM_ABA_Mutants_cDNA_P Parameter: Treatment Value: 100uM ABA vs. No Treatment
  misc_feature: MA Experiment ID: 20000071 Result: Down-regulated in Transcription
  misc_feature: MA Experiment 20000071 PARAMETER Experiment Name: At_100uM_ABA_Mutants_cDNA_P Parameter: Plant Line Value: CS8104
  misc_feature: MA Experiment 20000071 PARAMETER Experiment Name: At_100uM_ABA_Mutants_cDNA_P Parameter: Timepoint (hr) Value: 6
  misc_feature: MA Experiment 20000071 PARAMETER Experiment Name: At_100uM_ABA_Mutants_cDNA_P Parameter: Tissue Value: Aerial
  misc_feature: MA Experiment 20000071 PARAMETER Experiment Name: At_100uM_ABA_Mutants_cDNA_P Parameter: Treatment Value: 100uM ABA vs. No Treatment
  misc_feature: MA Experiment ID: 20000087 Result: Down-regulated in Transcription
  misc_feature: MA Experiment 20000087 PARAMETER Experiment Name: At_100uM_ABA_Mutants_cDNA_P Parameter: Plant Line Value: WS
  misc_feature: MA Experiment 20000087 PARAMETER Experiment Name: At_100uM_ABA_Mutants_cDNA_P Parameter: Timepoint (hr) Value: 6
  misc_feature: MA Experiment 20000087 PARAMETER Experiment Name: At_100uM_ABA_Mutants_cDNA_P Parameter: Tissue Value: Aerial
  misc_feature: MA Experiment 20000087 PARAMETER Experiment Name: At_100uM_ABA_Mutants_cDNA_P Parameter: Treatment Value: 100uM ABA vs. No Treatment
  misc_feature: MA Experiment ID: 20000089 Result: Down-regulated in Transcription
  misc_feature: MA Experiment ID: 20000090 Result: Down-regulated in Transcription
  misc_feature: MA Experiment ID: 20000093 Result: Up-regulated in Transcription
  misc_feature: MA Experiment 20000093 PARAMETER Experiment Name: At_42deg_Heat_cDNA_P Parameter: Temperature (deg C) Value: 42 vs. 22
  misc_feature: MA Experiment 20000093 PARAMETER Experiment Name: At_42deg_Heat_cDNA_P Parameter: Timepoint (hr) Value: 0.5
  misc_feature: MA Experiment 20000093 PARAMETER Experiment Name: At_42deg_Heat_cDNA_P Parameter: Tissue Value: Aerial
  misc_feature: MA Experiment ID: 20000113 Result: Up-regulated in Transcription
  misc_feature: MA Experiment 20000113 PARAMETER Experiment Name: At_42deg_Heat_cDNA_P Parameter: Temperature (deg C) Value: 42 vs. 22
  misc_feature: MA Experiment 20000113 PARAMETER Experiment Name: At_42deg_Heat_cDNA_P Parameter: Timepoint (hr) Value: 8
  misc_feature: MA Experiment 20000113 PARAMETER Experiment Name: At_42deg_Heat_cDNA_P Parameter: Tissue Value: Aerial
  misc_feature: MA Experiment ID: 20000117 Result: Down-regulated in Transcription
  misc_feature: MA Experiment 20000117 PARAMETER Experiment Name: At_100uM_ABA_Mutants_cDNA_P Parameter: Plant Line Value: Columbia
  misc_feature: MA Experiment 20000117 PARAMETER Experiment Name: At_100uM_ABA_Mutants_cDNA_P Parameter: Timepoint (hr) Value: 6
  misc_feature: MA Experiment 20000117 PARAMETER Experiment Name: At_100uM_ABA_Mutants_cDNA_P Parameter: Tissue Value: Aerial
  misc_feature: MA Experiment 20000117 PARAMETER Experiment Name: At_100uM_ABA_Mutants_cDNA_P Parameter: Treatment Value: 100uM ABA vs. No Treatment
  misc_feature: MA Experiment ID: 20000184 Result: Down-regulated in Transcription
  misc_feature: MA Experiment 20000184 PARAMETER Experiment Name: At_Shoots__P Parameter: Age (day) Value: 7
  misc_feature: MA Experiment 20000184 PARAMETER Experiment Name: At_Shoots__P Parameter: Tissue Value: Shoots vs. Whole Plant
  misc_feature: MA Experiment ID: 20000213 Result: Down-regulated in Transcription
  misc_feature: MA Experiment 20000213 PARAMETER Experiment Name: At_4deg_Cold_P Parameter: Timepoint (hr) Value: 2
  misc_feature: MA Experiment ID: 20000227 Result: Down-regulated in Transcription
  misc_feature: MA Experiment 20000227 PARAMETER Experiment Name: At_Root-Tips-vs-Tops_P Parameter: Tissue Value: Root Tips vs. Root Tops
  misc_feature: MA Experiment ID: 20000234 Result: Down-regulated in Transcription
  misc_feature: MA Experiment 20000234 PARAMETER Experiment Name: At_Siliques_P Parameter: Age (day) Value: 21
  misc_feature: MA Experiment 20000234 PARAMETER Experiment Name: At_Siliques_P Parameter: Organism Value: A. thaliana
  misc_feature: MA Experiment 20000234 PARAMETER Experiment Name: At_Siliques_P Parameter: Plant Line Value: WS
  misc_feature: MA Experiment 20000234 PARAMETER Experiment Name: At_Siliques_P Parameter: Tissue Value: Less Than 5mm Siliques vs. Whole Plant
  misc_feature: MA Experiment ID: 20000235 Result: Down-regulated in Transcription
  misc_feature: MA Experiment 20000235 PARAMETER Experiment Name: At_Siliques_P Parameter: Age (day) Value: 21
  misc_feature: MA Experiment 20000235 PARAMETER Experiment Name: At_Siliques_P Parameter: Organism Value: A. thaliana
  misc_feature: MA Experiment 20000235 PARAMETER Experiment Name: At_Siliques_P Parameter: Plant Line Value: WS
  misc_feature: MA Experiment 20000235 PARAMETER Experiment Name: At_Siliques_P Parameter: Tissue Value: 5-10mm Siliques vs. Whole Plant
  misc_feature: MA Experiment ID: 20000265 Result: Down-regulated in Transcription
  misc_feature: MA Experiment 20000265 PARAMETER Experiment Name: At_Open_Flower_P Parameter: Age (day) Value: 21
  misc_feature: MA Experiment 20000265 PARAMETER Experiment Name: At_Open_Flower_P Parameter: Plant Line Value: WS
  misc_feature: MA Experiment 20000265 PARAMETER Experiment Name: At_Open_Flower_P Parameter: Tissue Value: Closed Flower vs. Whole Plant
  misc_feature: MA Experiment ID: 20000269 Result: Down-regulated in Transcription
  misc_feature: MA Experiment 20000269 PARAMETER Experiment Name: At_1mM_KNO3_L-vs-H_Roots_P Parameter: Age (day) Value: 7,10,12
  misc_feature: MA Experiment 20000269 PARAMETER Experiment Name: At_1mM_KNO3_L-vs-H_Roots_P Parameter: Organism Value: A. thaliana
  misc_feature: MA Experiment 20000269 PARAMETER Experiment Name: At_1mM_KNO3_L-vs-H_Roots_P Parameter: Plant Line Value: WS
  misc_feature: MA Experiment 20000269 PARAMETER Experiment Name: At_1mM_KNO3_L-vs-H_Roots_P Parameter: Timepoint (day) Value: 7,10,12
  misc_feature: MA Experiment 20000269 PARAMETER Experiment Name: At_1mM_KNO3_L-vs-H_Roots_P Parameter: Tissue Value: Roots
  misc_feature: MA Experiment 20000269 PARAMETER Experiment Name: At_1mM_KNO3_L-vs-H_Roots_P Parameter: Treatment Value: 1mM KNO3 vs. 50mM KNO3
  misc_feature: MA Experiment ID: 20000286 Result: Down-regulated in Transcription
  misc_feature: MA Experiment 20000286 PARAMETER Experiment Name: At_Open_Flower_P Parameter: Age (day) Value: 21
  misc_feature: MA Experiment 20000286 PARAMETER Experiment Name: At_Open_Flower_P Parameter: Plant Line Value: WS
  misc_feature: MA Experiment 20000286 PARAMETER Experiment Name: At_Open_Flower_P Parameter: Tissue Value: Half Open vs. Whole Plant
  misc_feature: MA Experiment ID: 20000437 Result: Down-regulated in Transcription
  misc_feature: MA Experiment 20000437 PARAMETER Experiment Name: At_Drought_P Parameter: Age (day) Value: 8
  misc_feature: MA Experiment 20000437 PARAMETER Experiment Name: At_Drought_P Parameter: Organism Value: A. thaliana
  misc_feature: MA Experiment 20000437 PARAMETER Experiment Name: At_Drought_P Parameter: Plant Line Value: WS
  misc_feature: MA Experiment 20000437 PARAMETER Experiment Name: At_Drought_P Parameter: Timepoint (hr) Value: 24
  misc_feature: MA Experiment 20000437 PARAMETER Experiment Name: At_Drought_P Parameter: Tissue Value: Whole Plant
  misc_feature: MA Experiment 20000437 PARAMETER Experiment Name: At_Drought_P Parameter: Treatment Value: Drought vs. No Drought
  misc_feature: MA Experiment ID: 20000439 Result: Up-regulated in Transcription
  misc_feature: MA Experiment 20000439 PARAMETER Experiment Name: At_Roots__P Parameter: Age (day) Value: 14 vs. 21
  misc_feature: MA Experiment 20000439 PARAMETER Experiment Name: At_Roots__P Parameter: Organism Value: A. thaliana
  misc_feature: MA Experiment 20000439 PARAMETER Experiment Name: At_Roots__P Parameter: Tissue Value: Roots vs. Whole Plant
  misc_feature: MA Experiment ID: 20000441 Result: Up-regulated in Transcription
  misc_feature: MA Experiment 20000441 PARAMETER Experiment Name: At_1uM_BR-BRZ__P Parameter: Tissue Value: Shoot Apices
  misc_feature: MA Experiment 20000441 PARAMETER Experiment Name: At_1uM_BR-BRZ__P Parameter: Treatment Value: 1uM BR vs. No Treatment
  misc_feature: MA Experiment ID: 20000443 Result: Up-regulated in Transcription
  misc_feature: MA Experiment 20000443 PARAMETER Experiment Name: At_1uM_BR-BRZ__P Parameter: Tissue Value: Shoot Apices
  misc_feature: MA Experiment 20000443 PARAMETER Experiment Name: At_1uM_BR-BRZ__P Parameter: Treatment Value: 1uM BRZ vs. No Treatment
  misc_feature: MA Experiment ID: 20000451 Result: Down-regulated in Transcription
  misc_feature: MA Experiment 20000451 PARAMETER Experiment Name: At_CS6879_Shoots-Roots_P Parameter: Age (day) Value: 14
  misc_feature: MA Experiment 20000451 PARAMETER Experiment Name: At_CS6879_Shoots-Roots_P Parameter: Organism Value: A. thaliana
  misc_feature: MA Experiment 20000451 PARAMETER Experiment Name: At_CS6879_Shoots-Roots_P Parameter: Plant Line Value: CS6879 vs. WS
  misc_feature: MA Experiment 20000451 PARAMETER Experiment Name: At_CS6879_Shoots-Roots_P Parameter: Tissue Value: Roots
  misc_feature: MA Experiment ID: 20000794 Result: Up-regulated in Transcription
  misc_feature: MA Experiment 20000794 PARAMETER Experiment Name: At_Petals_P Parameter: Age (day) Value: 23-25 days
  misc_feature: MA Experiment 20000794 PARAMETER Experiment Name: At_Petals_P Parameter: Plant Line Value: WS
  misc_feature: MA Experiment 20000794 PARAMETER Experiment Name: At_Petals_P Parameter: Tissue Value: Petals vs. Whole plant
  misc_feature: MA Experiment ID: 20001248 Result: Down-regulated in Transcription
  misc_feature: MA Experiment 20001248 PARAMETER Experiment Name: At_Far-red-induction_P Parameter: Age (day) Value: 7
  misc_feature: MA Experiment 20001248 PARAMETER Experiment Name: At_Far-red-induction_P Parameter: Light Value: Far-red vs. White
  misc_feature: MA Experiment 20001248 PARAMETER Experiment Name: At_Far-red-induction_P Parameter: Organism Value: A. thaliana
  misc_feature: MA Experiment 20001248 PARAMETER Experiment Name: At_Far-red-induction_P Parameter: Plant Line Value: Columbia
  misc_feature: MA Experiment 20001248 PARAMETER Experiment Name: At_Far-red-induction_P Parameter: Timepoint (hr) Value: 4
  misc_feature: MA Experiment 20001248 PARAMETER Experiment Name: At_Far-red-induction_P Parameter: Tissue Value: Whole Plant
  misc_feature: MA Experiment ID: 20001451 Result: Up-regulated in Transcription
  misc_feature: MA Experiment 20001451 PARAMETER Experiment Name: At_Far-red-induction_P Parameter: Age (day) Value: 7
  misc_feature: MA Experiment 20001451 PARAMETER Experiment Name: At_Far-red-induction_P Parameter: Light Value: Far-red vs. White
  misc_feature: MA Experiment 20001451 PARAMETER Experiment Name: At_Far-red-induction_P Parameter: Organism Value: A. thaliana
  misc_feature: MA Experiment 20001451 PARAMETER Experiment Name: At_Far-red-induction_P Parameter: Plant Line Value: Columbia
  misc_feature: MA Experiment 20001451 PARAMETER Experiment Name: At_Far-red-induction_P Parameter: Timepoint (hr) Value: 24
  misc_feature: MA Experiment 20001451 PARAMETER Experiment Name: At_Far-red-induction_P Parameter: Tissue Value: Whole Plant
  misc_feature: MA Experiment ID: 20001458 Result: Down-regulated in Transcription
  misc_feature: MA Experiment 20001458 PARAMETER Experiment Name: At_50mM_NH4NO3_L-to-H_P Parameter: Age (day) Value: Undefined
  misc_feature: MA Experiment 20001458 PARAMETER Experiment Name: At_50mM_NH4NO3_L-to-H_P Parameter: Organism Value: Undefined
  misc_feature: MA Experiment 20001458 PARAMETER Experiment Name: At_50mM_NH4NO3_L-to-H_P Parameter: Plant Line Value: Undefined
  misc_feature: MA Experiment 20001458 PARAMETER Experiment Name: At_50mM_NH4NO3_L-to-H_P Parameter: Timepoint (hr) Value: 2
  misc_feature: MA Experiment 20001458 PARAMETER Experiment Name: At_50mM_NH4NO3_L-to-H_P Parameter: Tissue Value: Siliques
  misc_feature: MA Experiment 20001458 PARAMETER Experiment Name: At_50mM_NH4NO3_L-to-H_P Parameter: Treatment Value: 50mM NH4NO3 vs. 100mM Manitol
  misc_feature: MA Experiment ID: 20001555 Result: Down-regulated in Transcription
  misc_feature: MA Experiment 20001555 PARAMETER Experiment Name: At_Drought_Soil_Dry_P Parameter: Age (day) Value: 24
  misc_feature: MA Experiment 20001555 PARAMETER Experiment Name: At_Drought_Soil_Dry_P Parameter: Organism Value: A. thaliana
  misc_feature: MA Experiment 20001555 PARAMETER Experiment Name: At_Drought_Soil_Dry_P Parameter: Plant Line Value: WS
  misc_feature: MA Experiment 20001555 PARAMETER Experiment Name: At_Drought_Soil_Dry_P Parameter: Post Timepoint (hr) Value: None
  misc_feature: MA Experiment 20001555 PARAMETER Experiment Name: At_Drought_Soil_Dry_P Parameter: Post-Treatment Value: None
  misc_feature: MA Experiment 20001555 PARAMETER Experiment Name: At_Drought_Soil_Dry_P Parameter: Timepoint (day) Value: 10
  misc_feature: MA Experiment 20001555 PARAMETER Experiment Name: At_Drought_Soil_Dry_P Parameter: Treatment Value: Drought vs. No Drought
  misc_feature: MA Experiment ID: 20001556 Result: Down-regulated in Transcription
  misc_feature: MA Experiment 20001556 PARAMETER Experiment Name: At_Drought_Soil_Dry_P Parameter: Age (day) Value: 26
  misc_feature: MA Experiment 20001556 PARAMETER Experiment Name: At_Drought_Soil_Dry_P Parameter: Organism Value: A. thaliana
  misc_feature: MA Experiment 20001556 PARAMETER Experiment Name: At_Drought_Soil_Dry_P Parameter: Plant Line Value: WS
  misc_feature: MA Experiment 20001556 PARAMETER Experiment Name: At_Drought_Soil_Dry_P Parameter: Post Timepoint (hr) Value: None
  misc_feature: MA Experiment 20001556 PARAMETER Experiment Name: At_Drought_Soil_Dry_P Parameter: Post-Treatment Value: None
  misc_feature: MA Experiment 20001556 PARAMETER Experiment Name: At_Drought_Soil_Dry_P Parameter: Timepoint (day) Value: 12
  misc_feature: MA Experiment 20001556 PARAMETER Experiment Name: At_Drought_Soil_Dry_P Parameter: Treatment Value: Drought vs. No Drought
  misc_feature: MA Experiment ID: 20001557 Result: Down-regulated in Transcription
  misc_feature: MA Experiment 20001557 PARAMETER Experiment Name: At_Drought_Soil_Dry_P Parameter: Age (day) Value: 27
  misc_feature: MA Experiment 20001557 PARAMETER Experiment Name: At_Drought_Soil_Dry_P Parameter: Organism Value: A. thaliana
  misc_feature: MA Experiment 20001557 PARAMETER Experiment Name: At_Drought_Soil_Dry_P Parameter: Plant Line Value: WS
  misc_feature: MA Experiment 20001557 PARAMETER Experiment Name: At_Drought_Soil_Dry_P Parameter: Post Timepoint (hr) Value: 3
  misc_feature: MA Experiment 20001557 PARAMETER Experiment Name: At_Drought_Soil_Dry_P Parameter: Post-Treatment Value: Re-Water vs. No Drought
  misc_feature: MA Experiment 20001557 PARAMETER Experiment Name: At_Drought_Soil_Dry_P Parameter: Timepoint (day) Value: 13
  misc_feature: MA Experiment 20001557 PARAMETER Experiment Name: At_Drought_Soil_Dry_P Parameter: Treatment Value: Drought vs. No Drought
  misc_feature: MA Experiment ID: 20001560 Result: Down-regulated in Transcription
  misc_feature: MA Experiment 20001560 PARAMETER Experiment Name: At_Drought_Soil_Dry_P Parameter: Age (day) Value: 28
  misc_feature: MA Experiment 20001560 PARAMETER Experiment Name: At_Drought_Soil_Dry_P Parameter: Organism Value: A. thaliana
  misc_feature: MA Experiment 20001560 PARAMETER Experiment Name: At_Drought_Soil_Dry_P Parameter: Plant Line Value: WS
  misc_feature: MA Experiment 20001560 PARAMETER Experiment Name: At_Drought_Soil_Dry_P Parameter: Post Timepoint (hr) Value: None
  misc_feature: MA Experiment 20001560 PARAMETER Experiment Name: At_Drought_Soil_Dry_P Parameter: Post-Treatment Value: None
  misc_feature: MA Experiment 20001560 PARAMETER Experiment Name: At_Drought_Soil_Dry_P Parameter: Timepoint (day) Value: 14
  misc_feature: MA Experiment 20001560 PARAMETER Experiment Name: At_Drought_Soil_Dry_P Parameter: Treatment Value: Drought vs. No Drought
  misc_feature: MA Experiment ID: 20001911 Result: Up-regulated in Transcription
  misc_feature: MA Experiment 20001911 PARAMETER Experiment Name: At_Drought_Reproduction_P Parameter: Age (day) Value: 40
  misc_feature: MA Experiment 20001911 PARAMETER Experiment Name: At_Drought_Reproduction_P Parameter: Organism Value: A. thaliana
  misc_feature: MA Experiment 20001911 PARAMETER Experiment Name: At_Drought_Reproduction_P Parameter: Plant Line Value: WS
  misc_feature: MA Experiment 20001911 PARAMETER Experiment Name: At_Drought_Reproduction_P Parameter: Timepoint (day) Value: 10
  misc_feature: MA Experiment 20001911 PARAMETER Experiment Name: At_Drought_Reproduction_P Parameter: Tissue Value: Flowers
  misc_feature: MA Experiment 20001911 PARAMETER Experiment Name: At_Drought_Reproduction_P Parameter: Treatment Value: Drought vs. No Drought
atctcttcaaataattttattggttcttctgtcttatgaacaagaacagaggagctctgtcttgtttcctcttatttacgtactaccaatcctcatacacacacatgtgtctttggtttcatctccgaaaagtgataatctgttttatttgatttgacttttgagagaacagagcatatataaagaaacagagcagctctgtttttttttttttgtgttgcagtttgtagaatcatggagaggtacgaaatagtgaaggatattgggtctggtaacttcggagtagcaaagcttgttcgtgacaaattttccaaagagcttttcgctgttaagttcatcgagcgaggccaaaagattgatgaacatgtacaaagagaaatcatgaaccataggtcgctgatccatcccaatataataagattcaaggaggttttattgacggcaacacatttggcgttagtaatggaatacgccgccggaggagaactgttcggaagaatctgcagcgccggaagattcagtgaagacgaggcaaggtttttctttcagcagcttatatcaggagttaattactgtcacagtcttcaaatatgccatagagatttaaagctagagaacacgttacttgatggaagcgaagcgccacgtgtaaagatttgcgactttggatattcaaaatcaggagttcttcattcgcaaccaaagacaacagtaggaacacctgcttacattgcacctgaagtgctctccacgaaagagtatgacggcaaaatcgctgatgtttggtcttgtggagtcactttgtatgttatgcttgttggtgcttatccttttgaagatccttctgatcctaaagattttcggaagacgatcggtcggattctcaaagctcagtatgctattcctgattatgttcgagtttcggatgaatgcagacatcttctctctcggatattcgttgccaaccctgaaaagagaataacaatagaggagataaagaatcattcttggtttctcaagaacttgccggtagagatgtatgaaggatcattgatgatgaatggtccatcgactcagacagtagaagagatagtgtggatcattgaagaagctcggaaacctatcaccgtagctactggactcgcaggtgctggtggctctggtggaagcagtaatggtgccattggaagtagcagtatggatctcgatgacttggacacagatttcgacgacatcgataccgctgatctcctttcccctttgtgaacaattgtatcaaaaaccaaagatttcatgtttctgaagcctgctgatactactacacattgatgatacacagacgtgaatataattgttcactaaaatgtataattagagtgtgaaaacatttgtctttgattacaaaaatgttctgttagacatttttatacatatgcatggaagatgtatatataaacagaaacataatatctagtcacgtt

SEQ ID NO: 38544 - protein, 343 aa, Arabidopsis thaliana
  peptide (1)..(343): Ceres Seq. ID no. 12482306
  misc_feature (4)..(260): Pfam Name: Protein kinase domain Pfam Description: Protein kinase domain
  misc_feature (2)..(307): Homolog of NCBI NO: 3811293 NR Description: putative serine/threonine protein kinase
  misc_feature (11)..(343): Homolog of NCBI NO: 416564 NR Description: Abcisic acid-inducible protein kinase
  misc_feature (1)..(343): Homolog of NCBI NO: 481002 NR Description: protein kinase MCPK9 (EC 2.7.1.-) - common ice
  misc_feature (1)..(339): Homolog of NCBI NO: 2055374 NR Description: serine-threonine protein kinase [Triticum
  misc_feature (1)..(343): Homolog of NCBI NO: 14588571 NR Description: protein kinase HvPKABA1 [Hordeum vulgare subsp.
  misc_feature (11)..(343): Homolog of NCBI NO: 11138330 NR Description: putative serine/threonine kinase GDBrPK [Vitis
  misc_feature (1)..(338): Homolog of NCBI NO: 34906840 NR Description: putative protein kinase HvPKABA1(Abcisic
  misc_feature (1)..(338): Homolog of NCBI NO: 29164823 NR Description: abcisic acid-inducible protein kinanase
  misc_feature (1)..(343): Homolog of NCBI NO: 21618139 NR Description: serine-threonine protein kinase, putative
  misc_feature (1)..(343): Homolog of NCBI NO: 15218270 NR Description: serine-threonine protein kinase, putative
MERYEIVKDIGSGNFGVAKLVRDKFSKELFAVKFIERGQKIDEHVQREIMNHRSLIHPNIIRFKEVLLTATHLALVMEYAAGGELFGRICSAGRFSEDEARFFFQQLISGVNYCHSLQICHRDLKLENTLLDGSEAPRVKICDFGYSKSGVLHSQPKTTVGTPAYIAPEVLSTKEYDGKIADVWSCGVTLYVMLVGAYPFEDPSDPKDFRKTIGRILKAQYAIPDYVRVSDECRHLLSRIFVANPEKRITIEEIKNHSWFLKNLPVEMYEGSLMMNGPSTQTVEEIVWIIEEARKPITVATGLAGAGGSGGSSNGAIGSSSMDLDDLDTDFDDIDTADLLSPL

SEQ ID NO: 38545 - protein, 294 aa, Arabidopsis thaliana
  peptide (1)..(294): Ceres Seq. ID no. 12482307
  misc_feature (1)..(211): Pfam Name: Protein kinase domain Pfam Description: Protein kinase domain
  misc_feature (1)..(258): Homolog of NCBI NO: 3811293 NR Description: putative serine/threonine protein kinase
  misc_feature (1)..(294): Homolog of NCBI NO: 416564 NR Description: Abcisic acid-inducible protein kinase
  misc_feature (1)..(294): Homolog of NCBI NO: 481002 NR Description: protein kinase MCPK9 (EC 2.7.1.-) - common ice
  misc_feature (1)..(290): Homolog of NCBI NO: 2055374 NR Description: serine-threonine protein kinase [Triticum
  misc_feature (1)..(294): Homolog of NCBI NO: 14588571 NR Description: protein kinase HvPKABA1 [Hordeum vulgare subsp.
  misc_feature (1)..(294): Homolog of NCBI NO: 11138330 NR Description: putative serine/threonine kinase GDBrPK [Vitis
  misc_feature (1)..(289): Homolog of NCBI NO: 34906840 NR Description: putative protein kinase HvPKABA1(Abcisic
  misc_feature (1)..(289): Homolog of NCBI NO: 29164823 NR Description: abcisic acid-inducible protein kinanase
  misc_feature (1)..(294): Homolog of NCBI NO: 21618139 NR Description: serine-threonine protein kinase, putative
  misc_feature (1)..(294): Homolog of NCBI NO: 15218270 NR Description: serine-threonine protein kinase, putative
MNHRSLIHPNIIRFKEVLLTATHLALVMEYAAGGELFGRICSAGRFSEDEARFFFQQLISGVNYCHSLQICHRDLKLENTLLDGSEAPRVKICDFGYSKSGVLHSQPKTTVGTPAYIAPEVLSTKEYDGKIADVWSCGVTLYVMLVGAYPFEDPSDPKDFRKTIGRILKAQYAIPDYVRVSDECRHLLSRIFVANPEKRITIEEIKNHSWFLKNLPVEMYEGSLMMNGPSTQTVEEIVWIIEEARKPITVATGLAGAGGSGGSSNGAIGSSSMDLDDLDTDFDDIDTADLLSPL

SEQ ID NO: 38546 - protein, 267 aa, Arabidopsis thaliana
  peptide (1)..(267): Ceres Seq. ID no. 12482308
  misc_feature (1)..(184): Pfam Name: Protein kinase domain Pfam Description: Protein kinase domain
  misc_feature (1)..(231): Homolog of NCBI NO: 3811293 NR Description: putative serine/threonine protein kinase
  misc_feature (1)..(267): Homolog of NCBI NO: 416564 NR Description: Abcisic acid-inducible protein kinase
  misc_feature (1)..(267): Homolog of NCBI NO: 481002 NR Description: protein kinase MCPK9 (EC 2.7.1.-) - common ice
  misc_feature (1)..(263): Homolog of NCBI NO: 2055374 NR Description: serine-threonine protein kinase [Triticum
  misc_feature (1)..(267): Homolog of NCBI NO: 14588571 NR Description: protein kinase HvPKABA1 [Hordeum vulgare subsp.
  misc_feature (1)..(267): Homolog of NCBI NO: 11138330 NR Description: putative serine/threonine kinase GDBrPK [Vitis
  misc_feature (1)..(262): Homolog of NCBI NO: 34906840 NR Description: putative protein kinase HvPKABA1(Abcisic
  misc_feature (1)..(262): Homolog of NCBI NO: 29164823 NR Description: abcisic acid-inducible protein kinanase
  misc_feature (1)..(267): Homolog of NCBI NO: 21618139 NR Description: serine-threonine protein kinase, putative
  misc_feature (1)..(267): Homolog of NCBI NO: 15218270 NR Description: serine-threonine protein kinase, putative
MEYAAGGELFGRICSAGRFSEDEARFFFQQLISGVNYCHSLQICHRDLKLENTLLDGSEAPRVKICDFGYSKSGVLHSQPKTTVGTPAYIAPEVLSTKEYDGKIADVWSCGVTLYVMLVGAYPFEDPSDPKDFRKTIGRILKAQYAIPDYVRVSDECRHLLSRIFVANPEKRITIEEIKNHSWFLKNLPVEMYEGSLMMNGPSTQTVEEIVWIIEEARKPITVATGLAGAGGSGGSSNGAIGSSSMDLDDLDTDFDDIDTADLLSPL

SEQ ID NO: 38547 - DNA, 1279 bp, Arabidopsis thaliana
  misc_feature (1)..(1279): Ceres Seq. ID no. 13488872
  misc_feature: MA Experiment ID: 108433 Result: Up-regulated in Transcription
  misc_feature: MA Experiment 108433 PARAMETER Experiment Name: At_rhl_Mutant2_cDNA_P Parameter: Age (day) Value: 7
  misc_feature: MA Experiment 108433 PARAMETER Experiment Name: At_rhl_Mutant2_cDNA_P Parameter: Organism Value: A. thaliana
  misc_feature: MA Experiment 108433 PARAMETER Experiment Name: At_rhl_Mutant2_cDNA_P Parameter: Plant Line Value: rhl Mutant vs. wt landsburg
  misc_feature: MA Experiment 108433 PARAMETER Experiment Name: At_rhl_Mutant2_cDNA_P Parameter: Tissue Value: Roots
  misc_feature: MA Experiment ID: 108489 Result: Down-regulated in Transcription
  misc_feature: MA Experiment ID: 108572 Result: Up-regulated in Transcription
  misc_feature: MA Experiment 108572 PARAMETER Experiment Name: At_Drought_cDNA_P Parameter: Timepoint (hr) Value: 1
  misc_feature: MA Experiment 108572 PARAMETER Experiment Name: At_Drought_cDNA_P Parameter: Tissue Value: Aerial
  misc_feature: MA Experiment 108572 PARAMETER Experiment Name: At_Drought_cDNA_P Parameter: Treatment Value: Drought vs. No Drought
  misc_feature: MA Experiment ID: 108579 Result: Down-regulated in Transcription
  misc_feature: MA Experiment 108579 PARAMETER Experiment Name: At_4deg_Cold_cDNA_P Parameter: Temperature (deg C) Value: 4 vs. 22
  misc_feature: MA Experiment 108579 PARAMETER Experiment Name: At_4deg_Cold_cDNA_P Parameter: Timepoint (hr) Value: 6
  misc_feature: MA Experiment 108579 PARAMETER Experiment Name: At_4deg_Cold_cDNA_P Parameter: Tissue Value: Aerial
  misc_feature: MA Experiment ID: 20000068 Result: Up-regulated in Transcription
  misc_feature: MA Experiment ID: 20000069 Result: Up-regulated in Transcription
  misc_feature: MA Experiment 20000069 PARAMETER Experiment Name: At_100uM_ABA_Mutants_cDNA_P Parameter: Plant Line Value: CS23
  misc_feature: MA Experiment 20000069 PARAMETER Experiment Name: At_100uM_ABA_Mutants_cDNA_P Parameter: Timepoint (hr) Value: 6
  misc_feature: MA Experiment 20000069 PARAMETER Experiment Name: At_100uM_ABA_Mutants_cDNA_P Parameter: Tissue Value: Aerial
  misc_feature: MA Experiment 20000069 PARAMETER Experiment Name: At_100uM_ABA_Mutants_cDNA_P Parameter: Treatment Value: 100uM ABA vs. No Treatment
  misc_feature: MA Experiment ID: 20000071 Result: Up-regulated in Transcription
  misc_feature: MA Experiment 20000071 PARAMETER Experiment Name: At_100uM_ABA_Mutants_cDNA_P Parameter: Plant Line Value: CS8104
  misc_feature: MA Experiment 20000071 PARAMETER Experiment Name: At_100uM_ABA_Mutants_cDNA_P Parameter: Timepoint (hr) Value: 6
  misc_feature: MA Experiment 20000071 PARAMETER Experiment Name: At_100uM_ABA_Mutants_cDNA_P Parameter: Tissue Value: Aerial
  misc_feature: MA Experiment 20000071 PARAMETER Experiment Name: At_100uM_ABA_Mutants_cDNA_P Parameter: Treatment Value: 100uM ABA vs. No Treatment
  misc_feature: MA Experiment ID: 20000072 Result: Up-regulated in Transcription
  misc_feature: MA Experiment 20000072 PARAMETER Experiment Name: At_100uM_ABA_Mutants_cDNA_P Parameter: Plant Line Value: CS8105
  misc_feature: MA Experiment 20000072 PARAMETER Experiment Name: At_100uM_ABA_Mutants_cDNA_P Parameter: Timepoint (hr) Value: 6
  misc_feature: MA Experiment 20000072 PARAMETER Experiment Name: At_100uM_ABA_Mutants_cDNA_P Parameter: Tissue Value: Aerial
  misc_feature: MA Experiment 20000072 PARAMETER Experiment Name: At_100uM_ABA_Mutants_cDNA_P Parameter: Treatment Value: 100uM ABA vs. No Treatment
  misc_feature: MA Experiment ID: 20000086 Result: Up-regulated in Transcription
  misc_feature: MA Experiment 20000086 PARAMETER Experiment Name: At_100uM_ABA_Mutants_cDNA_P Parameter: Plant Line Value: CS22
  misc_feature: MA Experiment 20000086 PARAMETER Experiment Name: At_100uM_ABA_Mutants_cDNA_P Parameter: Timepoint (hr) Value: 6
  misc_feature: MA Experiment 20000086 PARAMETER Experiment Name: At_100uM_ABA_Mutants_cDNA_P Parameter: Tissue Value: Aerial
  misc_feature: MA Experiment 20000086 PARAMETER Experiment Name: At_100uM_ABA_Mutants_cDNA_P Parameter: Treatment Value: 100uM ABA vs. No Treatment
  misc_feature: MA Experiment ID: 20000087 Result: Up-regulated in Transcription
  misc_feature: MA Experiment 20000087 PARAMETER Experiment Name: At_100uM_ABA_Mutants_cDNA_P Parameter: Plant Line Value: WS
  misc_feature: MA Experiment 20000087 PARAMETER Experiment Name: At_100uM_ABA_Mutants_cDNA_P Parameter: Timepoint (hr) Value: 6
  misc_feature: MA Experiment 20000087 PARAMETER Experiment Name: At_100uM_ABA_Mutants_cDNA_P Parameter: Tissue Value: Aerial
  misc_feature: MA Experiment 20000087 PARAMETER Experiment Name: At_100uM_ABA_Mutants_cDNA_P Parameter: Treatment Value: 100uM ABA vs. No Treatment
  misc_feature: MA Experiment ID: 20000113 Result: Up-regulated in Transcription
  misc_feature: MA Experiment 20000113 PARAMETER Experiment Name: At_42deg_Heat_cDNA_P Parameter: Temperature (deg C) Value: 42 vs. 22
  misc_feature: MA Experiment 20000113 PARAMETER Experiment Name: At_42deg_Heat_cDNA_P Parameter: Timepoint (hr) Value: 8
  misc_feature: MA Experiment 20000113 PARAMETER Experiment Name: At_42deg_Heat_cDNA_P Parameter: Tissue Value: Aerial
  misc_feature: MA Experiment ID: 20000117 Result: Up-regulated in Transcription
  misc_feature: MA Experiment 20000117 PARAMETER Experiment Name: At_100uM_ABA_Mutants_cDNA_P Parameter: Plant Line Value: Columbia
  misc_feature: MA Experiment 20000117 PARAMETER Experiment Name: At_100uM_ABA_Mutants_cDNA_P Parameter: Timepoint (hr) Value: 6
  misc_feature: MA Experiment 20000117 PARAMETER Experiment Name: At_100uM_ABA_Mutants_cDNA_P Parameter: Tissue Value: Aerial
  misc_feature: MA Experiment 20000117 PARAMETER Experiment Name: At_100uM_ABA_Mutants_cDNA_P Parameter: Treatment Value: 100uM ABA vs. No Treatment
  misc_feature: MA Experiment ID: 20000184 Result: Down-regulated in Transcription
  misc_feature: MA Experiment 20000184 PARAMETER Experiment Name: At_Shoots__P Parameter: Age (day) Value: 7
  misc_feature: MA Experiment 20000184 PARAMETER Experiment Name: At_Shoots__P Parameter: Tissue Value: Shoots vs. Whole Plant
  misc_feature: MA Experiment ID: 20000211 Result: Up-regulated in Transcription
  misc_feature: MA Experiment 20000211 PARAMETER Experiment Name: At_0.001percent_MeJA__P Parameter: Age (day) Value: 14
  misc_feature: MA Experiment 20000211 PARAMETER Experiment Name: At_0.001percent_MeJA__P Parameter: Organism Value: A. thaliana
  misc_feature: MA Experiment 20000211 PARAMETER Experiment Name: At_0.001percent_MeJA__P Parameter: Plant Line Value: WS
  misc_feature: MA Experiment 20000211 PARAMETER Experiment Name: At_0.001percent_MeJA__P Parameter: Timepoint (hr) Value: 1
  misc_feature: MA Experiment 20000211 PARAMETER Experiment Name: At_0.001percent_MeJA__P Parameter: Tissue Value: Aerial
  misc_feature: MA Experiment 20000211 PARAMETER Experiment Name: At_0.001percent_MeJA__P Parameter: Treatment Value: 0.001percent MeJA vs. No Treatment
  misc_feature: MA Experiment ID: 20000452 Result: Up-regulated in Transcription
  misc_feature: MA Experiment 20000452 PARAMETER Experiment Name: At_CS6879_Shoots-Roots_P Parameter: Age (day) Value: 14
  misc_feature: MA Experiment 20000452 PARAMETER Experiment Name: At_CS6879_Shoots-Roots_P Parameter: Organism Value: A. thaliana
  misc_feature: MA Experiment 20000452 PARAMETER Experiment Name: At_CS6879_Shoots-Roots_P Parameter: Plant Line Value: CS6879 vs. WS
  misc_feature: MA Experiment 20000452 PARAMETER Experiment Name: At_CS6879_Shoots-Roots_P Parameter: Tissue Value: Shoots
  misc_feature: MA Experiment ID: 20001554 Result: Up-regulated in Transcription
  misc_feature: MA Experiment 20001554 PARAMETER Experiment Name: At_Drought_Soil_Dry_P Parameter: Age (day) Value: 21
  misc_feature: MA Experiment 20001554 PARAMETER Experiment Name: At_Drought_Soil_Dry_P Parameter: Organism Value: A. thaliana
  misc_feature: MA Experiment 20001554 PARAMETER Experiment Name: At_Drought_Soil_Dry_P Parameter: Plant Line Value: WS
  misc_feature: MA Experiment 20001554 PARAMETER Experiment Name: At_Drought_Soil_Dry_P Parameter: Post Timepoint (hr) Value: None
  misc_feature: MA Experiment 20001554 PARAMETER Experiment Name: At_Drought_Soil_Dry_P Parameter: Post-Treatment Value: None
  misc_feature: MA Experiment 20001554 PARAMETER Experiment Name: At_Drought_Soil_Dry_P Parameter: Timepoint (day) Value: 7
  misc_feature: MA Experiment 20001554 PARAMETER Experiment Name: At_Drought_Soil_Dry_P Parameter: Treatment Value: Drought vs. No Drought
  misc_feature: MA Experiment ID: 20001555 Result: Up-regulated in Transcription
  misc_feature: MA Experiment 20001555 PARAMETER Experiment Name: At_Drought_Soil_Dry_P Parameter: Age (day) Value: 24
  misc_feature: MA Experiment 20001555 PARAMETER Experiment Name: At_Drought_Soil_Dry_P Parameter: Organism Value: A. thaliana
  misc_feature: MA Experiment 20001555 PARAMETER Experiment Name: At_Drought_Soil_Dry_P Parameter: Plant Line Value: WS
  misc_feature: MA Experiment 20001555 PARAMETER Experiment Name: At_Drought_Soil_Dry_P Parameter: Post Timepoint (hr) Value: None
  misc_feature: MA Experiment 20001555 PARAMETER Experiment Name: At_Drought_Soil_Dry_P Parameter: Post-Treatment Value: None
  misc_feature: MA Experiment 20001555 PARAMETER Experiment Name: At_Drought_Soil_Dry_P Parameter: Timepoint (day) Value: 10
  misc_feature: MA Experiment 20001555 PARAMETER Experiment Name: At_Drought_Soil_Dry_P Parameter: Treatment Value: Drought vs. No Drought
  misc_feature: MA Experiment ID: 20001558 Result: Down-regulated in Transcription
  misc_feature: MA Experiment 20001558 PARAMETER Experiment Name: At_Drought_Soil_Dry_P Parameter: Age (day) Value: 27
  misc_feature: MA Experiment 20001558 PARAMETER Experiment Name: At_Drought_Soil_Dry_P Parameter: Organism Value: A. thaliana
  misc_feature: MA Experiment 20001558 PARAMETER Experiment Name: At_Drought_Soil_Dry_P Parameter: Plant Line Value: WS
  misc_feature: MA Experiment 20001558 PARAMETER Experiment Name: At_Drought_Soil_Dry_P Parameter: Post Timepoint (hr) Value: 6
  misc_feature: MA Experiment 20001558 PARAMETER Experiment Name: At_Drought_Soil_Dry_P Parameter: Post-Treatment Value: Re-Water vs. No Drought
  misc_feature: MA Experiment 20001558 PARAMETER Experiment Name: At_Drought_Soil_Dry_P Parameter: Timepoint (day) Value: 13
  misc_feature: MA Experiment 20001558 PARAMETER Experiment Name: At_Drought_Soil_Dry_P Parameter: Treatment Value: Drought vs. No Drought
  misc_feature: MA Experiment ID: 20001560 Result: Down-regulated in Transcription
  misc_feature: MA Experiment 20001560 PARAMETER Experiment Name: At_Drought_Soil_Dry_P Parameter: Age (day) Value: 28
  misc_feature: MA Experiment 20001560 PARAMETER Experiment Name: At_Drought_Soil_Dry_P Parameter: Organism Value: A. thaliana
  misc_feature: MA Experiment 20001560 PARAMETER Experiment Name: At_Drought_Soil_Dry_P Parameter: Plant Line Value: WS
  misc_feature: MA Experiment 20001560 PARAMETER Experiment Name: At_Drought_Soil_Dry_P Parameter: Post Timepoint (hr) Value: None
  misc_feature: MA Experiment 20001560 PARAMETER Experiment Name: At_Drought_Soil_Dry_P Parameter: Post-Treatment Value: None
  misc_feature: MA Experiment 20001560 PARAMETER Experiment Name: At_Drought_Soil_Dry_P Parameter: Timepoint (day) Value: 14
  misc_feature: MA Experiment 20001560 PARAMETER Experiment Name: At_Drought_Soil_Dry_P Parameter: Treatment Value: Drought vs. No Drought
gttttggtgtttcttcgtcgacgtcgctatctccaatctcattactcccctttctcaatgatcataaaacctacttcgattctactccttatcaactgaatcaccgaaaaacctcaccttttttctttttccgatcatggggaatctgatcagtttgatcttctgctgcgggagaaggcagaggagcaatattcctccggcgatggaaacggctcctcttgatctcccaccgaacagatttgtattcgccgccgtgccaccatatctgaaccctaaccctaactacgttgaccagtatccaggtaactgccttcctccgccagtaactgagccgccgatgctaccgtacaatttcaaccatttgcatcactatcctcccaacagttaccaactacctcatcctttgtttcacggcggtagataccctatactgccgcctcctacgtacgtcgaccagaaagccgtcacgattcgtaacgatgttaatctgaagaagaagactttaacgctcatacccgacccggagaatccgaatcgacttcttgtctccttcacatttgatgcatccatgcccggaaggatcacagttgttttctttgctacagaagatgcagaatgtaatcttagagctacaaaggaagatactttgcctccaatcacttttgatttcggagaaggacttggtcagaagttcatacaatcatctggaacgggtatagacttgacggcgtttaaagattccgagctattcaaggaggtggatacagatgtcttcccgttggcggttaaggcggaggcaactccagcggaagaaggaaagtctggttccaccaatgtgcagattactcaagtggtgtataccaaggagaaaggagagattaaaatagaagtggtgaagcagatactatgggtgaataagaggaggtatgagctgcttgagatttatgggattgagaacacggttgatggttccgatgagggaaaggaatgtgttgtatgcttgtctgaaccacgcgatacaactgttcttccttgcagacacatgtgtatgtgtagcgggtgcgcaaaggcgttaaggtttcagacaaatctgtgcccagtttgcagacaacctgttgagatgcttttggagattaacaagaacggatgaaatggagatggagaatgaacaaatttagttaagcaatcgacttgtgtaatatatgccatgcttaattaagacgtaaaacgttatggttcaatatattataagtggaaactgagttcttaaatagcaatg

SEQ ID NO: 38548 - protein, 337 aa, Arabidopsis thaliana
  peptide (1)..(337): Ceres Seq. ID no. 13488873
  misc_feature (285)..(323): Pfam Name: Zinc finger, C3HC4 type (RING finger) Pfam Description: Zinc finger, C3HC4 type (RING finger)
  misc_feature (31)..(336): Homolog of NCBI NO: 18397483 NR Description: RING zinc finger protein -related [Arabidopsis
  misc_feature (31)..(336): Homolog of NCBI NO: 6862918 NR Description: putative RING zinc finger protein [Arabidopsis
  misc_feature (18)..(333): Homolog of NCBI NO: 15239642 NR Description: expressed protein [Arabidopsis thaliana]
  misc_feature (79)..(337): Homolog of NCBI NO: 15231808 NR Description: expressed protein [Arabidopsis thaliana]
  misc_feature (41)..(336): Homolog of NCBI NO: 37532246 NR Description: putative hydroxyproline-rich glycoprotein
  misc_feature (17)..(303): Homolog of NCBI NO: 30681003 NR Description: putative RING zinc finger protein [Arabidopsis
  misc_feature (17)..(337): Homolog of NCBI NO: 18398633 NR Description: putative RING zinc finger protein [Arabidopsis
  misc_feature (1)..(337): Homolog of NCBI NO: 21618140 NR Description: putative RING zinc finger protein [Arabidopsis
  misc_feature (1)..(337): Homolog of NCBI NO: 15242675 NR Description: expressed protein [Arabidopsis thaliana]
  misc_feature (1)..(337): Homolog of NCBI NO: 26449588 NR Description: unknown protein [Arabidopsis thaliana]
MGNLISLIFCCGRRQRSNIPPAMETAPLDLPPNRFVFAAVPPYLNPNPNYVDQYPGNCLPPPVTEPPMLPYNFNHLHHYPPNSYQLPHPLFHGGRYPILPPPTYVDQKAVTIRNDVNLKKKTLTLIPDPENPNRLLVSFTFDASMPGRITVVFFATEDAECNLRATKEDTLPPITFDFGEGLGQKFIQSSGTGIDLTAFKDSELFKEVDTDVFPLAVKAEATPAEEGKSGSTNVQITQVVYTKEKGEIKIEVVKQILWVNKRRYELLEIYGIENTVDGSDEGKECVVCLSEPRDTTVLPCRHMCMCSGCAKALRFQTNLCPVCRQPVEMLLEINKNG

SEQ ID NO: 38549 - protein, 315 aa, Arabidopsis thaliana
  peptide (1)..(315): Ceres Seq. ID no. 13488874
  misc_feature (263)..(301): Pfam Name: Zinc finger, C3HC4 type (RING finger) Pfam Description: Zinc finger, C3HC4 type (RING finger)
  misc_feature (9)..(314): Homolog of NCBI NO: 18397483 NR Description: RING zinc finger protein -related [Arabidopsis
  misc_feature (9)..(314): Homolog of NCBI NO: 6862918 NR Description: putative RING zinc finger protein [Arabidopsis
  misc_feature (1)..(311): Homolog of NCBI NO: 15239642 NR Description: expressed protein [Arabidopsis thaliana]
  misc_feature (57)..(315): Homolog of NCBI NO: 15231808 NR Description: expressed protein [Arabidopsis thaliana]
  misc_feature (19)..(314): Homolog of NCBI NO: 37532246 NR Description: putative hydroxyproline-rich glycoprotein
  misc_feature (1)..(281): Homolog of NCBI NO: 30681003 NR Description: putative RING zinc finger protein [Arabidopsis
  misc_feature (1)..(315): Homolog of NCBI NO: 18398633 NR Description: putative RING zinc finger protein [Arabidopsis
  misc_feature (1)..(315): Homolog of NCBI NO: 21618140 NR Description: putative RING zinc finger protein [Arabidopsis
  misc_feature (1)..(315): Homolog of NCBI NO: 15242675 NR Description: expressed protein [Arabidopsis thaliana]
  misc_feature (1)..(315): Homolog of NCBI NO: 26449588 NR Description: unknown protein [Arabidopsis thaliana]
METAPLDLPPNRFVFAAVPPYLNPNPNYVDQYPGNCLPPPVTEPPMLPYNFNHLHHYPPNSYQLPHPLFHGGRYPILPPPTYVDQKAVTIRNDVNLKKKTLTLIPDPENPNRLLVSFTFDASMPGRITVVFFATEDAECNLRATKEDTLPPITFDFGEGLGQKFIQSSGTGIDLTAFKDSELFKEVDTDVFPLAVKAEATPAEEGKSGSTNVQITQVVYTKEKGEIKIEVVKQILWVNKRRYELLEIYGIENTVDGSDEGKECVVCLSEPRDTTVLPCRHMCMCSGCAKALRFQTNLCPVCRQPVEMLLEINKNG

SEQ ID NO: 38550 - protein, 270 aa, Arabidopsis thaliana
  peptide (1)..(270): Ceres Seq. ID no. 13488875
  misc_feature (218)..(256): Pfam Name: Zinc finger, C3HC4 type (RING finger) Pfam Description: Zinc finger, C3HC4 type (RING finger)
  misc_feature (1)..(269): Homolog of NCBI NO: 18397483 NR Description: RING zinc finger protein -related [Arabidopsis
  misc_feature (1)..(269): Homolog of NCBI NO: 6862918 NR Description: putative RING zinc finger protein [Arabidopsis
  misc_feature (1)..(266): Homolog of NCBI NO: 15239642 NR Description: expressed protein [Arabidopsis thaliana]
  misc_feature (12)..(270): Homolog of NCBI NO: 15231808 NR Description: expressed protein [Arabidopsis thaliana]
  misc_feature (1)..(269): Homolog of NCBI NO: 37532246 NR Description: putative hydroxyproline-rich glycoprotein
  misc_feature (1)..(236): Homolog of NCBI NO: 30681003 NR Description: putative RING zinc finger protein [Arabidopsis
  misc_feature (1)..(270): Homolog of NCBI NO: 18398633 NR Description: putative RING zinc finger protein [Arabidopsis
  misc_feature (1)..(270): Homolog of NCBI NO: 21618140 NR Description: putative RING zinc finger protein [Arabidopsis
  misc_feature (1)..(270): Homolog of NCBI NO: 15242675 NR Description: expressed protein [Arabidopsis thaliana]
  misc_feature (1)..(270): Homolog of NCBI NO: 26449588 NR Description: unknown protein [Arabidopsis thaliana]
MLPYNFNHLHHYPPNSYQLPHPLFHGGRYPILPPPTYVDQKAVTIRNDVNLKKKTLTLIPDPENPNRLLVSFTFDASMPGRITVVFFATEDAECNLRATKEDTLPPITFDFGEGLGQKFIQSSGTGIDLTAFKDSELFKEVDTDVFPLAVKAEATPAEEGKSGSTNVQITQVVYTKEKGEIKIEVVKQILWVNKRRYELLEIYGIENTVDGSDEGKECVVCLSEPRDTTVLPCRHMCMCSGCAKALRFQTNLCPVCRQPVEMLLEINKNG

SEQ ID NO: 38551 - DNA, 1681 bp, Arabidopsis thaliana
  misc_feature (1)..(1681): Ceres Seq. ID no. 12328781
  misc_feature: MA Experiment ID: 108461 Result: Up-regulated in Transcription
  misc_feature: MA Experiment 108461 PARAMETER Experiment Name: At_Germinating_Seeds_cDNA_P Parameter: Age (day) Value: 1 vs. 0
  misc_feature: MA Experiment 108461 PARAMETER Experiment Name: At_Germinating_Seeds_cDNA_P Parameter: Tissue Value: Germinating Seeds
  misc_feature: MA Experiment ID: 108462 Result: Up-regulated in Transcription
  misc_feature: MA Experiment 108462 PARAMETER Experiment Name: At_Germinating_Seeds_cDNA_P Parameter: Age (day) Value: 2 vs. 0
  misc_feature: MA Experiment 108462 PARAMETER Experiment Name: At_Germinating_Seeds_cDNA_P Parameter: Tissue Value: Germinating Seeds
  misc_feature: MA Experiment ID: 108463 Result: Up-regulated in Transcription
  misc_feature: MA Experiment 108463 PARAMETER Experiment Name: At_Germinating_Seeds_cDNA_P Parameter: Age (day) Value: 3 vs. 0
  misc_feature: MA Experiment 108463 PARAMETER Experiment Name: At_Germinating_Seeds_cDNA_P Parameter: Tissue Value: Germinating Seeds
  misc_feature: MA Experiment ID: 108464 Result: Up-regulated in Transcription
  misc_feature: MA Experiment 108464 PARAMETER Experiment Name: At_Germinating_Seeds_cDNA_P Parameter: Age (day) Value: 4 vs. 0
  misc_feature: MA Experiment 108464 PARAMETER Experiment Name: At_Germinating_Seeds_cDNA_P Parameter: Tissue Value: Germinating Seeds
  misc_feature: MA Experiment ID: 108488 Result: Up-regulated in Transcription
  misc_feature: MA Experiment ID: 108489 Result: Down-regulated in Transcription
  misc_feature: MA Experiment ID: 108573 Result: Down-regulated in Transcription
  misc_feature: MA Experiment 108573 PARAMETER Experiment Name: At_Drought_cDNA_P Parameter: Timepoint (hr) Value: 6
  misc_feature: MA Experiment 108573 PARAMETER Experiment Name: At_Drought_cDNA_P Parameter: Tissue Value: Aerial
  misc_feature: MA Experiment 108573 PARAMETER Experiment Name: At_Drought_cDNA_P Parameter: Treatment Value: Drought vs. No Drought
  misc_feature: MA Experiment ID: 108576 Result: Down-regulated in Transcription
  misc_feature: MA Experiment 108576 PARAMETER Experiment Name: At_42deg_Heat_cDNA_P Parameter: Temperature (deg C) Value: 42 vs. 22
  misc_feature: MA Experiment 108576 PARAMETER Experiment Name: At_42deg_Heat_cDNA_P Parameter: Timepoint (hr) Value: 1
  misc_feature: MA Experiment 108576 PARAMETER Experiment Name: At_42deg_Heat_cDNA_P Parameter: Tissue Value: Aerial
  misc_feature: MA Experiment ID: 108577 Result: Down-regulated in Transcription
  misc_feature: MA Experiment 108577 PARAMETER Experiment Name: At_42deg_Heat_cDNA_P Parameter: Temperature (deg C) Value: 42 vs. 22
  misc_feature: MA Experiment 108577 PARAMETER Experiment Name: At_42deg_Heat_cDNA_P Parameter: Timepoint (hr) Value: 6
  misc_feature: MA Experiment 108577 PARAMETER Experiment Name: At_42deg_Heat_cDNA_P Parameter: Tissue Value: Aerial
  misc_feature: MA Experiment ID: 108594 Result: Down-regulated in Transcription
  misc_feature: MA Experiment 108594 PARAMETER Experiment Name: At_Ler-rhl_Root_cDNA_P Parameter: Plant Line Value: null
  misc_feature: MA Experiment ID: 108607 Result: Down-regulated in Transcription
  misc_feature: MA Experiment 108607 PARAMETER Experiment Name: At_100uM_ABA_cDNA_P Parameter: Timepoint (hr) Value: 4
  misc_feature: MA Experiment 108607 PARAMETER Experiment Name: At_100uM_ABA_cDNA_P Parameter: Tissue Value: Aerial
  misc_feature: MA Experiment 108607 PARAMETER Experiment Name: At_100uM_ABA_cDNA_P Parameter: Treatment Value: 100uM ABA vs. No Treatment
  misc_feature: MA Experiment ID: 108668 Result: Down-regulated in Transcription
  misc_feature: MA Experiment 108668 PARAMETER Experiment Name: At_2mM_SA_cDNA_P Parameter: Plant Line Value: WS
  misc_feature: MA Experiment 108668 PARAMETER Experiment Name: At_2mM_SA_cDNA_P Parameter: Timepoint (hr) Value: 6
  misc_feature: MA Experiment 108668 PARAMETER Experiment Name: At_2mM_SA_cDNA_P Parameter: Treatment Value: 2mM SA vs. No Treatment
  misc_feature: MA Experiment ID: 20000071 Result: Down-regulated in Transcription
  misc_feature: MA Experiment 20000071 PARAMETER Experiment Name: At_100uM_ABA_Mutants_cDNA_P Parameter: Plant Line Value: CS8104
  misc_feature: MA Experiment 20000071 PARAMETER Experiment Name: At_100uM_ABA_Mutants_cDNA_P Parameter: Timepoint (hr) Value: 6
  misc_feature: MA Experiment 20000071 PARAMETER Experiment Name: At_100uM_ABA_Mutants_cDNA_P Parameter: Tissue Value: Aerial
  misc_feature: MA Experiment 20000071 PARAMETER Experiment Name: At_100uM_ABA_Mutants_cDNA_P Parameter: Treatment Value: 100uM ABA vs. No Treatment
  misc_feature: MA Experiment ID: 20000089 Result: Down-regulated in Transcription
  misc_feature: MA Experiment ID: 20000111 Result: Down-regulated in Transcription
  misc_feature: MA Experiment 20000111 PARAMETER Experiment Name: At_42deg_Heat_cDNA_P Parameter: Temperature (deg C) Value: 42 vs. 22
  misc_feature: MA Experiment 20000111 PARAMETER Experiment Name: At_42deg_Heat_cDNA_P Parameter: Timepoint (hr) Value: 6
  misc_feature: MA Experiment 20000111 PARAMETER Experiment Name: At_42deg_Heat_cDNA_P Parameter: Tissue Value: Aerial
  misc_feature: MA Experiment ID: 20000112 Result: Down-regulated in Transcription
  misc_feature: MA Experiment 20000112 PARAMETER Experiment Name: At_42deg_Heat_cDNA_P Parameter: Temperature (deg C) Value: 42 vs. 22
  misc_feature: MA Experiment 20000112 PARAMETER Experiment Name: At_42deg_Heat_cDNA_P Parameter: Timepoint (hr) Value: 2
  misc_feature: MA Experiment 20000112 PARAMETER Experiment Name: At_42deg_Heat_cDNA_P Parameter: Tissue Value: Aerial
  misc_feature: MA Experiment ID: 20000113 Result: Down-regulated in Transcription
  misc_feature: MA Experiment 20000113 PARAMETER Experiment Name: At_42deg_Heat_cDNA_P Parameter: Temperature (deg C) Value: 42 vs. 22
  misc_feature: MA Experiment 20000113 PARAMETER Experiment Name: At_42deg_Heat_cDNA_P Parameter: Timepoint (hr) Value: 8
  misc_feature: MA Experiment 20000113 PARAMETER Experiment Name: At_42deg_Heat_cDNA_P Parameter: Tissue Value: Aerial
  misc_feature: MA Experiment ID: 20000117 Result: Down-regulated in Transcription
  misc_feature: MA Experiment 20000117 PARAMETER Experiment Name: At_100uM_ABA_Mutants_cDNA_P Parameter: Plant Line Value: Columbia
  misc_feature: MA Experiment 20000117 PARAMETER Experiment Name: At_100uM_ABA_Mutants_cDNA_P Parameter: Timepoint (hr) Value: 6
  misc_feature: MA Experiment 20000117 PARAMETER Experiment Name: At_100uM_ABA_Mutants_cDNA_P Parameter: Tissue Value: Aerial
  misc_feature: MA Experiment 20000117 PARAMETER Experiment Name: At_100uM_ABA_Mutants_cDNA_P Parameter: Treatment Value: 100uM ABA vs. No Treatment
  misc_feature: MA Experiment ID: 20000173 Result: Down-regulated in Transcription
  misc_feature: MA Experiment 20000173 PARAMETER Experiment Name: At_42deg_Heat_P Parameter: Age (day) Value: 14
  misc_feature: MA Experiment 20000173 PARAMETER Experiment Name: At_42deg_Heat_P Parameter: Organism Value: A. thaliana
  misc_feature: MA Experiment 20000173 PARAMETER Experiment Name: At_42deg_Heat_P Parameter: Plant Line Value: WS
  misc_feature: MA Experiment 20000173 PARAMETER Experiment Name: At_42deg_Heat_P Parameter: Temperature (deg C) Value: 42 vs. 22
  misc_feature: MA Experiment 20000173 PARAMETER Experiment Name: At_42deg_Heat_P Parameter: Timepoint (hr) Value: 6
  misc_feature: MA Experiment 20000173 PARAMETER Experiment Name: At_42deg_Heat_P Parameter: Tissue Value: Aerial
  misc_feature: MA Experiment ID: 20000179 Result: Up-regulated in Transcription
  misc_feature: MA Experiment 20000179 PARAMETER Experiment Name: At_Germinating_Seeds_P Parameter: Age (hr) Value: 6 vs. 0
  misc_feature: MA Experiment 20000179 PARAMETER Experiment Name: At_Germinating_Seeds_P Parameter: Tissue Value: Germinating Seeds
  misc_feature: MA Experiment ID: 20000182 Result: Down-regulated in Transcription
  misc_feature: MA Experiment 20000182 PARAMETER Experiment Name: At_2mM_SA_P Parameter: Age (day) Value: 14
  misc_feature: MA Experiment 20000182 PARAMETER Experiment Name: At_2mM_SA_P Parameter: Organism Value: A. thaliana
  misc_feature: MA Experiment 20000182 PARAMETER Experiment Name: At_2mM_SA_P Parameter: Plant Line Value: WS
  misc_feature: MA Experiment 20000182 PARAMETER Experiment Name: At_2mM_SA_P Parameter: Timepoint (hr) Value: 6
  misc_feature: MA Experiment 20000182 PARAMETER Experiment Name: At_2mM_SA_P Parameter: Tissue Value: Aerial
  misc_feature: MA Experiment 20000182 PARAMETER Experiment Name: At_2mM_SA_P Parameter: Treatment Value: 2mM SA vs. No Treatment
  misc_feature: MA Experiment ID: 20000184 Result: Up-regulated in Transcription
  misc_feature: MA Experiment 20000184 PARAMETER Experiment Name: At_Shoots__P Parameter: Age (day) Value: 7
  misc_feature: MA Experiment 20000184 PARAMETER Experiment Name: At_Shoots__P Parameter: Tissue Value: Shoots vs. Whole Plant
  misc_feature: MA Experiment ID: 20000224 Result: Down-regulated in Transcription
  misc_feature: MA Experiment ID: 20000227 Result: Down-regulated in Transcription
  misc_feature: MA Experiment 20000227 PARAMETER Experiment Name: At_Root-Tips-vs-Tops_P Parameter: Tissue Value: Root Tips vs. Root Tops
  misc_feature: MA Experiment ID: 20000437 Result: Down-regulated in Transcription
  misc_feature: MA Experiment 20000437 PARAMETER Experiment Name: At_Drought_P Parameter: Age (day) Value: 8
  misc_feature: MA Experiment 20000437 PARAMETER Experiment Name: At_Drought_P Parameter: Organism Value: A. thaliana
  misc_feature: MA Experiment 20000437 PARAMETER Experiment Name: At_Drought_P Parameter: Plant Line Value: WS
  misc_feature: MA Experiment 20000437 PARAMETER Experiment Name: At_Drought_P Parameter: Timepoint (hr) Value: 24
  misc_feature: MA Experiment 20000437 PARAMETER Experiment Name: At_Drought_P Parameter: Tissue Value: Whole Plant
  misc_feature: MA Experiment 20000437 PARAMETER Experiment Name: At_Drought_P Parameter: Treatment Value: Drought vs. No Drought
  misc_feature: MA Experiment ID: 20001247 Result: Up-regulated in Transcription
  misc_feature: MA Experiment 20001247 PARAMETER Experiment Name: At_Far-red-induction_P Parameter: Age (day) Value: 7
  misc_feature: MA Experiment 20001247 PARAMETER Experiment Name: At_Far-red-induction_P Parameter: Light Value: Far-red vs. White
  misc_feature: MA Experiment 20001247 PARAMETER Experiment Name: At_Far-red-induction_P Parameter: Organism Value: A. thaliana
  misc_feature: MA Experiment 20001247 PARAMETER Experiment Name: At_Far-red-induction_P Parameter: Plant Line Value: Columbia
  misc_feature: MA Experiment 20001247 PARAMETER Experiment Name: At_Far-red-induction_P Parameter: Timepoint (hr) Value: 1
  misc_feature: MA Experiment 20001247 PARAMETER Experiment Name: At_Far-red-induction_P Parameter: Tissue Value: Whole Plant
  misc_feature: MA Experiment ID: 20001451 Result: Down-regulated in Transcription
  misc_feature: MA Experiment 20001451 PARAMETER Experiment Name: At_Far-red-induction_P Parameter: Age (day) Value: 7
  misc_feature: MA Experiment 20001451 PARAMETER Experiment Name: At_Far-red-induction_P Parameter: Light Value: Far-red vs. White
  misc_feature: MA Experiment 20001451 PARAMETER Experiment Name: At_Far-red-induction_P Parameter: Organism Value: A. thaliana
  misc_feature: MA Experiment 20001451 PARAMETER Experiment Name: At_Far-red-induction_P Parameter: Plant Line Value: Columbia
  misc_feature: MA Experiment 20001451 PARAMETER Experiment Name: At_Far-red-induction_P Parameter: Timepoint (hr) Value: 24
  misc_feature: MA Experiment 20001451 PARAMETER Experiment Name: At_Far-red-induction_P Parameter: Tissue Value: Whole Plant
  misc_feature: MA Experiment ID: 20001757 Result: Up-regulated in Transcription
  misc_feature: MA Experiment 20001757 PARAMETER Experiment Name: At_50mM_NH4NO3_L-to-H_P Parameter: Timepoint (hr) Value: 6
  misc_feature: MA Experiment 20001757 PARAMETER Experiment Name: At_50mM_NH4NO3_L-to-H_P Parameter: Tissue Value: Leaf
  misc_feature: MA Experiment 20001757 PARAMETER Experiment Name: At_50mM_NH4NO3_L-to-H_P Parameter: Treatment Value: 50mM NH4NO3 vs 100mM Mannitol
  misc_feature: MA Experiment ID: 20001904 Result: Down-regulated in Transcription
  misc_feature: MA Experiment 20001904 PARAMETER Experiment Name: At_Drought_Reproduction_P Parameter: Age (day) Value: 37
  misc_feature: MA Experiment 20001904 PARAMETER Experiment Name: At_Drought_Reproduction_P Parameter: Organism Value: A. thaliana
  misc_feature: MA Experiment 20001904 PARAMETER Experiment Name: At_Drought_Reproduction_P Parameter: Plant Line Value: WS
  misc_feature: MA Experiment 20001904 PARAMETER Experiment Name: At_Drought_Reproduction_P Parameter: Timepoint (day) Value: 7
  misc_feature: MA Experiment 20001904 PARAMETER Experiment Name: At_Drought_Reproduction_P Parameter: Tissue Value: Rosettes
  misc_feature: MA Experiment 20001904 PARAMETER Experiment Name: At_Drought_Reproduction_P Parameter: Treatment Value: Drought vs. No Drought
  misc_feature: MA Experiment ID: 20001905 Result: Down-regulated in Transcription
  misc_feature: MA Experiment 20001905 PARAMETER Experiment Name: At_Drought_Reproduction_P Parameter: Age (day) Value: 40
  misc_feature: MA Experiment 20001905 PARAMETER Experiment Name: At_Drought_Reproduction_P Parameter: Organism Value: A. thaliana
  misc_feature: MA Experiment 20001905 PARAMETER Experiment Name: At_Drought_Reproduction_P Parameter: Plant Line Value: WS
  misc_feature: MA Experiment 20001905 PARAMETER Experiment Name: At_Drought_Reproduction_P Parameter: Timepoint (day) Value: 10
  misc_feature: MA Experiment 20001905 PARAMETER Experiment Name: At_Drought_Reproduction_P Parameter: Tissue Value: Rosettes
  misc_feature: MA Experiment 20001905 PARAMETER Experiment Name: At_Drought_Reproduction_P Parameter: Treatment Value: Drought vs. No Drought
  misc_feature: MA Experiment ID: 20001906 Result: Down-regulated in Transcription
  misc_feature: MA Experiment 20001906 PARAMETER Experiment Name: At_Drought_Reproduction_P Parameter: Age (day) Value: 35
  misc_feature: MA Experiment 20001906 PARAMETER Experiment Name: At_Drought_Reproduction_P Parameter: Organism Value: A. thaliana
  misc_feature: MA Experiment 20001906 PARAMETER Experiment Name: At_Drought_Reproduction_P Parameter: Plant Line Value: WS
  misc_feature: MA Experiment 20001906 PARAMETER Experiment Name: At_Drought_Reproduction_P Parameter: Timepoint (day) Value: 5
  misc_feature: MA Experiment 20001906 PARAMETER Experiment Name: At_Drought_Reproduction_P Parameter: Tissue Value: Siliques
  misc_feature: MA Experiment 20001906 PARAMETER Experiment Name: At_Drought_Reproduction_P Parameter: Treatment Value: Drought vs. No Drought
  misc_feature: MA Experiment ID: 20001911 Result: Down-regulated in Transcription
  misc_feature: MA Experiment 20001911 PARAMETER Experiment Name: At_Drought_Reproduction_P Parameter: Age (day) Value: 40
  misc_feature: MA Experiment 20001911 PARAMETER Experiment Name: At_Drought_Reproduction_P Parameter: Organism Value: A. thaliana
  misc_feature: MA Experiment 20001911 PARAMETER Experiment Name: At_Drought_Reproduction_P Parameter: Plant Line Value: WS
  misc_feature: MA Experiment 20001911 PARAMETER Experiment Name: At_Drought_Reproduction_P Parameter: Timepoint (day) Value: 10
  misc_feature: MA Experiment 20001911 PARAMETER Experiment Name: At_Drought_Reproduction_P Parameter: Tissue Value: Flowers
  misc_feature: MA Experiment 20001911 PARAMETER Experiment Name: At_Drought_Reproduction_P Parameter: Treatment Value: Drought vs. No Drought
aatcaacacacacaaacacacacacacacagcctttttccttcgttgatcgattgttaagctcgatccaatggcggataacaccgataatcggagatccttatggggagttccggagaagcttcagcttcacatagcgatgctgacgttgcaattcggttacgccggattccacgtggtgtctcgagctgctcttaacatgggaatcagcaaactcgtcttccctgtttatcgtaacatcatcgccttgcttcttctccttcccttcgcttacttccttgaaaagaaggagagaccagcgattactctcaactttctcatccagttcttctttttggcactcataggaataacagcgaaccaaggattttacttgttgggactggacaacacttcaccaacatttgcttcctccatgcaaaactctgttcccgccattacctttctcatggctgctcttctcaggattgagaaagtaagaataaacagaagagacggtatctccaaaatcttaggaacagctctttgtgtcgccggagcttccgtcatcaccctctataaaggtccaaccatctacactccggctagccacctccacgctcatctactcaccacaaactccgccgtcttagcgccgctaggaaacgccgcgcctaaaaactggacccttggttgcatctacctaatcggtcactgtctctcgtggtcaggctggcttgttttccaagctccggttcttaagtcttatccagcgaggctctcggttacgtcttacacttgtttcttcggaatcattcagttcttgatcattgctgctttctgtgaaagagattctcaggcttgggtttttcactccggttgggagcttttcaccatcctctacgccggaatcgtagcgtctggaatcgcgtttgcggttcagatttggtgtattgacagagggggtccagtcttcgttgctgtttaccagcctgttcagactcttgtcgttgcgatcatggcttctattgcgttaggcgaagaattttatttgggcgggattattggagcggtcttgatcatagcgggactttacttcgtattgtacggtaagagcgaagagaggaaatttgcagcgcttgagaaggcagcgatccagtcctccgcggagcatggtattgaacgtgcacctgtttctcgcaactccatcaagtcgtccatcacaacaccactactccatcagtcaacggacaatgtttgactactttggacaaatcactctccagctaataattacaaatgccattacccaattaaaagggaacaatggtgtgccgttgtgttttatgacttttgtgtctgctttttttcttagtgttttctcttcttttttttttctaaaaaattattaattacctaagaaaggtttttgaagaaaggaaaaaaaatggtggatgagacatcattgttcatgaggatgatgatgatgatgatagtgatgaagaagactatgtgggagctttggattgagacttttctatatataatatctggctgatatattagtgccattttttcttacatttcttgtggggtttttctttcctttatcatcaatagaatgttataatttgcatttatgatctttagtaattatcactgtcggggatgtttaaaatggattagatcaaacgctttgttct

SEQ ID NO: 38552 - protein, 389 aa, Arabidopsis thaliana
  peptide (1)..(389): Ceres Seq. ID no. 12328782
  misc_feature (210)..(339): Pfam Name: Integral membrane protein DUF6 Pfam Description: Integral membrane protein DUF6
  misc_feature (241)..(382): Homolog of NCBI NO: 11358354 NR Description: hypothetical protein T4D2.140 - Arabidopsis
  misc_feature (14)..(206): Homolog of NCBI NO: 11358354 NR Description: hypothetical protein T4D2.140 - Arabidopsis
  misc_feature (24)..(382): Homolog of NCBI NO: 21593130 NR Description: nodulin-like protein [Arabidopsis thaliana]
  misc_feature (14)..(372): Homolog of NCBI NO: 15229596 NR Description: integral membrane protein, putative; protein id:
  misc_feature (14)..(372): Homolog of NCBI NO: 9294076 NR Description: nodulin-like protein [Arabidopsis thaliana]
  misc_feature (14)..(382): Homolog of NCBI NO: 18409794 NR Description: putative protein
  misc_feature (16)..(381): Homolog of NCBI NO: 34895316 NR Description: putative nodulin [Oryza sativa (japonica
  misc_feature (1)..(93): Homolog of NCBI NO: 25404978 NR Description: protein F10A5.28 [imported] - Arabidopsis
  misc_feature (151)..(389): Homolog of NCBI NO: 25404978 NR Description: protein F10A5.28 [imported] - Arabidopsis
  misc_feature (1)..(389): Homolog of NCBI NO: 18410867 NR Description: nodulin-like protein
MADNTDNRRSLWGVPEKLQLHIAMLTLQFGYAGFHVVSRAALNMGISKLVFPVYRNIIALLLLLPFAYFLEKKERPAITLNFLIQFFFLALIGITANQGFYLLGLDNTSPTFASSMQNSVPAITFLMAALLRIEKVRINRRDGISKILGTALCVAGASVITLYKGPTIYTPASHLHAHLLTTNSAVLAPLGNAAPKNWTLGCIYLIGHCLSWSGWLVFQAPVLKSYPARLSVTSYTCFFGIIQFLIIAAFCERDSQAWVFHSGWELFTILYAGIVASGIAFAVQIWCIDRGGPVFVAVYQPVQTLVVAIMASIALGEEFYLGGIIGAVLIIAGLYFVLYGKSEERKFAALEKAAIQSSAEHGIERAPVSRNSIKSSITTPLLHQSTDNV

SEQ ID NO: 38553 - protein, 366 aa, Arabidopsis thaliana
  peptide (1)..(366): Ceres Seq. ID no. 12328783
  misc_feature (187)..(316): Pfam Name: Integral membrane protein DUF6 Pfam Description: Integral membrane protein DUF6
  misc_feature (218)..(359): Homolog of NCBI NO: 11358354 NR Description: hypothetical protein T4D2.140 - Arabidopsis
  misc_feature (1)..(183): Homolog of NCBI NO: 11358354 NR Description: hypothetical protein T4D2.140 - Arabidopsis
  misc_feature (1)..(359): Homolog of NCBI NO: 21593130 NR Description: nodulin-like protein [Arabidopsis thaliana]
  misc_feature (1)..(349): Homolog of NCBI NO: 15229596 NR Description: integral membrane protein, putative; protein id:
  misc_feature (1)..(349): Homolog of NCBI NO: 9294076 NR Description: nodulin-like protein [Arabidopsis thaliana]
  misc_feature (1)..(359): Homolog of NCBI NO: 18409794 NR Description: putative protein
  misc_feature (1)..(358): Homolog of NCBI NO: 34895316 NR Description: putative nodulin [Oryza sativa (japonica
  misc_feature (1)..(70): Homolog of NCBI NO: 25404978 NR Description: protein F10A5.28 [imported] - Arabidopsis
  misc_feature (128)..(366): Homolog of NCBI NO: 25404978 NR Description: protein F10A5.28 [imported] - Arabidopsis
  misc_feature (1)..(366): Homolog of NCBI NO: 18410867 NR Description: nodulin-like protein
MLTLQFGYAGFHVVSRAALNMGISKLVFPVYRNIIALLLLLPFAYFLEKKERPAITLNFLIQFFFLALIGITANQGFYLLGLDNTSPTFASSMQNSVPAITFLMAALLRIEKVRINRRDGISKILGTALCVAGASVITLYKGPTIYTPASHLHAHLLTTNSAVLAPLGNAAPKNWTLGCIYLIGHCLSWSGWLVFQAPVLKSYPARLSVTSYTCFFGIIQFLIIAAFCERDSQAWVFHSGWELFTILYAGIVASGIAFAVQIWCIDRGGPVFVAVYQPVQTLVVAIMASIALGEEFYLGGIIGAVLIIAGLYFVLYGKSEERKFAALEKAAIQSSAEHGIERAPVSRNSIKSSITTPLLHQSTDNV

SEQ ID NO: 38554 - protein, 346 aa, Arabidopsis thaliana
  peptide (1)..(346): Ceres Seq. ID no. 12328784
  misc_feature (167)..(296): Pfam Name: Integral membrane protein DUF6 Pfam Description: Integral membrane protein DUF6
  misc_feature (198)..(339): Homolog of NCBI NO: 11358354 NR Description: hypothetical protein T4D2.140 - Arabidopsis
  misc_feature (1)..(163): Homolog of NCBI NO: 11358354 NR Description: hypothetical protein T4D2.140 - Arabidopsis
  misc_feature (1)..(339): Homolog of NCBI NO: 21593130 NR Description: nodulin-like protein [Arabidopsis thaliana]
  misc_feature (1)..(329): Homolog of NCBI NO: 15229596 NR Description: integral membrane protein, putative; protein id:
  misc_feature (1)..(329): Homolog of NCBI NO: 9294076 NR Description: nodulin-like protein [Arabidopsis thaliana]
  misc_feature (1)..(339): Homolog of NCBI NO: 18409794 NR Description: putative protein
  misc_feature (1)..(338): Homolog of NCBI NO: 34895316 NR Description: putative nodulin [Oryza sativa (japonica
  misc_feature (1)..(50): Homolog of NCBI NO: 25404978 NR Description: protein F10A5.28 [imported] - Arabidopsis
  misc_feature (108)..(346): Homolog of NCBI NO: 25404978 NR Description: protein F10A5.28 [imported] - Arabidopsis
  misc_feature (1)..(346): Homolog of NCBI NO: 18410867 NR Description: nodulin-like protein
MGISKLVFPVYRNIIALLLLLPFAYFLEKKERPAITLNFLIQFFFLALIGITANQGFYLLGLDNTSPTFASSMQNSVPAITFLMAALLRIEKVRINRRDGISKILGTALCVAGASVITLYKGPTIYTPASHLHAHLLTTNSAVLAPLGNAAPKNWTLGCIYLIGHCLSWSGWLVFQAPVLKSYPARLSVTSYTCFFGIIQFLIIAAFCERDSQAWVFHSGWELFTILYAGIVASGIAFAVQIWCIDRGGPVFVAVYQPVQTLVVAIMASIALGEEFYLGGIIGAVLIIAGLYFVLYGKSEERKFAALEKAAIQSSAEHGIERAPVSRNSIKSSITTPLLHQSTDNV

SEQ ID NO: 38555 - DNA, 1355 bp, Arabidopsis thaliana
  misc_feature (1)..(1355): Ceres Seq. ID no. 12579532
  misc_feature: MA Experiment ID: 108435 Result: Down-regulated in Transcription
  misc_feature: MA Experiment 108435 PARAMETER Experiment Name: At_stm_Mutants_cDNA_P Parameter: Plant Line Value: wt Landsburg vs stm
  misc_feature: MA Experiment 108435 PARAMETER Experiment Name: At_stm_Mutants_cDNA_P Parameter: Tissue Value: Shoot Apical Meristem Region
  misc_feature: MA Experiment ID: 108461 Result: Up-regulated in Transcription
  misc_feature: MA Experiment 108461 PARAMETER Experiment Name: At_Germinating_Seeds_cDNA_P Parameter: Age (day) Value: 1 vs. 0
  misc_feature: MA Experiment 108461 PARAMETER Experiment Name: At_Germinating_Seeds_cDNA_P Parameter: Tissue Value: Germinating Seeds
  misc_feature: MA Experiment ID: 108462 Result: Up-regulated in Transcription
  misc_feature: MA Experiment 108462 PARAMETER Experiment Name: At_Germinating_Seeds_cDNA_P Parameter: Age (day) Value: 2 vs. 0
  misc_feature: MA Experiment 108462 PARAMETER Experiment Name: At_Germinating_Seeds_cDNA_P Parameter: Tissue Value: Germinating Seeds
  misc_feature: MA Experiment ID: 108463 Result: Up-regulated in Transcription
  misc_feature: MA Experiment 108463 PARAMETER Experiment Name: At_Germinating_Seeds_cDNA_P Parameter: Age (day) Value: 3 vs. 0
  misc_feature: MA Experiment 108463 PARAMETER Experiment Name: At_Germinating_Seeds_cDNA_P Parameter: Tissue Value: Germinating Seeds
  misc_feature: MA Experiment ID: 108464 Result: Up-regulated in Transcription
  misc_feature: MA Experiment 108464 PARAMETER Experiment Name: At_Germinating_Seeds_cDNA_P Parameter: Age (day) Value: 4 vs. 0
  misc_feature: MA Experiment 108464 PARAMETER Experiment Name: At_Germinating_Seeds_cDNA_P Parameter: Tissue Value: Germinating Seeds
  misc_feature: MA Experiment ID: 108561 Result: Up-regulated in Transcription
  misc_feature: MA Experiment 108561 PARAMETER Experiment Name: At_100uM_ABA_cDNA_P Parameter: Timepoint (hr) Value: 6
  misc_feature: MA Experiment 108561 PARAMETER Experiment Name: At_100uM_ABA_cDNA_P Parameter: Tissue Value: Aerial
  misc_feature: MA Experiment 108561 PARAMETER Experiment Name: At_100uM_ABA_cDNA_P Parameter: Treatment Value: 100uM ABA vs. No Treatment
  misc_feature: MA Experiment ID: 108573 Result: Up-regulated in Transcription
  misc_feature: MA Experiment 108573 PARAMETER Experiment Name: At_Drought_cDNA_P Parameter: Timepoint (hr) Value: 6
  misc_feature: MA Experiment 108573 PARAMETER Experiment Name: At_Drought_cDNA_P Parameter: Tissue Value: Aerial
  misc_feature: MA Experiment 108573 PARAMETER Experiment Name: At_Drought_cDNA_P Parameter: Treatment Value: Drought vs. No Drought
  misc_feature: MA Experiment ID: 108574 Result: Up-regulated in Transcription
  misc_feature: MA Experiment 108574 PARAMETER Experiment Name: At_Wounding__cDNA_P Parameter: Timepoint (hr) Value: 1
  misc_feature: MA Experiment 108574 PARAMETER Experiment Name: At_Wounding__cDNA_P Parameter: Tissue Value: Aerial
  misc_feature: MA Experiment 108574 PARAMETER Experiment Name: At_Wounding__cDNA_P Parameter: Treatment Value: Wounding vs. No Wounding
  misc_feature: MA Experiment ID: 108579 Result: Up-regulated in Transcription
  misc_feature: MA Experiment 108579 PARAMETER Experiment Name: At_4deg_Cold_cDNA_P Parameter: Temperature (deg C) Value: 4 vs. 22
  misc_feature: MA Experiment 108579 PARAMETER Experiment Name: At_4deg_Cold_cDNA_P Parameter: Timepoint (hr) Value: 6
  misc_feature: MA Experiment 108579 PARAMETER Experiment Name: At_4deg_Cold_cDNA_P Parameter: Tissue Value: Aerial
  misc_feature: MA Experiment ID: 108585 Result: Up-regulated in Transcription
  misc_feature: MA Experiment 108585 PARAMETER Experiment Name: At_5mM_NaNP_cDNA_P Parameter: Timepoint (hr) Value: 6
  misc_feature: MA Experiment 108585 PARAMETER Experiment Name: At_5mM_NaNP_cDNA_P Parameter: Tissue Value: Aerial
  misc_feature: MA Experiment 108585 PARAMETER Experiment Name: At_5mM_NaNP_cDNA_P Parameter: Treatment Value: null
  misc_feature: MA Experiment ID: 108594 Result: Down-regulated in Transcription
  misc_feature: MA Experiment 108594 PARAMETER Experiment Name: At_Ler-rhl_Root_cDNA_P Parameter: Plant Line Value: null
  misc_feature: MA Experiment ID: 108595 Result: Down-regulated in Transcription
  misc_feature: MA Experiment 108595 PARAMETER Experiment Name: At_Ler-pi_Ovule_cDNA_P Parameter: Plant Line Value: null
  misc_feature: MA Experiment ID: 108607 Result: Up-regulated in Transcription
  misc_feature: MA Experiment 108607 PARAMETER Experiment Name: At_100uM_ABA_cDNA_P Parameter: Timepoint (hr) Value: 4
  misc_feature: MA Experiment 108607 PARAMETER Experiment Name: At_100uM_ABA_cDNA_P Parameter: Tissue Value: Aerial
  misc_feature: MA Experiment 108607 PARAMETER Experiment Name: At_100uM_ABA_cDNA_P Parameter: Treatment Value: 100uM ABA vs. No Treatment
  misc_feature: MA Experiment ID: 108608 Result: Up-regulated in Transcription
  misc_feature: MA Experiment 108608 PARAMETER Experiment Name: At_100uM_ABA_cDNA_P Parameter: Timepoint (hr) Value: 1
  misc_feature: MA Experiment 108608 PARAMETER Experiment Name: At_100uM_ABA_cDNA_P Parameter: Tissue Value: Aerial
  misc_feature: MA Experiment 108608 PARAMETER Experiment Name: At_100uM_ABA_cDNA_P Parameter: Treatment Value: 100uM ABA vs. No Treatment
  misc_feature: MA Experiment ID: 108668 Result: Up-regulated in Transcription
  misc_feature: MA Experiment 108668 PARAMETER Experiment Name: At_2mM_SA_cDNA_P Parameter: Plant Line Value: WS
  misc_feature: MA Experiment 108668 PARAMETER Experiment Name: At_2mM_SA_cDNA_P Parameter: Timepoint (hr) Value: 6
  misc_feature: MA Experiment 108668 PARAMETER Experiment Name: At_2mM_SA_cDNA_P Parameter: Treatment Value: 2mM SA vs. No Treatment
  misc_feature: MA Experiment ID: 20000113 Result: Up-regulated in Transcription
  misc_feature: MA Experiment 20000113 PARAMETER Experiment Name: At_42deg_Heat_cDNA_P Parameter: Temperature (deg C) Value: 42 vs. 22
  misc_feature: MA Experiment 20000113 PARAMETER Experiment Name: At_42deg_Heat_cDNA_P Parameter: Timepoint (hr) Value: 8
  misc_feature: MA Experiment 20000113 PARAMETER Experiment Name: At_42deg_Heat_cDNA_P Parameter: Tissue Value: Aerial
  misc_feature: MA Experiment ID: 20000166 Result: Up-regulated in Transcription
  misc_feature: MA Experiment 20000166 PARAMETER Experiment Name: At_100uM_ABA_P Parameter: Age (day) Value: 14
  misc_feature: MA Experiment 20000166 PARAMETER Experiment Name: At_100uM_ABA_P Parameter: Organism Value: A. thaliana
  misc_feature: MA Experiment 20000166 PARAMETER Experiment Name: At_100uM_ABA_P Parameter: Plant Line Value: WS
  misc_feature: MA Experiment 20000166 PARAMETER Experiment Name: At_100uM_ABA_P Parameter: Timepoint (hr) Value: 1
  misc_feature: MA Experiment 20000166 PARAMETER Experiment Name: At_100uM_ABA_P Parameter: Tissue Value: Aerial
  misc_feature: MA Experiment 20000166 PARAMETER Experiment Name: At_100uM_ABA_P Parameter: Treatment Value: 100uM ABA vs. No Treatment
  misc_feature: MA Experiment ID: 20000179 Result: Up-regulated in Transcription
  misc_feature: MA Experiment 20000179 PARAMETER Experiment Name: At_Germinating_Seeds_P Parameter: Age (hr) Value: 6 vs. 0
  misc_feature: MA Experiment 20000179 PARAMETER Experiment Name: At_Germinating_Seeds_P Parameter: Tissue Value: Germinating Seeds
  misc_feature: MA Experiment ID: 20000180 Result: Up-regulated in Transcription
  misc_feature: MA Experiment 20000180 PARAMETER Experiment Name: At_Germinating_Seeds_P Parameter: Age (hr) Value: 24 vs. 0
  misc_feature: MA Experiment 20000180 PARAMETER Experiment Name: At_Germinating_Seeds_P Parameter: Tissue Value: Germinating Seeds
  misc_feature: MA Experiment ID: 20000182 Result: Up-regulated in Transcription
  misc_feature: MA Experiment 20000182 PARAMETER Experiment Name: At_2mM_SA_P Parameter: Age (day) Value: 14
  misc_feature: MA Experiment 20000182 PARAMETER Experiment Name: At_2mM_SA_P Parameter: Organism Value: A. thaliana
  misc_feature: MA Experiment 20000182 PARAMETER Experiment Name: At_2mM_SA_P Parameter: Plant Line Value: WS
  misc_feature: MA Experiment 20000182 PARAMETER Experiment Name: At_2mM_SA_P Parameter: Timepoint (hr) Value: 6
  misc_feature: MA Experiment 20000182 PARAMETER Experiment Name: At_2mM_SA_P Parameter: Tissue Value: Aerial
  misc_feature: MA Experiment 20000182 PARAMETER Experiment Name: At_2mM_SA_P Parameter: Treatment Value: 2mM SA vs. No Treatment
  misc_feature: MA Experiment ID: 20000184 Result: Up-regulated in Transcription
  misc_feature: MA Experiment 20000184 PARAMETER Experiment Name: At_Shoots__P Parameter: Age (day) Value: 7
  misc_feature: MA Experiment 20000184 PARAMETER Experiment Name: At_Shoots__P Parameter: Tissue Value: Shoots vs. Whole Plant
  misc_feature: MA Experiment ID: 20000185 Result: Up-regulated in Transcription
  misc_feature: MA Experiment 20000185 PARAMETER Experiment Name: At_Roots__P Parameter: Age (day) Value: 7 vs. 21
  misc_feature: MA Experiment 20000185 PARAMETER Experiment Name: At_Roots__P Parameter: Organism Value: A. thaliana
  misc_feature: MA Experiment 20000185 PARAMETER Experiment Name: At_Roots__P Parameter: Tissue Value: Roots vs. Whole Plant
  misc_feature: MA Experiment ID: 20000213 Result: Up-regulated in Transcription
  misc_feature: MA Experiment 20000213 PARAMETER Experiment Name: At_4deg_Cold_P Parameter: Timepoint (hr) Value: 2
  misc_feature: MA Experiment ID: 20000224 Result: Up-regulated in Transcription
  misc_feature: MA Experiment ID: 20000267 Result: Up-regulated in Transcription
  misc_feature: MA Experiment 20000267 PARAMETER Experiment Name: At_Drought_P Parameter: Age (day) Value: 7
  misc_feature: MA Experiment 20000267 PARAMETER Experiment Name: At_Drought_P Parameter: Organism Value: A. thaliana
  misc_feature: MA Experiment 20000267 PARAMETER Experiment Name: At_Drought_P Parameter: Plant Line Value: WS
  misc_feature: MA Experiment 20000267 PARAMETER Experiment Name: At_Drought_P Parameter: Timepoint (hr) Value: 6
  misc_feature: MA Experiment 20000267 PARAMETER Experiment Name: At_Drought_P Parameter: Tissue Value: Whole Plant
  misc_feature: MA Experiment 20000267 PARAMETER Experiment Name: At_Drought_P Parameter: Treatment Value: Drought vs. No Drought
  misc_feature: MA Experiment ID: 20000436 Result: Up-regulated in Transcription
  misc_feature: MA Experiment 20000436 PARAMETER Experiment Name: At_Drought_P Parameter: Age (day) Value: 7
  misc_feature: MA Experiment 20000436 PARAMETER Experiment Name: At_Drought_P Parameter: Organism Value: A. thaliana
  misc_feature: MA Experiment 20000436 PARAMETER Experiment Name: At_Drought_P Parameter: Plant Line Value: WS
  misc_feature: MA Experiment 20000436 PARAMETER Experiment Name: At_Drought_P Parameter: Timepoint (hr) Value: 12
  misc_feature: MA Experiment 20000436 PARAMETER Experiment Name: At_Drought_P Parameter: Tissue Value: Whole Plant
  misc_feature: MA Experiment 20000436 PARAMETER Experiment Name: At_Drought_P Parameter: Treatment Value: Drought vs. No Drought
  misc_feature: MA Experiment ID: 20000438 Result: Up-regulated in Transcription
  misc_feature: MA Experiment 20000438 PARAMETER Experiment Name: At_Shoots__P Parameter: Age (day) Value: 14
  misc_feature: MA Experiment 20000438 PARAMETER Experiment Name: At_Shoots__P Parameter: Tissue Value: Shoots vs. Whole Plant
  misc_feature: MA Experiment ID: 20000439 Result: Up-regulated in Transcription
  misc_feature: MA Experiment 20000439 PARAMETER Experiment Name: At_Roots__P Parameter: Age (day) Value: 14 vs. 21
  misc_feature: MA Experiment 20000439 PARAMETER Experiment Name: At_Roots__P Parameter: Organism Value: A. thaliana
  misc_feature: MA Experiment 20000439 PARAMETER Experiment Name: At_Roots__P Parameter: Tissue Value: Roots vs. Whole Plant
  misc_feature: MA Experiment ID: 20000441 Result: Up-regulated in Transcription
  misc_feature: MA Experiment 20000441 PARAMETER Experiment Name: At_1uM_BR-BRZ__P Parameter: Tissue Value: Shoot Apices
  misc_feature: MA Experiment 20000441 PARAMETER Experiment Name: At_1uM_BR-BRZ__P Parameter: Treatment Value: 1uM BR vs. No Treatment
  misc_feature: MA Experiment ID: 20000443 Result: Up-regulated in Transcription
  misc_feature: MA Experiment 20000443 PARAMETER Experiment Name: At_1uM_BR-BRZ__P Parameter: Tissue Value: Shoot Apices
  misc_feature: MA Experiment 20000443 PARAMETER Experiment Name: At_1uM_BR-BRZ__P Parameter: Treatment Value: 1uM BRZ vs. No Treatment
  misc_feature: MA Experiment ID: 20000453 Result: Up-regulated in Transcription
  misc_feature: MA Experiment 20000453 PARAMETER Experiment Name: At_100uM_ABA_P Parameter: Age (day) Value: 15
  misc_feature: MA Experiment 20000453 PARAMETER Experiment Name: At_100uM_ABA_P Parameter: Organism Value: A. thaliana
  misc_feature: MA Experiment 20000453 PARAMETER Experiment Name: At_100uM_ABA_P Parameter: Plant Line Value: WS
  misc_feature: MA Experiment 20000453 PARAMETER Experiment Name: At_100uM_ABA_P Parameter: Timepoint (hr) Value: 24
  misc_feature: MA Experiment 20000453 PARAMETER Experiment Name: At_100uM_ABA_P Parameter: Tissue Value: Aerial
  misc_feature: MA Experiment 20000453 PARAMETER Experiment Name: At_100uM_ABA_P Parameter: Treatment Value: 100uM ABA vs. No Treatment
  misc_feature: MA Experiment ID: 20000709 Result: Up-regulated in Transcription
  misc_feature: MA Experiment 20000709 PARAMETER Experiment Name: At_15mM_NH4NO3_L-to-H_P Parameter: Age (hr) Value: 14
  misc_feature: MA Experiment 20000709 PARAMETER Experiment Name: At_15mM_NH4NO3_L-to-H_P Parameter: Organism Value: A. thaliana
  misc_feature: MA Experiment 20000709 PARAMETER Experiment Name: At_15mM_NH4NO3_L-to-H_P Parameter: Plant Line Value: WS
  misc_feature: MA Experiment 20000709 PARAMETER Experiment Name: At_15mM_NH4NO3_L-to-H_P Parameter: Timepoint (hr) Value: 4
  misc_feature: MA Experiment 20000709 PARAMETER Experiment Name: At_15mM_NH4NO3_L-to-H_P Parameter: Tissue Value: Aerial
  misc_feature: MA Experiment 20000709 PARAMETER Experiment Name: At_15mM_NH4NO3_L-to-H_P Parameter: Treatment Value: 15mM NH4NO3 vs. 30mM Mannitol
  misc_feature: MA Experiment ID: 20001248 Result: Down-regulated in Transcription
  misc_feature: MA Experiment 20001248 PARAMETER Experiment Name: At_Far-red-induction_P Parameter: Age (day) Value: 7
  misc_feature: MA Experiment 20001248 PARAMETER Experiment Name: At_Far-red-induction_P Parameter: Light Value: Far-red vs. White
  misc_feature: MA Experiment 20001248 PARAMETER Experiment Name: At_Far-red-induction_P Parameter: Organism Value: A. thaliana
  misc_feature: MA Experiment 20001248 PARAMETER Experiment Name: At_Far-red-induction_P Parameter: Plant Line Value: Columbia
  misc_feature: MA Experiment 20001248 PARAMETER Experiment Name: At_Far-red-induction_P Parameter: Timepoint (hr) Value: 4
  misc_feature: MA Experiment 20001248 PARAMETER Experiment Name: At_Far-red-induction_P Parameter: Tissue Value: Whole Plant
  misc_feature: MA Experiment ID: 20001451 Result: Up-regulated in Transcription
  misc_feature: MA Experiment 20001451 PARAMETER Experiment Name: At_Far-red-induction_P Parameter: Age (day) Value: 7
  misc_feature: MA Experiment 20001451 PARAMETER Experiment Name: At_Far-red-induction_P Parameter: Light Value: Far-red vs. White
  misc_feature: MA Experiment 20001451 PARAMETER Experiment Name: At_Far-red-induction_P Parameter: Organism Value: A. thaliana
  misc_feature: MA Experiment 20001451 PARAMETER Experiment Name: At_Far-red-induction_P Parameter: Plant Line Value: Columbia
  misc_feature: MA Experiment 20001451 PARAMETER Experiment Name: At_Far-red-induction_P Parameter: Timepoint (hr) Value: 24
  misc_feature: MA Experiment 20001451 PARAMETER Experiment Name: At_Far-red-induction_P Parameter: Tissue Value: Whole Plant
  misc_feature: MA Experiment ID: 20001503 Result: Up-regulated in Transcription
  misc_feature: MA Experiment 20001503 PARAMETER Experiment Name: At_Far-red-enriched_P Parameter: Age (day) Value: 7
  misc_feature: MA Experiment 20001503 PARAMETER Experiment Name: At_Far-red-enriched_P Parameter: Light Value: Far-red enriched vs. White
  misc_feature: MA Experiment 20001503 PARAMETER Experiment Name: At_Far-red-enriched_P Parameter: Organism Value: A. thaliana
  misc_feature: MA Experiment 20001503 PARAMETER Experiment Name: At_Far-red-enriched_P Parameter: Plant Line Value: Columbia
  misc_feature: MA Experiment 20001503 PARAMETER Experiment Name: At_Far-red-enriched_P Parameter: Timepoint (day) Value: 3
  misc_feature: MA Experiment 20001503 PARAMETER Experiment Name: At_Far-red-enriched_P Parameter: Tissue Value: Whole Plant
  misc_feature: MA Experiment ID: 20001554 Result: Up-regulated in Transcription
  misc_feature: MA Experiment 20001554 PARAMETER Experiment Name: At_Drought_Soil_Dry_P Parameter: Age (day) Value: 21
  misc_feature: MA Experiment 20001554 PARAMETER Experiment Name: At_Drought_Soil_Dry_P Parameter: Organism Value: A. thaliana
  misc_feature: MA Experiment 20001554 PARAMETER Experiment Name: At_Drought_Soil_Dry_P Parameter: Plant Line Value: WS
  misc_feature: MA Experiment 20001554 PARAMETER Experiment Name: At_Drought_Soil_Dry_P Parameter: Post Timepoint (hr) Value: None
  misc_feature: MA Experiment 20001554 PARAMETER Experiment Name: At_Drought_Soil_Dry_P Parameter: Post-Treatment Value: None
  misc_feature: MA Experiment 20001554 PARAMETER Experiment Name: At_Drought_Soil_Dry_P Parameter: Timepoint (day) Value: 7
  misc_feature: MA Experiment 20001554 PARAMETER Experiment Name: At_Drought_Soil_Dry_P Parameter: Treatment Value: Drought vs. No Drought
  misc_feature: MA Experiment ID: 20001559 Result: Up-regulated in Transcription
  misc_feature: MA Experiment 20001559 PARAMETER Experiment Name: At_Drought_Soil_Dry_P Parameter: Age (day) Value: 28
  misc_feature: MA Experiment 20001559 PARAMETER Experiment Name: At_Drought_Soil_Dry_P Parameter: Organism Value: A. thaliana
  misc_feature: MA Experiment 20001559 PARAMETER Experiment Name: At_Drought_Soil_Dry_P Parameter: Plant Line Value: WS
  misc_feature: MA Experiment 20001559 PARAMETER Experiment Name: At_Drought_Soil_Dry_P Parameter: Post Timepoint (hr) Value: 29
  misc_feature: MA Experiment 20001559 PARAMETER Experiment Name: At_Drought_Soil_Dry_P Parameter: Post-Treatment Value: Re-Water vs. No Drought
  misc_feature: MA Experiment 20001559 PARAMETER Experiment Name: At_Drought_Soil_Dry_P Parameter: Timepoint (day) Value: 14
  misc_feature: MA Experiment 20001559 PARAMETER Experiment Name: At_Drought_Soil_Dry_P Parameter: Treatment Value: Drought vs. No Drought
  misc_feature: MA Experiment ID: 20001771 Result: Up-regulated in Transcription
  misc_feature: MA Experiment 20001771 PARAMETER Experiment Name: At_Far-red-enriched-adult_P Parameter: Age (day) Value: 28
  misc_feature: MA Experiment 20001771 PARAMETER Experiment Name: At_Far-red-enriched-adult_P Parameter: Light Value: Far-red enriched vs. White
  misc_feature: MA Experiment 20001771 PARAMETER Experiment Name: At_Far-red-enriched-adult_P Parameter: Organism Value: A. thaliana
  misc_feature: MA Experiment 20001771 PARAMETER Experiment Name: At_Far-red-enriched-adult_P Parameter: Plant Line Value: Columbia
  misc_feature: MA Experiment 20001771 PARAMETER Experiment Name: At_Far-red-enriched-adult_P Parameter: Timepoint (hr) Value: 16
  misc_feature: MA Experiment 20001771 PARAMETER Experiment Name: At_Far-red-enriched-adult_P Parameter: Tissue Value: Aerial
  misc_feature: MA Experiment ID: 20001904 Result: Up-regulated in Transcription
  misc_feature: MA Experiment 20001904 PARAMETER Experiment Name: At_Drought_Reproduction_P Parameter: Age (day) Value: 37
  misc_feature: MA Experiment 20001904 PARAMETER Experiment Name: At_Drought_Reproduction_P Parameter: Organism Value: A. thaliana
  misc_feature: MA Experiment 20001904 PARAMETER Experiment Name: At_Drought_Reproduction_P Parameter: Plant Line Value: WS
  misc_feature: MA Experiment 20001904 PARAMETER Experiment Name: At_Drought_Reproduction_P Parameter: Timepoint (day) Value: 7
  misc_feature: MA Experiment 20001904 PARAMETER Experiment Name: At_Drought_Reproduction_P Parameter: Tissue Value: Rosettes
  misc_feature: MA Experiment 20001904 PARAMETER Experiment Name: At_Drought_Reproduction_P Parameter: Treatment Value: Drought vs. No Drought
  misc_feature: MA Experiment ID: 20001905 Result: Up-regulated in Transcription
  misc_feature: MA Experiment 20001905 PARAMETER Experiment Name: At_Drought_Reproduction_P Parameter: Age (day) Value: 40
  misc_feature: MA Experiment 20001905 PARAMETER Experiment Name: At_Drought_Reproduction_P Parameter: Organism Value: A. thaliana
  misc_feature: MA Experiment 20001905 PARAMETER Experiment Name: At_Drought_Reproduction_P Parameter: Plant Line Value: WS
  misc_feature: MA Experiment 20001905 PARAMETER Experiment Name: At_Drought_Reproduction_P Parameter: Timepoint (day) Value: 10
  misc_feature: MA Experiment 20001905 PARAMETER Experiment Name: At_Drought_Reproduction_P Parameter: Tissue Value: Rosettes
  misc_feature: MA Experiment 20001905 PARAMETER Experiment Name: At_Drought_Reproduction_P Parameter: Treatment Value: Drought vs. No Drought
  misc_feature: MA Experiment ID: 20001906 Result: Up-regulated in Transcription
  misc_feature: MA Experiment 20001906 PARAMETER Experiment Name: At_Drought_Reproduction_P Parameter: Age (day) Value: 35
  misc_feature: MA Experiment 20001906 PARAMETER Experiment Name: At_Drought_Reproduction_P Parameter: Organism Value: A. thaliana
  misc_feature: MA Experiment 20001906 PARAMETER Experiment Name: At_Drought_Reproduction_P Parameter: Plant Line Value: WS
  misc_feature: MA Experiment 20001906 PARAMETER Experiment Name: At_Drought_Reproduction_P Parameter: Timepoint (day) Value: 5
  misc_feature: MA Experiment 20001906 PARAMETER Experiment Name: At_Drought_Reproduction_P Parameter: Tissue Value: Siliques
  misc_feature: MA Experiment 20001906 PARAMETER Experiment Name: At_Drought_Reproduction_P Parameter: Treatment Value: Drought vs. No Drought
  misc_feature: MA Experiment ID: 20001908 Result: Up-regulated in Transcription
  misc_feature: MA Experiment 20001908 PARAMETER Experiment Name: At_Drought_Reproduction_P Parameter: Age (day) Value: 40
  misc_feature: MA Experiment 20001908 PARAMETER Experiment Name: At_Drought_Reproduction_P Parameter: Organism Value: A. thaliana
  misc_feature: MA Experiment 20001908 PARAMETER Experiment Name: At_Drought_Reproduction_P Parameter: Plant Line Value: WS
  misc_feature: MA Experiment 20001908 PARAMETER Experiment Name: At_Drought_Reproduction_P Parameter: Timepoint (day) Value: 10
  misc_feature: MA Experiment 20001908 PARAMETER Experiment Name: At_Drought_Reproduction_P Parameter: Tissue Value: Siliques
  misc_feature: MA Experiment 20001908 PARAMETER Experiment Name: At_Drought_Reproduction_P Parameter: Treatment Value: Drought vs. No Drought
  misc_feature: MA Experiment ID: 20001910 Result: Up-regulated in Transcription
  misc_feature: MA Experiment 20001910 PARAMETER Experiment Name: At_Drought_Reproduction_P Parameter: Age (day) Value: 37
  misc_feature: MA Experiment 20001910 PARAMETER Experiment Name: At_Drought_Reproduction_P Parameter: Organism Value: A. thaliana
  misc_feature: MA Experiment 20001910 PARAMETER Experiment Name: At_Drought_Reproduction_P Parameter: Plant Line Value: WS
  misc_feature: MA Experiment 20001910 PARAMETER Experiment Name: At_Drought_Reproduction_P Parameter: Timepoint (day) Value: 7
  misc_feature: MA Experiment 20001910 PARAMETER Experiment Name: At_Drought_Reproduction_P Parameter: Tissue Value: Flowers
  misc_feature: MA Experiment 20001910 PARAMETER Experiment Name: At_Drought_Reproduction_P Parameter: Treatment Value: Drought vs. No Drought
  misc_feature: MA Experiment ID: 20001911 Result: Up-regulated in Transcription
  misc_feature: MA Experiment 20001911 PARAMETER Experiment Name: At_Drought_Reproduction_P Parameter: Age (day) Value: 40
  misc_feature: MA Experiment 20001911 PARAMETER Experiment Name: At_Drought_Reproduction_P Parameter: Organism Value: A. thaliana
  misc_feature: MA Experiment 20001911 PARAMETER Experiment Name: At_Drought_Reproduction_P Parameter: Plant Line Value: WS
  misc_feature: MA Experiment 20001911 PARAMETER Experiment Name: At_Drought_Reproduction_P Parameter: Timepoint (day) Value: 10
  misc_feature: MA Experiment 20001911 PARAMETER Experiment Name: At_Drought_Reproduction_P Parameter: Tissue Value: Flowers
  misc_feature: MA Experiment 20001911 PARAMETER Experiment Name: At_Drought_Reproduction_P Parameter: Treatment Value: Drought vs. No Drought
acataccaacagtcaacaatatctcttgttccggcggaaaaatgcccattaatcagaaaattccgacttggtttgccgttccggctgtttttgctgtcttgtccgtaatctcgtatcaaaccttaattgtgccggaaaatttagagggcgccaaaaatgtattgacaatggctaagaccataccaattcctgtcgctggaccgggagagcattgagtttgacccaaaaggagaaggtccttatgctgcggtcgtggacggccgtattctcaagtggcgcggcgatgatctcggctgggttgattttgcctacacatctcctcacagagggaactgttcaaaaactgaagtagtgcctacttgtggaaggccattaggacttactttcgagaagaaaacgggagatttgtacatatgtgatggttacttggggctcatgaaagttggaccagagggaggcttggccgagttaattgttgatgaagccgaaggtcgtaaagttatgtttgctaaccaaggggatatagacgaagaggaagatgtcttttacttcaatgatagtagtgacaagtatcatttcagggacgtatttttcgtggctgtcagtggggagcggtcgggaagagtgatcagatacgataagaagacgaaagaagccaaagttatcatggacaatctcgtttgtaacaacggtttggctctaaacaaagaccggtcttttctaattacatgcgagtccggcacaagtcttgtccaccgatactggattaaaggtcccaaagccgggactcgtgatatctttgcgaaggtcccaggttaccctgacaacatccggctgacatcaactggagacttttggattggtttacactgcaagaaaaatctgatagggagattgattgtgaagtacaaatggcttgggaaattggtagaaaagacaatgaaactggagtacgtgattgcttttattaacggatttaaaccgcacggagtcgtcgtgaaaatctccggcgagacgggagaggtacttgagttacttgaggacaaagaaggaaagacaatgaagtatgtaagcgaggcttatgaaagagatgatggaaagttgtggtttgggtctgtttactggccagccgtttgggttcttgatcgcaaatgagtgatcatgttgtatctacttataattatgttcgttttgtatattaataaatgtttatctgagttaaatcagcatttgtttgttgcgggaaaataaatgtgaatcctactttttcaaattgttttttttttctttgtattaatgctcccaagatgtttattgaactgaacacactagaatgaattatagcttttgtaacc

SEQ ID NO: 38556 - protein, 239 aa, Arabidopsis thaliana
  peptide (1)..(239): Ceres Seq. ID no. 12579533
  misc_feature (1)..(233): Pfam Name: Strictosidine synthase Pfam Description: Strictosidine synthase
  misc_feature (106)..(237): Homolog of NCBI NO: 25335889 NR Description: protein T27G7.16 [imported] - Arabidopsis
  misc_feature (1)..(109): Homolog of NCBI NO: 25335889 NR Description: protein T27G7.16 [imported] - Arabidopsis
  misc_feature (1)..(237): Homolog of NCBI NO: 18390900 NR Description: strictosidine synthase-related
  misc_feature (1)..(237): Homolog of NCBI NO: 30694556 NR Description: strictosidine synthase-related [Arabidopsis
  misc_feature (1)..(237): Homolog of NCBI NO: 11280567 NR Description: hypothetical protein F24I3.110 - Arabidopsis
  misc_feature (1)..(239): Homolog of NCBI NO: 15227324 NR Description: strictosidine synthase-related; protein id:
  misc_feature (1)..(237): Homolog of NCBI NO: 6759491 NR Description: hypothetical protein [Arabidopsis thaliana]
  misc_feature (1)..(237): Homolog of NCBI NO: 13877837 NR Description: unknown protein [Arabidopsis thaliana]
  misc_feature (1)..(237): Homolog of NCBI NO: 15230182 NR Description: strictosidine synthase-related
  misc_feature (1)..(239): Homolog of NCBI NO: 15230200 NR Description: strictosidine synthase-related
MKVGPEGGLAELIVDEAEGRKVMFANQGDIDEEEDVFYFNDSSDKYHFRDVFFVAVSGERSGRVIRYDKKTKEAKVIMDNLVCNNGLALNKDRSFLITCESGTSLVHRYWIKGPKAGTRDIFAKVPGYPDNIRLTSTGDFWIGLHCKKNLIGRLIVKYKWLGKLVEKTMKLEYVIAFINGFKPHGVVVKISGETGEVLELLEDKEGKTMKYVSEAYERDDGKLWFGSVYWPAVWVLDRK

SEQ ID NO: 38557 - protein, 217 aa, Arabidopsis thaliana
  peptide (1)..(217): Ceres Seq. ID no. 12579534
  misc_feature (1)..(211): Pfam Name: Strictosidine synthase Pfam Description: Strictosidine synthase
  misc_feature (84)..(215): Homolog of NCBI NO: 25335889 NR Description: protein T27G7.16 [imported] - Arabidopsis
  misc_feature (1)..(87): Homolog of NCBI NO: 25335889 NR Description: protein T27G7.16 [imported] - Arabidopsis
  misc_feature (1)..(215): Homolog of NCBI NO: 18390900 NR Description: strictosidine synthase-related
  misc_feature (1)..(215): Homolog of NCBI NO: 30694556 NR Description: strictosidine synthase-related [Arabidopsis
  misc_feature (1)..(215): Homolog of NCBI NO: 11280567 NR Description: hypothetical protein F24I3.110 - Arabidopsis
  misc_feature (1)..(217): Homolog of NCBI NO: 15227324 NR Description: strictosidine synthase-related; protein id:
  misc_feature (1)..(215): Homolog of NCBI NO: 6759491 NR Description: hypothetical protein [Arabidopsis thaliana]
  misc_feature (1)..(215): Homolog of NCBI NO: 13877837 NR Description: unknown protein [Arabidopsis thaliana]
  misc_feature (1)..(215): Homolog of NCBI NO: 15230182 NR Description: strictosidine synthase-related
  misc_feature (1)..(217): Homolog of NCBI NO: 15230200 NR Description: strictosidine synthase-related
MFANQGDIDEEEDVFYFNDSSDKYHFRDVFFVAVSGERSGRVIRYDKKTKEAKVIMDNLVCNNGLALNKDRSFLITCESGTSLVHRYWIKGPKAGTRDIFAKVPGYPDNIRLTSTGDFWIGLHCKKNLIGRLIVKYKWLGKLVEKTMKLEYVIAFINGFKPHGVVVKISGETGEVLELLEDKEGKTMKYVSEAYERDDGKLWFGSVYWPAVWVLDRK

SEQ ID NO: 38558 - protein, 162 aa, Arabidopsis thaliana
  peptide (1)..(162): Ceres Seq. ID no. 12579535
  misc_feature (1)..(156): Pfam Name: Strictosidine synthase Pfam Description: Strictosidine synthase
  misc_feature (29)..(160): Homolog of NCBI NO: 25335889 NR Description: protein T27G7.16 [imported] - Arabidopsis
  misc_feature (1)..(32): Homolog of NCBI NO: 25335889 NR Description: protein T27G7.16 [imported] - Arabidopsis
  misc_feature (1)..(160): Homolog of NCBI NO: 18390900 NR Description: strictosidine synthase-related
  misc_feature (1)..(160): Homolog of NCBI NO: 30694556 NR Description: strictosidine synthase-related [Arabidopsis
  misc_feature (1)..(160): Homolog of NCBI NO: 11280567 NR Description: hypothetical protein F24I3.110 - Arabidopsis
  misc_feature (1)..(162): Homolog of NCBI NO: 15227324 NR Description: strictosidine synthase-related; protein id:
  misc_feature (1)..(160): Homolog of NCBI NO: 6759491 NR Description: hypothetical protein [Arabidopsis thaliana]
  misc_feature (1)..(160): Homolog of NCBI NO: 13877837 NR Description: unknown protein [Arabidopsis thaliana]
  misc_feature (1)..(160): Homolog of NCBI NO: 15230182 NR Description: strictosidine synthase-related
  misc_feature (1)..(162): Homolog of NCBI NO: 15230200 NR Description: strictosidine synthase-related
MDNLVCNNGLALNKDRSFLITCESGTSLVHRYWIKGPKAGTRDIFAKVPGYPDNIRLTSTGDFWIGLHCKKNLIGRLIVKYKWLGKLVEKTMKLEYVIAFINGFKPHGVVVKISGETGEVLELLEDKEGKTMKYVSEAYERDDGKLWFGSVYWPAVWVLDRK

SEQ ID NO: 38559 - DNA, 1879 bp, Arabidopsis thaliana; identical to SEQ ID NO: 28153
  misc_feature (1)..(1879): Ceres Seq. ID no. 13487772
  misc_feature: MA Experiment ID: 108462 Result: Down-regulated in Transcription
  misc_feature: MA Experiment 108462 PARAMETER Experiment Name: At_Germinating_Seeds_cDNA_P Parameter: Age (day) Value: 2 vs. 0
  misc_feature: MA Experiment 108462 PARAMETER Experiment Name: At_Germinating_Seeds_cDNA_P Parameter: Tissue Value: Germinating Seeds
  misc_feature: MA Experiment ID: 108463 Result: Down-regulated in Transcription
  misc_feature: MA Experiment 108463 PARAMETER Experiment Name: At_Germinating_Seeds_cDNA_P Parameter: Age (day) Value: 3 vs. 0
  misc_feature: MA Experiment 108463 PARAMETER Experiment Name: At_Germinating_Seeds_cDNA_P Parameter: Tissue Value: Germinating Seeds
  misc_feature: MA Experiment ID: 108464 Result: Down-regulated in Transcription
  misc_feature: MA Experiment 108464 PARAMETER Experiment Name: At_Germinating_Seeds_cDNA_P Parameter: Age (day) Value: 4 vs. 0
  misc_feature: MA Experiment 108464 PARAMETER Experiment Name: At_Germinating_Seeds_cDNA_P Parameter: Tissue Value: Germinating Seeds
  misc_feature: MA Experiment ID: 108572 Result: Down-regulated in Transcription
  misc_feature: MA Experiment 108572 PARAMETER Experiment Name: At_Drought_cDNA_P Parameter: Timepoint (hr) Value: 1
  misc_feature: MA Experiment 108572 PARAMETER Experiment Name: At_Drought_cDNA_P Parameter: Tissue Value: Aerial
  misc_feature: MA Experiment 108572 PARAMETER Experiment Name: At_Drought_cDNA_P Parameter: Treatment Value: Drought vs. No Drought
  misc_feature: MA Experiment ID: 108573 Result: Down-regulated in Transcription
  misc_feature: MA Experiment 108573 PARAMETER Experiment Name: At_Drought_cDNA_P Parameter: Timepoint (hr) Value: 6
  misc_feature: MA Experiment 108573 PARAMETER Experiment Name: At_Drought_cDNA_P Parameter: Tissue Value: Aerial
  misc_feature: MA Experiment 108573 PARAMETER Experiment Name: At_Drought_cDNA_P Parameter: Treatment Value: Drought vs. No Drought
  misc_feature: MA Experiment ID: 108585 Result: Down-regulated in Transcription
  misc_feature: MA Experiment 108585 PARAMETER Experiment Name: At_5mM_NaNP_cDNA_P Parameter: Timepoint (hr) Value: 6
  misc_feature: MA Experiment 108585 PARAMETER Experiment Name: At_5mM_NaNP_cDNA_P Parameter: Tissue Value: Aerial
  misc_feature: MA Experiment 108585 PARAMETER Experiment Name: At_5mM_NaNP_cDNA_P Parameter: Treatment Value: null
  misc_feature: MA Experiment ID: 20000087 Result: Down-regulated in Transcription
  misc_feature: MA Experiment 20000087 PARAMETER Experiment Name: At_100uM_ABA_Mutants_cDNA_P Parameter: Plant Line Value: WS
  misc_feature: MA Experiment 20000087 PARAMETER Experiment Name: At_100uM_ABA_Mutants_cDNA_P Parameter: Timepoint (hr) Value: 6
  misc_feature: MA Experiment 20000087 PARAMETER Experiment Name: At_100uM_ABA_Mutants_cDNA_P Parameter: Tissue Value: Aerial
  misc_feature: MA Experiment 20000087 PARAMETER Experiment Name: At_100uM_ABA_Mutants_cDNA_P Parameter: Treatment Value: 100uM ABA vs. No Treatment
  misc_feature: MA Experiment ID: 20000088 Result: Up-regulated in Transcription
  misc_feature: MA Experiment 20000088 PARAMETER Experiment Name: At_100uM_ABA_Mutants_cDNA_P Parameter: Plant Line Value: Landsberg
  misc_feature: MA Experiment 20000088 PARAMETER Experiment Name: At_100uM_ABA_Mutants_cDNA_P Parameter: Timepoint (hr) Value: 6
  misc_feature: MA Experiment 20000088 PARAMETER Experiment Name: At_100uM_ABA_Mutants_cDNA_P Parameter: Tissue Value: Aerial
  misc_feature: MA Experiment 20000088 PARAMETER Experiment Name: At_100uM_ABA_Mutants_cDNA_P Parameter: Treatment Value: 100uM ABA vs. No Treatment
  misc_feature: MA Experiment ID: 20000089 Result: Up-regulated in Transcription
  misc_feature: MA Experiment ID: 20000090 Result: Up-regulated in Transcription
  misc_feature: MA Experiment ID: 20000093 Result: Up-regulated in Transcription
  misc_feature: MA Experiment 20000093 PARAMETER Experiment Name: At_42deg_Heat_cDNA_P Parameter: Temperature (deg C) Value: 42 vs. 22
  misc_feature: MA Experiment 20000093 PARAMETER Experiment Name: At_42deg_Heat_cDNA_P Parameter: Timepoint (hr) Value: 0.5
  misc_feature: MA Experiment 20000093 PARAMETER Experiment Name: At_42deg_Heat_cDNA_P Parameter: Tissue Value: Aerial
  misc_feature: MA Experiment ID: 20001556 Result: Up-regulated in Transcription
  misc_feature: MA Experiment 20001556 PARAMETER Experiment Name: At_Drought_Soil_Dry_P Parameter: Age (day) Value: 26
  misc_feature: MA Experiment 20001556 PARAMETER Experiment Name: At_Drought_Soil_Dry_P Parameter: Organism Value: A. thaliana
  misc_feature: MA Experiment 20001556 PARAMETER Experiment Name: At_Drought_Soil_Dry_P Parameter: Plant Line Value: WS
  misc_feature: MA Experiment 20001556 PARAMETER Experiment Name: At_Drought_Soil_Dry_P Parameter: Post Timepoint (hr) Value: None
  misc_feature: MA Experiment 20001556 PARAMETER Experiment Name: At_Drought_Soil_Dry_P Parameter: Post-Treatment Value: None
  misc_feature: MA Experiment 20001556 PARAMETER Experiment Name: At_Drought_Soil_Dry_P Parameter: Timepoint (day) Value: 12
  misc_feature: MA Experiment 20001556 PARAMETER Experiment Name: At_Drought_Soil_Dry_P Parameter: Treatment Value: Drought vs. No Drought

SEQ ID NO: 38560 - protein, 561 aa, Arabidopsis thaliana; identical to SEQ ID NO: 28154
  peptide (1)..(561): Ceres Seq. ID no. 13487773
  misc_feature (62)..(558): Homolog of NCBI NO: 40740610 NR Description: hypothetical protein AN3592.2 [Aspergillus
  misc_feature (143)..(558): Homolog of NCBI NO: 7441503 NR Description: calnexin - maize (fragment)
  misc_feature (29)..(561): Homolog of NCBI NO: 11131766 NR Description: Calnexin homolog precursor
  misc_feature (38)..(561): Homolog of NCBI NO: 11131469 NR Description: Calnexin homolog precursor
  misc_feature (39)..(561): Homolog of NCBI NO: 21740628 NR Description: OSJNBb0012E08.10 [Oryza sativa (japonica
  misc_feature (56)..(561): Homolog of NCBI NO: 3334138 NR Description: CALNEXIN HOMOLOG PRECURSOR
  misc_feature (30)..(561): Homolog of NCBI NO: 31321896 NR Description: putative papillar cell-specific calnexin
  misc_feature (30)..(561): Homolog of NCBI NO: 15240353 NR Description: calnexin 1 (CNX1) [Arabidopsis thaliana]
  misc_feature (30)..(561): Homolog of NCBI NO: 473878 NR Description: calnexin homolog
  misc_feature (30)..(561): Homolog of NCBI NO: 15240773 NR Description: calnexin, putative [Arabidopsis thaliana]
  misc_feature (62)..(558): Homolog of NCBI NO: 40740610 NR Description: hypothetical protein AN3592.2 [Aspergillus
  misc_feature (143)..(558): Homolog of NCBI NO: 7441503 NR Description: calnexin - maize (fragment)
  misc_feature (29)..(561): Homolog of NCBI NO: 11131766 NR Description: Calnexin homolog precursor
  misc_feature (38)..(561): Homolog of NCBI NO: 11131469 NR Description: Calnexin homolog precursor
  misc_feature (39)..(561): Homolog of NCBI NO: 21740628 NR Description: OSJNBb0012E08.10 [Oryza sativa (japonica
  misc_feature (56)..(561): Homolog of NCBI NO: 3334138 NR Description: CALNEXIN HOMOLOG PRECURSOR
  misc_feature (30)..(561): Homolog of NCBI NO: 31321896 NR Description: putative papillar cell-specific calnexin
  misc_feature (30)..(561): Homolog of NCBI NO: 15240353 NR Description: calnexin 1 (CNX1) [Arabidopsis thaliana]
  misc_feature (30)..(561): Homolog of NCBI NO: 473878 NR Description: calnexin homolog
  misc_feature (30)..(561): Homolog of NCBI NO: 15240773 NR Description: calnexin, putative [Arabidopsis thaliana]

SEQ ID NO: 38561 - protein, 532 aa, Arabidopsis thaliana; identical to SEQ ID NO: 28155
  peptide (1)..(532): Ceres Seq. ID no. 13487774
  misc_feature (33)..(529): Homolog of NCBI NO: 40740610 NR Description: hypothetical protein AN3592.2 [Aspergillus
  misc_feature (114)..(529): Homolog of NCBI NO: 7441503 NR Description: calnexin - maize (fragment)
  misc_feature (1)..(532): Homolog of NCBI NO: 11131766 NR Description: Calnexin homolog precursor
  misc_feature (9)..(532): Homolog of NCBI NO: 11131469 NR Description: Calnexin homolog precursor
  misc_feature (10)..(532): Homolog of NCBI NO: 21740628 NR Description: OSJNBb0012E08.10 [Oryza sativa (japonica
  misc_feature (27)..(532): Homolog of NCBI NO: 3334138 NR Description: CALNEXIN HOMOLOG PRECURSOR
  misc_feature (1)..(532): Homolog of NCBI NO: 31321896 NR Description: putative papillar cell-specific calnexin
  misc_feature (1)..(532): Homolog of NCBI NO: 15240353 NR Description: calnexin 1 (CNX1) [Arabidopsis thaliana]
  misc_feature (1)..(532): Homolog of NCBI NO: 473878 NR Description: calnexin homolog
  misc_feature (1)..(532): Homolog of NCBI NO: 15240773 NR Description: calnexin, putative [Arabidopsis thaliana]
  misc_feature (33)..(529): Homolog of NCBI NO: 40740610 NR Description: hypothetical protein AN3592.2 [Aspergillus
  misc_feature (114)..(529): Homolog of NCBI NO: 7441503 NR Description: calnexin - maize (fragment)
  misc_feature (1)..(532): Homolog of NCBI NO: 11131766 NR Description: Calnexin homolog precursor
  misc_feature (9)..(532): Homolog of NCBI NO: 11131469 NR Description: Calnexin homolog precursor
  misc_feature (10)..(532): Homolog of NCBI NO: 21740628 NR Description: OSJNBb0012E08.10 [Oryza sativa (japonica
  misc_feature (27)..(532): Homolog of NCBI NO: 3334138 NR Description: CALNEXIN HOMOLOG PRECURSOR
  misc_feature (1)..(532): Homolog of NCBI NO: 31321896 NR Description: putative papillar cell-specific calnexin
  misc_feature (1)..(532): Homolog of NCBI NO: 15240353 NR Description: calnexin 1 (CNX1) [Arabidopsis thaliana]
  misc_feature (1)..(532): Homolog of NCBI NO: 473878 NR Description: calnexin homolog
  misc_feature (1)..(532): Homolog of NCBI NO: 15240773 NR Description: calnexin, putative [Arabidopsis thaliana]

SEQ ID NO: 38562 - protein, 394 aa, Arabidopsis thaliana; identical to SEQ ID NO: 28156
  peptide (1)..(394): Ceres Seq. ID no. 13487775
  misc_feature (1)..(391): Homolog of NCBI NO: 40740610 NR Description: hypothetical protein AN3592.2 [Aspergillus
  misc_feature (1)..(391): Homolog of NCBI NO: 7441503 NR Description: calnexin - maize (fragment)
  misc_feature (1)..(394): Homolog of NCBI NO: 11131766 NR Description: Calnexin homolog precursor
  misc_feature (1)..(394): Homolog of NCBI NO: 11131469 NR Description: Calnexin homolog precursor
  misc_feature (1)..(394): Homolog of NCBI NO: 21740628 NR Description: OSJNBb0012E08.10 [Oryza sativa (japonica
  misc_feature (1)..(394): Homolog of NCBI NO: 3334138 NR Description: CALNEXIN HOMOLOG PRECURSOR
  misc_feature (1)..(394): Homolog of NCBI NO: 31321896 NR Description: putative papillar cell-specific calnexin
  misc_feature (1)..(394): Homolog of NCBI NO: 15240353 NR Description: calnexin 1 (CNX1) [Arabidopsis thaliana]
  misc_feature (1)..(394): Homolog of NCBI NO: 473878 NR Description: calnexin homolog
  misc_feature (1)..(394): Homolog of NCBI NO: 15240773 NR Description: calnexin, putative [Arabidopsis thaliana]
  misc_feature (1)..(391): Homolog of NCBI NO: 40740610 NR Description: hypothetical protein AN3592.2 [Aspergillus
  misc_feature (1)..(391): Homolog of NCBI NO: 7441503 NR Description: calnexin - maize (fragment)
  misc_feature (1)..(394): Homolog of NCBI NO: 11131766 NR Description: Calnexin homolog precursor
  misc_feature (1)..(394): Homolog of NCBI NO: 11131469 NR Description: Calnexin homolog precursor
  misc_feature (1)..(394): Homolog of NCBI NO: 21740628 NR Description: OSJNBb0012E08.10 [Oryza sativa (japonica
  misc_feature (1)..(394): Homolog of NCBI NO: 3334138 NR Description: CALNEXIN HOMOLOG PRECURSOR
  misc_feature (1)..(394): Homolog of NCBI NO: 31321896 NR Description: putative papillar cell-specific calnexin
  misc_feature (1)..(394): Homolog of NCBI NO: 15240353 NR Description: calnexin 1 (CNX1) [Arabidopsis thaliana]
  misc_feature (1)..(394): Homolog of NCBI NO: 473878 NR Description: calnexin homolog
  misc_feature (1)..(394): Homolog of NCBI NO: 15240773 NR Description: calnexin, putative [Arabidopsis thaliana]

SEQ ID NO: 38563 - DNA, 713 bp, Arabidopsis thaliana
  misc_feature (1)..(713): Ceres Seq. ID no. 12325124
  misc_feature: MA Experiment ID: 108434 Result: Up-regulated in Transcription
  misc_feature: MA Experiment 108434 PARAMETER Experiment Name: At_Root_Tips_cDNA_P Parameter: Tissue Value: Root Tips
  misc_feature: MA Experiment ID: 108462 Result: Down-regulated in Transcription
  misc_feature: MA Experiment 108462 PARAMETER Experiment Name: At_Germinating_Seeds_cDNA_P Parameter: Age (day) Value: 2 vs. 0
  misc_feature: MA Experiment 108462 PARAMETER Experiment Name: At_Germinating_Seeds_cDNA_P Parameter: Tissue Value: Germinating Seeds
  misc_feature: MA Experiment ID: 108463 Result: Down-regulated in Transcription
  misc_feature: MA Experiment 108463 PARAMETER Experiment Name: At_Germinating_Seeds_cDNA_P Parameter: Age (day) Value: 3 vs. 0
  misc_feature: MA Experiment 108463 PARAMETER Experiment Name: At_Germinating_Seeds_cDNA_P Parameter: Tissue Value: Germinating Seeds
  misc_feature: MA Experiment ID: 108464 Result: Down-regulated in Transcription
  misc_feature: MA Experiment 108464 PARAMETER Experiment Name: At_Germinating_Seeds_cDNA_P Parameter: Age (day) Value: 4 vs. 0
  misc_feature: MA Experiment 108464 PARAMETER Experiment Name: At_Germinating_Seeds_cDNA_P Parameter: Tissue Value: Germinating Seeds
  misc_feature: MA Experiment ID: 108488 Result: Down-regulated in Transcription
  misc_feature: MA Experiment ID: 108572 Result: Down-regulated in Transcription
  misc_feature: MA Experiment 108572 PARAMETER Experiment Name: At_Drought_cDNA_P Parameter: Timepoint (hr) Value: 1
  misc_feature: MA Experiment 108572 PARAMETER Experiment Name: At_Drought_cDNA_P Parameter: Tissue Value: Aerial
  misc_feature: MA Experiment 108572 PARAMETER Experiment Name: At_Drought_cDNA_P Parameter: Treatment Value: Drought vs. No Drought
  misc_feature: MA Experiment ID: 108577 Result: Down-regulated in Transcription
  misc_feature: MA Experiment 108577 PARAMETER Experiment Name: At_42deg_Heat_cDNA_P Parameter: Temperature (deg C) Value: 42 vs. 22
  misc_feature: MA Experiment 108577 PARAMETER Experiment Name: At_42deg_Heat_cDNA_P Parameter: Timepoint (hr) Value: 6
  misc_feature: MA Experiment 108577 PARAMETER Experiment Name: At_42deg_Heat_cDNA_P Parameter: Tissue Value: Aerial
  misc_feature: MA Experiment ID: 108607 Result: Down-regulated in Transcription
  misc_feature: MA Experiment 108607 PARAMETER Experiment Name: At_100uM_ABA_cDNA_P Parameter: Timepoint (hr) Value: 4
  misc_feature: MA Experiment 108607 PARAMETER Experiment Name: At_100uM_ABA_cDNA_P Parameter: Tissue Value: Aerial
  misc_feature: MA Experiment 108607 PARAMETER Experiment Name: At_100uM_ABA_cDNA_P Parameter: Treatment Value: 100uM ABA vs. No Treatment
  misc_feature: MA Experiment ID: 20000069 Result: Up-regulated in Transcription
  misc_feature: MA Experiment 20000069 PARAMETER Experiment Name: At_100uM_ABA_Mutants_cDNA_P Parameter: Plant Line Value: CS23
  misc_feature: MA Experiment 20000069 PARAMETER Experiment Name: At_100uM_ABA_Mutants_cDNA_P Parameter: Timepoint (hr) Value: 6
  misc_feature: MA Experiment 20000069 PARAMETER Experiment Name: At_100uM_ABA_Mutants_cDNA_P Parameter: Tissue Value: Aerial
  misc_feature: MA Experiment 20000069 PARAMETER Experiment Name: At_100uM_ABA_Mutants_cDNA_P Parameter: Treatment Value: 100uM ABA vs. No Treatment
  misc_feature: MA Experiment ID: 20000070 Result: Up-regulated in Transcription
  misc_feature: MA Experiment 20000070 PARAMETER Experiment Name: At_100uM_ABA_Mutants_cDNA_P Parameter: Plant Line Value: CS24
  misc_feature: MA Experiment 20000070 PARAMETER Experiment Name: At_100uM_ABA_Mutants_cDNA_P Parameter: Timepoint (hr) Value: 6
  misc_feature: MA Experiment 20000070 PARAMETER Experiment Name: At_100uM_ABA_Mutants_cDNA_P Parameter: Tissue Value: Aerial
  misc_feature: MA Experiment 20000070 PARAMETER Experiment Name: At_100uM_ABA_Mutants_cDNA_P Parameter: Treatment Value: 100uM ABA vs. No Treatment
  misc_feature: MA Experiment ID: 20000071 Result: Up-regulated in Transcription
  misc_feature: MA Experiment 20000071 PARAMETER Experiment Name: At_100uM_ABA_Mutants_cDNA_P Parameter: Plant Line Value: CS8104
  misc_feature: MA Experiment 20000071 PARAMETER Experiment Name: At_100uM_ABA_Mutants_cDNA_P Parameter: Timepoint (hr) Value: 6
  misc_feature: MA Experiment 20000071 PARAMETER Experiment Name: At_100uM_ABA_Mutants_cDNA_P Parameter: Tissue Value: Aerial
  misc_feature: MA Experiment 20000071 PARAMETER Experiment Name: At_100uM_ABA_Mutants_cDNA_P Parameter: Treatment Value: 100uM ABA vs. No Treatment
  misc_feature: MA Experiment ID: 20000072 Result: Up-regulated in Transcription
  misc_feature: MA Experiment 20000072 PARAMETER Experiment Name: At_100uM_ABA_Mutants_cDNA_P Parameter: Plant Line Value: CS8105
  misc_feature: MA Experiment 20000072 PARAMETER Experiment Name: At_100uM_ABA_Mutants_cDNA_P Parameter: Timepoint (hr) Value: 6
  misc_feature: MA Experiment 20000072 PARAMETER Experiment Name: At_100uM_ABA_Mutants_cDNA_P Parameter: Tissue Value: Aerial
  misc_feature: MA Experiment 20000072 PARAMETER Experiment Name: At_100uM_ABA_Mutants_cDNA_P Parameter: Treatment Value: 100uM ABA vs. No Treatment
  misc_feature: MA Experiment ID: 20000086 Result: Up-regulated in Transcription
  misc_feature: MA Experiment 20000086 PARAMETER Experiment Name: At_100uM_ABA_Mutants_cDNA_P Parameter: Plant Line Value: CS22
  misc_feature: MA Experiment 20000086 PARAMETER Experiment Name: At_100uM_ABA_Mutants_cDNA_P Parameter: Timepoint (hr) Value: 6
  misc_feature: MA Experiment 20000086 PARAMETER Experiment Name: At_100uM_ABA_Mutants_cDNA_P Parameter: Tissue Value: Aerial
  misc_feature: MA Experiment 20000086 PARAMETER Experiment Name: At_100uM_ABA_Mutants_cDNA_P Parameter: Treatment Value: 100uM ABA vs. No Treatment
  misc_feature: MA Experiment ID: 20000087 Result: Up-regulated in Transcription
  misc_feature: MA Experiment 20000087 PARAMETER Experiment Name: At_100uM_ABA_Mutants_cDNA_P Parameter: Plant Line Value: WS
  misc_feature: MA Experiment 20000087 PARAMETER Experiment Name: At_100uM_ABA_Mutants_cDNA_P Parameter: Timepoint (hr) Value: 6
  misc_feature: MA Experiment 20000087 PARAMETER Experiment Name: At_100uM_ABA_Mutants_cDNA_P Parameter: Tissue Value: Aerial
  misc_feature: MA Experiment 20000087 PARAMETER Experiment Name: At_100uM_ABA_Mutants_cDNA_P Parameter: Treatment Value: 100uM ABA vs. No Treatment
  misc_feature: MA Experiment ID: 20000088 Result: Up-regulated in Transcription
  misc_feature: MA Experiment 20000088 PARAMETER Experiment Name: At_100uM_ABA_Mutants_cDNA_P Parameter: Plant Line Value: Landsberg
  misc_feature: MA Experiment 20000088 PARAMETER Experiment Name: At_100uM_ABA_Mutants_cDNA_P Parameter: Timepoint (hr) Value: 6
  misc_feature: MA Experiment 20000088 PARAMETER Experiment Name: At_100uM_ABA_Mutants_cDNA_P Parameter: Tissue Value: Aerial
  misc_feature: MA Experiment 20000088 PARAMETER Experiment Name: At_100uM_ABA_Mutants_cDNA_P Parameter: Treatment Value: 100uM ABA vs. No Treatment
  misc_feature: MA Experiment ID: 20000089 Result: Up-regulated in Transcription
  misc_feature: MA Experiment ID: 20000090 Result: Up-regulated in Transcription
  misc_feature: MA Experiment ID: 20000111 Result: Down-regulated in Transcription
  misc_feature: MA Experiment 20000111 PARAMETER Experiment Name: At_42deg_Heat_cDNA_P Parameter: Temperature (deg C) Value: 42 vs. 22
  misc_feature: MA Experiment 20000111 PARAMETER Experiment Name: At_42deg_Heat_cDNA_P Parameter: Timepoint (hr) Value: 6
  misc_feature: MA Experiment 20000111 PARAMETER Experiment Name: At_42deg_Heat_cDNA_P Parameter: Tissue Value: Aerial
  misc_feature: MA Experiment ID: 20000117 Result: Up-regulated in Transcription
  misc_feature: MA Experiment 20000117 PARAMETER Experiment Name: At_100uM_ABA_Mutants_cDNA_P Parameter: Plant Line Value: Columbia
  misc_feature: MA Experiment 20000117 PARAMETER Experiment Name: At_100uM_ABA_Mutants_cDNA_P Parameter: Timepoint (hr) Value: 6
  misc_feature: MA Experiment 20000117 PARAMETER Experiment Name: At_100uM_ABA_Mutants_cDNA_P Parameter: Tissue Value: Aerial
  misc_feature: MA Experiment 20000117 PARAMETER Experiment Name: At_100uM_ABA_Mutants_cDNA_P Parameter: Treatment Value: 100uM ABA vs. No Treatment
  misc_feature: MA Experiment ID: 20000213 Result: Up-regulated in Transcription
  misc_feature: MA Experiment 20000213 PARAMETER Experiment Name: At_4deg_Cold_P Parameter: Timepoint (hr) Value: 2
  misc_feature: MA Experiment ID: 20000224 Result: Down-regulated in Transcription
  misc_feature: MA Experiment ID: 20000437 Result: Up-regulated in Transcription
  misc_feature: MA Experiment 20000437 PARAMETER Experiment Name: At_Drought_P Parameter: Age (day) Value: 8
  misc_feature: MA Experiment 20000437 PARAMETER Experiment Name: At_Drought_P Parameter: Organism Value: A. thaliana
  misc_feature: MA Experiment 20000437 PARAMETER Experiment Name: At_Drought_P Parameter: Plant Line Value: WS
  misc_feature: MA Experiment 20000437 PARAMETER Experiment Name: At_Drought_P Parameter: Timepoint (hr) Value: 24
  misc_feature: MA Experiment 20000437 PARAMETER Experiment Name: At_Drought_P Parameter: Tissue Value: Whole Plant
  misc_feature: MA Experiment 20000437 PARAMETER Experiment Name: At_Drought_P Parameter: Treatment Value: Drought vs. No Drought
  misc_feature: MA Experiment ID: 20000438 Result: Down-regulated in Transcription
  misc_feature: MA Experiment 20000438 PARAMETER Experiment Name: At_Shoots__P Parameter: Age (day) Value: 14
  misc_feature: MA Experiment 20000438 PARAMETER Experiment Name: At_Shoots__P Parameter: Tissue Value: Shoots vs. Whole Plant
  misc_feature: MA Experiment ID: 20001451 Result: Up-regulated in Transcription
  misc_feature: MA Experiment 20001451 PARAMETER Experiment Name: At_Far-red-induction_P Parameter: Age (day) Value: 7
  misc_feature: MA Experiment 20001451 PARAMETER Experiment Name: At_Far-red-induction_P Parameter: Light Value: Far-red vs. White
  misc_feature: MA Experiment 20001451 PARAMETER Experiment Name: At_Far-red-induction_P Parameter: Organism Value: A. thaliana
  misc_feature: MA Experiment 20001451 PARAMETER Experiment Name: At_Far-red-induction_P Parameter: Plant Line Value: Columbia
  misc_feature: MA Experiment 20001451 PARAMETER Experiment Name: At_Far-red-induction_P Parameter: Timepoint (hr) Value: 24
  misc_feature: MA Experiment 20001451 PARAMETER Experiment Name: At_Far-red-induction_P Parameter: Tissue Value: Whole Plant
  misc_feature: MA Experiment ID: 20001557 Result: Up-regulated in Transcription
  misc_feature: MA Experiment 20001557 PARAMETER Experiment Name: At_Drought_Soil_Dry_P Parameter: Age (day) Value: 27
  misc_feature: MA Experiment 20001557 PARAMETER Experiment Name: At_Drought_Soil_Dry_P Parameter: Organism Value: A. thaliana
  misc_feature: MA Experiment 20001557 PARAMETER Experiment Name: At_Drought_Soil_Dry_P Parameter: Plant Line Value: WS
  misc_feature: MA Experiment 20001557 PARAMETER Experiment Name: At_Drought_Soil_Dry_P Parameter: Post Timepoint (hr) Value: 3
  misc_feature: MA Experiment 20001557 PARAMETER Experiment Name: At_Drought_Soil_Dry_P Parameter: Post-Treatment Value: Re-Water vs. No Drought
  misc_feature: MA Experiment 20001557 PARAMETER Experiment Name: At_Drought_Soil_Dry_P Parameter: Timepoint (day) Value: 13
  misc_feature: MA Experiment 20001557 PARAMETER Experiment Name: At_Drought_Soil_Dry_P Parameter: Treatment Value: Drought vs. No Drought
  misc_feature: Phenotype: INFLORESCENCE Flowering Time-Late Flowering
  misc_feature: Phenotype: INFLORESCENCE Flowering Time-Late Flowering
  misc_feature: Phenotype: INFLORESCENCE Flowering Time-Late Flowering
  misc_feature: Phenotype: INFLORESCENCE Flowering Time-Late Flowering
  misc_feature: Phenotype: INFLORESCENCE Flowering Time-Late Flowering
  misc_feature: Phenotype: INFLORESCENCE Flowering Time-Late Flowering
  misc_feature: Phenotype: ROSETTE LEAVES Shape-Oval
  misc_feature: Phenotype: ROSETTE LEAVES Shape-Serrate
  misc_feature: Phenotype: ROSETTE LEAVES Other
  misc_feature: Phenotype: WHOLE PLANT Size-Large
  misc_feature: Phenotype: WHOLE PLANT Size-Large
  misc_feature: Phenotype: FLOWERS Other
  misc_feature: Phenotype: INFLORESCENCE Flowering Time-Late Flowering
  misc_feature: Phenotype: INFLORESCENCE Height-Tall
  misc_feature: Phenotype: INFLORESCENCE Strength-Strong
  misc_feature: Phenotype: FERTILITY Fertility-Reduced
  misc_feature: Phenotype: ROSETTE LEAVES Shape-Oval
  misc_feature: Phenotype: WHOLE PLANT Color-Dark Green
  misc_feature: Phenotype: INFLORESCENCE Flowering Time-Late Flowering
acacatctcactgctcactactctcactgtaatcccttagatcttcttttcaaatttcaatggcgtccggtgatgttgagtatcggtgcttcgttggaggtctagcatgggccactgatgacagagctcttgagactgccttcgctcaatacggcgacgttattgattccaagatcattaacgatcgtgagactggaagatcaaggggattcggattcgtcaccttcaaggatgagaaagccatgaaggatgcgattgagggaatgaacggacaagatctcgatggccgtagcatcactgttaacgaggctcagtcacgaggaagcggtggcggcggaggccaccgtggaggtggtggcggcggttactcctcaagaggtggtggtggcggaagctacggtggtggaagacgtgagggaggaggaggatacggtggtggtgaaggaggaggttacggaggaaacggtggtggtggaggatggtaattcctttaattaggtttgggattaccaatgaatgttctctctctcgcttgttatgcttctacttggttttgtgtgttctctattttgttctggttctgctttagatttgatgtaacagttcgtgattaggtattttggtatctggaaacgtaatgttaagtcacttgtcattctctaaataacaaatttcttcggagatattatctctgttgattgattctatcatcg

SEQ ID NO: 38564 - protein, 141 aa, Arabidopsis thaliana
  peptide (1)..(141): Ceres Seq. ID no. 12325125
  misc_feature (10)..(81): Pfam Name: RNA recognition motif. (a.k.a. RRM, RBD, or RNP domain) Pfam Description: RNA recognition motif. (a.k.a. RRM, RBD, or RNP
  misc_feature (5)..(140): Homolog of NCBI NO: 20152613 NR Description: putative glycine rich protein [Rumex obtusifolius]
  misc_feature (5)..(140): Homolog of NCBI NO: 2119042 NR Description: glycine-rich RNA-binding protein RGP-1a - wood
  misc_feature (5)..(140): Homolog of NCBI NO: 2119044 NR Description: glycine-rich RNA-binding protein RGP-1b - wood
  misc_feature (5)..(141): Homolog of NCBI NO: 544426 NR Description: Glycine-rich RNA-binding protein
  misc_feature (1)..(139): Homolog of NCBI NO: 2267567 NR Description: glycine-rich RNA binding protein 1 [Pelargonium x
  misc_feature (1)..(141): Homolog of NCBI NO: 1346181 NR Description: Glycine-rich RNA-binding protein GRP2A
  misc_feature (1)..(141): Homolog of NCBI NO: 1346180 NR Description: Glycine-rich RNA-binding protein GRP1A
  misc_feature (1)..(140): Homolog of NCBI NO: 21553354 NR Description: glycine-rich RNA binding protein 7 [Arabidopsis
  misc_feature (1)..(140): Homolog of NCBI NO: 15226605 NR Description: glycine-rich RNA binding protein AtGRP7
  misc_feature (1)..(141): Homolog of NCBI NO: 30681492 NR Description: glycine-rich RNA-binding protein (AtGRP7)
MASGDVEYRCFVGGLAWATDDRALETAFAQYGDVIDSKIINDRETGRSRGFGFVTFKDEKAMKDAIEGMNGQDLDGRSITVNEAQSRGSGGGGGHRGGGGGGYSSRGGGGGSYGGGRREGGGGYGGGEGGGYGGNGGGGGW

SEQ ID NO: 38565 - protein, 80 aa, Arabidopsis thaliana
  peptide (1)..(80): Ceres Seq. ID no. 12325126
  misc_feature (15)..(79): Pfam Name: Herpesvirus large structural phosphoprotein UL32 Pfam Description: Herpesvirus large structural phosphoprotein UL32
  misc_feature (1)..(79): Homolog of NCBI NO: 20152613 NR Description: putative glycine rich protein [Rumex obtusifolius]
  misc_feature (1)..(79): Homolog of NCBI NO: 2119042 NR Description: glycine-rich RNA-binding protein RGP-1a - wood
  misc_feature (1)..(79): Homolog of NCBI NO: 2119044 NR Description: glycine-rich RNA-binding protein RGP-1b - wood
  misc_feature (1)..(80): Homolog of NCBI NO: 544426 NR Description: Glycine-rich RNA-binding protein
  misc_feature (1)..(78): Homolog of NCBI NO: 2267567 NR Description: glycine-rich RNA binding protein 1 [Pelargonium x
  misc_feature (1)..(80): Homolog of NCBI NO: 1346181 NR Description: Glycine-rich RNA-binding protein GRP2A
  misc_feature (1)..(80): Homolog of NCBI NO: 1346180 NR Description: Glycine-rich RNA-binding protein GRP1A
  misc_feature (1)..(79): Homolog of NCBI NO: 21553354 NR Description: glycine-rich RNA binding protein 7 [Arabidopsis
  misc_feature (1)..(79): Homolog of NCBI NO: 15226605 NR Description: glycine-rich RNA binding protein AtGRP7
  misc_feature (1)..(80): Homolog of NCBI NO: 30681492 NR Description: glycine-rich RNA-binding protein (AtGRP7)
MKDAIEGMNGQDLDGRSITVNEAQSRGSGGGGGHRGGGGGGYSSRGGGGGSYGGGRREGGGGYGGGEGGGYGGNGGGGGW

SEQ ID NO: 38566 - protein, 73 aa, Arabidopsis thaliana
  peptide (1)..(73): Ceres Seq. ID no. 12325127
  misc_feature (8)..(72): Pfam Name: Herpesvirus large structural phosphoprotein UL32 Pfam Description: Herpesvirus large structural phosphoprotein UL32
  misc_feature (1)..(72): Homolog of NCBI NO: 20152613 NR Description: putative glycine rich protein [Rumex obtusifolius]
  misc_feature (1)..(72): Homolog of NCBI NO: 2119042 NR Description: glycine-rich RNA-binding protein RGP-1a - wood
  misc_feature (1)..(72): Homolog of NCBI NO: 2119044 NR Description: glycine-rich RNA-binding protein RGP-1b - wood
  misc_feature (1)..(73): Homolog of NCBI NO: 544426 NR Description: Glycine-rich RNA-binding protein
  misc_feature (1)..(71): Homolog of NCBI NO: 2267567 NR Description: glycine-rich RNA binding protein 1 [Pelargonium x
  misc_feature (1)..(73): Homolog of NCBI NO: 1346181 NR Description: Glycine-rich RNA-binding protein GRP2A
  misc_feature (1)..(73): Homolog of NCBI NO: 1346180 NR Description: Glycine-rich RNA-binding protein GRP1A
  misc_feature (1)..(72): Homolog of NCBI NO: 21553354 NR Description: glycine-rich RNA binding protein 7 [Arabidopsis
  misc_feature (1)..(72): Homolog of NCBI NO: 15226605 NR Description: glycine-rich RNA binding protein AtGRP7
  misc_feature (1)..(73): Homolog of NCBI NO: 30681492 NR Description: glycine-rich RNA-binding protein (AtGRP7)
MNGQDLDGRSITVNEAQSRGSGGGGGHRGGGGGGYSSRGGGGGSYGGGRREGGGGYGGGEGGGYGGNGGGGGW

SEQ ID NO: 38567 - DNA, 1734 bp, Arabidopsis thaliana
  misc_feature (1)..(1734): Ceres Seq. ID no. 12328724
  misc_feature: MA Experiment ID: 108434 Result: Up-regulated in Transcription
  misc_feature: MA Experiment 108434 PARAMETER Experiment Name: At_Root_Tips_cDNA_P Parameter: Tissue Value: Root Tips
  misc_feature: MA Experiment ID: 108462 Result: Down-regulated in Transcription
  misc_feature: MA Experiment 108462 PARAMETER Experiment Name: At_Germinating_Seeds_cDNA_P Parameter: Age (day) Value: 2 vs. 0
  misc_feature: MA Experiment 108462 PARAMETER Experiment Name: At_Germinating_Seeds_cDNA_P Parameter: Tissue Value: Germinating Seeds
  misc_feature: MA Experiment ID: 108463 Result: Down-regulated in Transcription
  misc_feature: MA Experiment 108463 PARAMETER Experiment Name: At_Germinating_Seeds_cDNA_P Parameter: Age (day) Value: 3 vs. 0
  misc_feature: MA Experiment 108463 PARAMETER Experiment Name: At_Germinating_Seeds_cDNA_P Parameter: Tissue Value: Germinating Seeds
  misc_feature: MA Experiment ID: 108464 Result: Down-regulated in Transcription
  misc_feature: MA Experiment 108464 PARAMETER Experiment Name: At_Germinating_Seeds_cDNA_P Parameter: Age (day) Value: 4 vs. 0
  misc_feature: MA Experiment 108464 PARAMETER Experiment Name: At_Germinating_Seeds_cDNA_P Parameter: Tissue Value: Germinating Seeds
  misc_feature: MA Experiment ID: 20000090 Result: Up-regulated in Transcription
  misc_feature: MA Experiment ID: 20000224 Result: Up-regulated in Transcription
gagttccttctgtatctcgattctcgaatgtcgatcgagccatcgtagagatagagagagaatccatagaaatggctttcgttcgatatatcccttgtcggaagattccacgaaatgttgatcaattcgagctgccatgtcttggatcgcttcgagctttcttctctactcagaagctcataggggatgaaccagttctcgttcgagatttcatacacactgcattatatgatccaatacaaggctacttctctcaacggtcaaaatctgtcggggttttggagagaagcattaagttcaaccagcttgaagggaggaaagcatacatgaaactcttggaaaaagtatacaagcagagtgacatttcttggtttactccagtggagcttttcaagccttggtatgctcatgggattgcagaagctatactgcgtaccacaaatctctcagttccattaaagatatacgaaattggtggtggatcgggcacatgtgccaagggtgtattggactatataatgttgaatgctccggagagaatctacaagaacatgagctacacttctatagaaatcagtccctcacttgctaagattcagaaggaaactgttgcacaagttggaagtcatctatcaaagttccgagttgagtgtcgtgatgcatctgacctagctggatggaagaatgtggagcaacaaccgtgctgggtgataatgcttgaggtgctagataatctcccacatgatcttgtctattccaaaagtcaactttccccatggatggaagtcttggttgaaaataaaccagagagcgaagcactctctgagctatacaagcctttagaagatccactgattaagcggtgcattgaaattgttgaacatgaagatgatccggtttcaaaaccaaaagaaatttggtctaaactatttcccaaacctagacgtagttggcttccaacaggttgtttgaaactgctagaggttttacatgcaaagctgccaaagatgtccctaattgcttcggactttagcttcttgcctgatgtgaaagttcctggtgaaagagccccattggtttcaacaaagaaagatggatgtagctcagattacagtagttatctggacgcaaagggtgatgctgatatatttttcccaaccgatttctggcttctagaacgaatggaccattattgttccggttggaggaagatggaaaaagacgggacaccatcgaaaaaaggaaggaaaaggcgaactctcactcttgatacatcagcgttcatggatgagtttggtttaccttcaaagacgagaacaaaggacggatataaccccttacttgatgacttcaagaacactaagttctatcttagtgtcccaacacacaacactaagtagtaagcaacagatatcttcagctcatggatgtcggaattttgcagagaaatgaaagaaaaagtttagagctctgaattttttttagatgatttaataagttataatcaatattccatcgctacagacactgaagataggctccaaaatgtttcttttttacttactgcggtttgctgtgtcagcttttaaacactctttccaaatactacatgagtcggtagtttgtaatgtaatgggtttgggtatggaggctttctcgttgtctttcttttcccaacttatttgacatttcagtagtgaaaaacatgatactcaataaaacaactattagtgg

SEQ ID NO: 38568 - protein, 465 aa, Arabidopsis thaliana
  peptide (1)..(465): Ceres Seq. ID no. 12328725
  misc_feature (62)..(395): Pfam Name: Uncharacterized ACR, COG1565 Pfam Description: Uncharacterized ACR, COG1565
  misc_feature (24)..(327): Homolog of NCBI NO: 25406821 NR Description: protein F13M7.11 [imported] - Arabidopsis
  misc_feature (227)..(465): Homolog of NCBI NO: 25406821 NR Description: protein F13M7.11 [imported] - Arabidopsis
  misc_feature (52)..(116): Homolog of NCBI NO: 34906872 NR Description: P0470A12.14 [Oryza sativa (japonica
  misc_feature (104)..(465): Homolog of NCBI NO: 34906872 NR Description: P0470A12.14 [Oryza sativa (japonica
  misc_feature (24)..(465): Homolog of NCBI NO: 18390452 NR Description: expressed protein
VPSVSRFSNVDRAIVEIERESIEMAFVRYIPCRKIPRNVDQFELPCLGSLRAFFSTQKLIGDEPVLVRDFIHTALYDPIQGYFSQRSKSVGVLERSIKFNQLEGRKAYMKLLEKVYKQSDISWFTPVELFKPWYAHGIAEAILRTTNLSVPLKIYEIGGGSGTCAKGVLDYIMLNAPERIYKNMSYTSIEISPSLAKIQKETVAQVGSHLSKFRVECRDASDLAGWKNVEQQPCWVIMLEVLDNLPHDLVYSKSQLSPWMEVLVENKPESEALSELYKPLEDPLIKRCIEIVEHEDDPVSKPKEIWSKLFPKPRRSWLPTGCLKLLEVLHAKLPKMSLIASDFSFLPDVKVPGERAPLVSTKKDGCSSDYSSYLDAKGDADIFFPTDFWLLERMDHYCSGWRKMEKDGTPSKKGRKRRTLTLDTSAFMDEFGLPSKTRTKDGYNPLLDDFKNTKFYLSVPTHNTK

SEQ ID NO: 38569 - protein, 442 aa, Arabidopsis thaliana
  peptide (1)..(442): Ceres Seq. ID no. 12328726
  misc_feature (39)..(372): Pfam Name: Uncharacterized ACR, COG1565 Pfam Description: Uncharacterized ACR, COG1565
  misc_feature (1)..(304): Homolog of NCBI NO: 25406821 NR Description: protein F13M7.11 [imported] - Arabidopsis
  misc_feature (204)..(442): Homolog of NCBI NO: 25406821 NR Description: protein F13M7.11 [imported] - Arabidopsis
  misc_feature (29)..(93): Homolog of NCBI NO: 34906872 NR Description: P0470A12.14 [Oryza sativa (japonica
  misc_feature (81)..(442): Homolog of NCBI NO: 34906872 NR Description: P0470A12.14 [Oryza sativa (japonica
  misc_feature (1)..(442): Homolog of NCBI NO: 18390452 NR Description: expressed protein
MAFVRYIPCRKIPRNVDQFELPCLGSLRAFFSTQKLIGDEPVLVRDFIHTALYDPIQGYFSQRSKSVGVLERSIKFNQLEGRKAYMKLLEKVYKQSDISWFTPVELFKPWYAHGIAEAILRTTNLSVPLKIYEIGGGSGTCAKGVLDYIMLNAPERIYKNMSYTSIEISPSLAKIQKETVAQVGSHLSKFRVECRDASDLAGWKNVEQQPCWVIMLEVLDNLPHDLVYSKSQLSPWMEVLVENKPESEALSELYKPLEDPLIKRCIEIVEHEDDPVSKPKEIWSKLFPKPRRSWLPTGCLKLLEVLHAKLPKMSLIASDFSFLPDVKVPGERAPLVSTKKDGCSSDYSSYLDAKGDADIFFPTDFWLLERMDHYCSGWRKMEKDGTPSKKGRKRRTLTLDTSAFMDEFGLPSKTRTKDGYNPLLDDFKNTKFYLSVPTHNTK

SEQ ID NO: 38570 - protein, 357 aa, Arabidopsis thaliana
  peptide (1)..(357): Ceres Seq. ID no. 12328727
  misc_feature (1)..(287): Pfam Name: Uncharacterized ACR, COG1565 Pfam Description: Uncharacterized ACR, COG1565
  misc_feature (1)..(219): Homolog of NCBI NO: 25406821 NR Description: protein F13M7.11 [imported] - Arabidopsis
  misc_feature (119)..(357): Homolog of NCBI NO: 25406821 NR Description: protein F13M7.11 [imported] - Arabidopsis
  misc_feature (1)..(357): Homolog of NCBI NO: 34906872 NR Description: P0470A12.14 [Oryza sativa (japonica
  misc_feature (1)..(357): Homolog of NCBI NO: 18390452 NR Description: expressed protein
MKLLEKVYKQSDISWFTPVELFKPWYAHGIAEAILRTTNLSVPLKIYEIGGGSGTCAKGVLDYIMLNAPERIYKNMSYTSIEISPSLAKIQKETVAQVGSHLSKFRVECRDASDLAGWKNVEQQPCWVIMLEVLDNLPHDLVYSKSQLSPWMEVLVENKPESEALSELYKPLEDPLIKRCIEIVEHEDDPVSKPKEIWSKLFPKPRRSWLPTGCLKLLEVLHAKLPKMSLIASDFSFLPDVKVPGERAPLVSTKKDGCSSDYSSYLDAKGDADIFFPTDFWLLERMDHYCSGWRKMEKDGTPSKKGRKRRTLTLDTSAFMDEFGLPSKTRTKDGYNPLLDDFKNTKFYLSVPTHNTK

SEQ ID NO: 38571 - DNA, 1244 bp, Arabidopsis thaliana
  misc_feature (1)..(1244): Ceres Seq. ID no. 12328525
  misc_feature: MA Experiment ID: 108434 Result: Up-regulated in Transcription
  misc_feature: MA Experiment 108434 PARAMETER Experiment Name: At_Root_Tips_cDNA_P Parameter: Tissue Value: Root Tips
  misc_feature: MA Experiment ID: 108595 Result: Down-regulated in Transcription
  misc_feature: MA Experiment 108595 PARAMETER Experiment Name: At_Ler-pi_Ovule_cDNA_P Parameter: Plant Line Value: null
  misc_feature: MA Experiment ID: 20000113 Result: Up-regulated in Transcription
  misc_feature: MA Experiment 20000113 PARAMETER Experiment Name: At_42deg_Heat_cDNA_P Parameter: Temperature (deg C) Value: 42 vs. 22
  misc_feature: MA Experiment 20000113 PARAMETER Experiment Name: At_42deg_Heat_cDNA_P Parameter: Timepoint (hr) Value: 8
  misc_feature: MA Experiment 20000113 PARAMETER Experiment Name: At_42deg_Heat_cDNA_P Parameter: Tissue Value: Aerial
  misc_feature: MA Experiment ID: 20000184 Result: Up-regulated in Transcription
  misc_feature: MA Experiment 20000184 PARAMETER Experiment Name: At_Shoots__P Parameter: Age (day) Value: 7
  misc_feature: MA Experiment 20000184 PARAMETER Experiment Name: At_Shoots__P Parameter: Tissue Value: Shoots vs. Whole Plant
  misc_feature: MA Experiment ID: 20000227 Result: Down-regulated in Transcription
  misc_feature: MA Experiment 20000227 PARAMETER Experiment Name: At_Root-Tips-vs-Tops_P Parameter: Tissue Value: Root Tips vs. Root Tops
  misc_feature: MA Experiment ID: 20000234 Result: Up-regulated in Transcription
  misc_feature: MA Experiment 20000234 PARAMETER Experiment Name: At_Siliques_P Parameter: Age (day) Value: 21
  misc_feature: MA Experiment 20000234 PARAMETER Experiment Name: At_Siliques_P Parameter: Organism Value: A. thaliana
  misc_feature: MA Experiment 20000234 PARAMETER Experiment Name: At_Siliques_P Parameter: Plant Line Value: WS
  misc_feature: MA Experiment 20000234 PARAMETER Experiment Name: At_Siliques_P Parameter: Tissue Value: Less Than 5mm Siliques vs. Whole Plant
  misc_feature: MA Experiment ID: 20000437 Result: Down-regulated in Transcription
  misc_feature: MA Experiment 20000437 PARAMETER Experiment Name: At_Drought_P Parameter: Age (day) Value: 8
  misc_feature: MA Experiment 20000437 PARAMETER Experiment Name: At_Drought_P Parameter: Organism Value: A. thaliana
  misc_feature: MA Experiment 20000437 PARAMETER Experiment Name: At_Drought_P Parameter: Plant Line Value: WS
  misc_feature: MA Experiment 20000437 PARAMETER Experiment Name: At_Drought_P Parameter: Timepoint (hr) Value: 24
  misc_feature: MA Experiment 20000437 PARAMETER Experiment Name: At_Drought_P Parameter: Tissue Value: Whole Plant
  misc_feature: MA Experiment 20000437 PARAMETER Experiment Name: At_Drought_P Parameter: Treatment Value: Drought vs. No Drought
  misc_feature: MA Experiment ID: 20000438 Result: Up-regulated in Transcription
  misc_feature: MA Experiment 20000438 PARAMETER Experiment Name: At_Shoots__P Parameter: Age (day) Value: 14
  misc_feature: MA Experiment 20000438 PARAMETER Experiment Name: At_Shoots__P Parameter: Tissue Value: Shoots vs. Whole Plant
  misc_feature: MA Experiment ID: 20001757 Result: Up-regulated in Transcription
  misc_feature: MA Experiment 20001757 PARAMETER Experiment Name: At_50mM_NH4NO3_L-to-H_P Parameter: Timepoint (hr) Value: 6
  misc_feature: MA Experiment 20001757 PARAMETER Experiment Name: At_50mM_NH4NO3_L-to-H_P Parameter: Tissue Value: Leaf
  misc_feature: MA Experiment 20001757 PARAMETER Experiment Name: At_50mM_NH4NO3_L-to-H_P Parameter: Treatment Value: 50mM NH4NO3 vs 100mM Mannitol
gtgtatgatgttttgtatattgttgcttctcttgctttacttgtttggtttgggatttcttctctgttttttcttggtgaattttgcgtttcgcttaaaaatgagtgaaattgatttggtgaaattaggtcagaggcgtttctcatggctcctcttactctctccgttgatgtgaagagctcttcagcgacctctcatgatgtttcgaagagggtaatgcagagtccacagctcaaaataaacaaaggcttttttgcatctgttaatacacaagaagataaaccctttgatttcttccgcactctctttgaggggtttatagcaggaggtacagctggagttgtagttgaaacagctttatacccaattgatactattaagactagacttcagctcgtggaggtggaaaaattgttttgaagggtctttattcaggattagctggaaatatcgctggtgtcttaccggcttcggctttatttgttggagtttacgaacccacaaagcagaaactgctgaagacctttcctgatcatttaagcgcagttgctcacctgactgcaggggccatcggtggacttgctgcatctctgattcgagtgcctacagaggttgtgaagcaaagaatgcagaccggacagtttacatcagctcccagtgctgttcgaatgattgcatcaaaagagggatttaggggtctctatgcaggataccggtccttccttttgcgagatttgccatttgatgctatacagttctgcatatatgagcagctttgcttggggtataaaaaagccgcgcgtagagagcttagtgatcctgagaacgctctaatcggtgcatttgctggtgctctgaccggagcagtcaccactccgcttgatgttattaagacaagattaatggttcagggatcagccaaacaatatcaaggaatcgttgactgtgttcaaacaattgtaagagaggaaggagctcctgctctcttaaagggtattgggccaagagtgttgtggataggtattggaggatcaatcttctttggtgtcctcgagagcactaagagaacacttgcacagagacgtcccaatacggttaaagaaaccaaagaagaataagtttctggccgcacaagaaaatgagtgtaagttgacaatgtaacccctttgtgagttctatgtggtgtgagtttgtttaagtaccaattcaactttcattaaaaaaaaataaaaaaaatagtgttc

SEQ ID NO: 38572 - protein, 163 aa, Arabidopsis thaliana
  peptide (1)..(163): Ceres Seq. ID no. 12328526
  misc_feature (1)..(116): Homolog of NCBI NO: 34857703 NR Description: similar to RIKEN cDNA 4930433D19 [Rattus
  misc_feature (1)..(154): Homolog of NCBI NO: 6324325 NR Description: Member of family of mitochondrial carrier
  misc_feature (1)..(140): Homolog of NCBI NO: 19115553 NR Description: agpet8 protein. [Schizosaccharomyces pombe]
  misc_feature (1)..(144): Homolog of NCBI NO: 3171731 NR Description: AgPET8 [Eremothecium gossypii]
  misc_feature (1)..(149): Homolog of NCBI NO: 24650120 NR Description: CG4743-PA [Drosophila melanogaster]
  misc_feature (1)..(151): Homolog of NCBI NO: 27754081 NR Description: RIKEN cDNA 4930433D19; expressed sequence
  misc_feature (1)..(152): Homolog of NCBI NO: 18399114 NR Description: allinase, putative; protein id: At1g34065.1
  misc_feature (1)..(158): Homolog of NCBI NO: 34394981 NR Description: mitochondrial aspartate-glutamate carrier
  misc_feature (1)..(163): Homolog of NCBI NO: 18420458 NR Description: mitochondrial carrier protein family
  misc_feature (1)..(122): Homolog of NCBI NO: 7486053 NR Description: hypothetical protein F23K16.90 - Arabidopsis
MQTGQFTSAPSAVRMIASKEGFRGLYAGYRSFLLRDLPFDAIQFCIYEQLCLGYKKAARRELSDPENALIGAFAGALTGAVTTPLDVIKTRLMVQGSAKQYQGIVDCVQTIVREEGAPALLKGIGPRVLWIGIGGSIFFGVLESTKRTLAQRRPNTVKETKEE

SEQ ID NO: 38573 - protein, 149 aa, Arabidopsis thaliana
  peptide (1)..(149): Ceres Seq. ID no. 12328527
  misc_feature (1)..(102): Homolog of NCBI NO: 34857703 NR Description: similar to RIKEN cDNA 4930433D19 [Rattus
  misc_feature (1)..(140): Homolog of NCBI NO: 6324325 NR Description: Member of family of mitochondrial carrier
  misc_feature (1)..(126): Homolog of NCBI NO: 19115553 NR Description: agpet8 protein. [Schizosaccharomyces pombe]
  misc_feature (1)..(130): Homolog of NCBI NO: 3171731 NR Description: AgPET8 [Eremothecium gossypii]
  misc_feature (1)..(135): Homolog of NCBI NO: 24650120 NR Description: CG4743-PA [Drosophila melanogaster]
  misc_feature (1)..(137): Homolog of NCBI NO: 27754081 NR Description: RIKEN cDNA 4930433D19; expressed sequence
  misc_feature (1)..(138): Homolog of NCBI NO: 18399114 NR Description: allinase, putative; protein id: At1g34065.1
  misc_feature (1)..(144): Homolog of NCBI NO: 34394981 NR Description: mitochondrial aspartate-glutamate carrier
  misc_feature (1)..(149): Homolog of NCBI NO: 18420458 NR Description: mitochondrial carrier protein family
  misc_feature (1)..(108): Homolog of NCBI NO: 7486053 NR Description: hypothetical protein F23K16.90 - Arabidopsis
MIASKEGFRGLYAGYRSFLLRDLPFDAIQFCIYEQLCLGYKKAARRELSDPENALIGAFAGALTGAVTTPLDVIKTRLMVQGSAKQYQGIVDCVQTIVREEGAPALLKGIGPRVLWIGIGGSIFFGVLESTKRTLAQRRPNTVKETKEE

SEQ ID NO: 38574 - protein, 91 aa, Arabidopsis thaliana
  peptide (1)..(91): Ceres Seq. ID no. 12328528
  misc_feature (59)..(83): Homolog of NCBI NO: 34857703 NR Description: similar to RIKEN cDNA 4930433D19 [Rattus
  misc_feature (53)..(83): Homolog of NCBI NO: 6324325 NR Description: Member of family of mitochondrial carrier
  misc_feature (53)..(83): Homolog of NCBI NO: 19115553 NR Description: agpet8 protein. [Schizosaccharomyces pombe]
  misc_feature (53)..(83): Homolog of NCBI NO: 3171731 NR Description: AgPET8 [Eremothecium gossypii]
  misc_feature (39)..(83): Homolog of NCBI NO: 24650120 NR Description: CG4743-PA [Drosophila melanogaster]
  misc_feature (59)..(83): Homolog of NCBI NO: 27754081 NR Description: RIKEN cDNA 4930433D19; expressed sequence
  misc_feature (7)..(91): Homolog of NCBI NO: 18399114 NR Description: allinase, putative; protein id: At1g34065.1
  misc_feature (44)..(83): Homolog of NCBI NO: 34394981 NR Description: mitochondrial aspartate-glutamate carrier
  misc_feature (1)..(83): Homolog of NCBI NO: 18420458 NR Description: mitochondrial carrier protein family
  misc_feature (1)..(83): Homolog of NCBI NO: 7486053 NR Description: hypothetical protein F23K16.90 - Arabidopsis
MAPLTLSVDVKSSSATSHDVSKRVMQSPQLKINKGFFASVNTQEDKPFDFFRTLFEGFIAGGTAGVVVETALYPIDTIKTRLQLVEVEKLF

SEQ ID NO: 38575 - DNA, 856 bp, Arabidopsis thaliana
  misc_feature (1)..(856): Ceres Seq. ID no. 12325518
  misc_feature: MA Experiment ID: 108434 Result: Up-regulated in Transcription
  misc_feature: MA Experiment 108434 PARAMETER Experiment Name: At_Root_Tips_cDNA_P Parameter: Tissue Value: Root Tips
tttcttctgctctcggaattggtgttgcagaagttgcaaatttggaagaaaagttaacaggactggtgaagtatcaaaatttggggttttgctacgatgacgctaggtgctcggcttgttgctcccatgattatacttctcctttttataccgattgaattagttaaagcggaagtcattacactgacaccagaaaccttttctgacaaggtagatttatatatgtgttctgtgctcctttgacgatgcgatattgaaaacggcttagctcgtttcaaagattgtttgcattgctcataaaggagaaggatactgcgtggttcgtaaagttttgtgttccttggtgtaaacactgcaagaaactggggaatttgtgggaagacttgggaaaagcaatggagggagacgatgaaattgaggttggtgaagtagactgtggtactagcagagctgtttgcaccaaagttgaaattcactcgtatccaacatttatgctattttacaatggagaagaagtttcgaaatataaaggaaaaagagacgttgaatcgctcaaggcttttgttgtagaggaaactgaaaaggcagcagaaaaagcacagcttgaagacaaggaactgtgatacaactagtcggtgattattagaacctgatacattgttccctttggttttcattttgcctatgcagttgtgtgactcttaccgttagttagataggcatggttttcagcacgatggaggagcatctttgggtttaaaggtttttcacaccactgttttgctaaaatattcagtttccattttattcagagtcagataagcaaagacgtaagtgtagttagtcgagatttctt

SEQ ID NO: 38576 - protein, 75 aa, Arabidopsis thaliana; identical to SEQ ID NO: 29679
  peptide (1)..(75): Ceres Seq. ID no. 12325519
  misc_feature (1)..(69): Homolog of NCBI NO: 29839593 NR Description: Thioredoxin domain containing protein 5 precursor
  misc_feature (1)..(69): Homolog of NCBI NO: 37574006 NR Description: Txndc5 protein [Mus musculus]
  misc_feature (1)..(69): Homolog of NCBI NO: 19353593 NR Description: Unknown (protein for MGC:37456) [Mus musculus]
  misc_feature (1)..(68): Homolog of NCBI NO: 21703732 NR Description: similar to thioredoxin related protein [Mus
  misc_feature (1)..(74): Homolog of NCBI NO: 28280043 NR Description: Similar to expressed sequence AL022641 [Xenopus
  misc_feature (1)..(74): Homolog of NCBI NO: 34784103 NR Description: Unknown (protein for MGC:66265) [Danio rerio]
  misc_feature (1)..(74): Homolog of NCBI NO: 38649034 NR Description: Unknown (protein for MGC:75894) [Silurana
  misc_feature (1)..(59): Homolog of NCBI NO: 1532175 NR Description: similar to protein disulfide isomerase
  misc_feature (1)..(75): Homolog of NCBI NO: 15223058 NR Description: unknown protein; protein id: At1g07960.1
  misc_feature (1)..(75): Homolog of NCBI NO: 8778824 NR Description: T6D22.5 [Arabidopsis thaliana]

SEQ ID NO: 38577 - protein, 51 aa, Arabidopsis thaliana
  peptide (1)..(51): Ceres Seq. ID no. 12325520
SSALGIGVAEVANLEEKLTGLVKYQNLGFCYDDARCSACCSHDYTSPFYTD

SEQ ID NO: 38578 - protein, 48 aa, Arabidopsis thaliana
  peptide (1)..(48): Ceres Seq. ID no. 12325521
  misc_feature (1)..(39): Homolog of NCBI NO: 1532175 NR Description: similar to protein disulfide isomerase
  misc_feature (1)..(39): Homolog of NCBI NO: 15223058 NR Description: unknown protein; protein id: At1g07960.1
  misc_feature (1)..(41): Homolog of NCBI NO: 8778824 NR Description: T6D22.5 [Arabidopsis thaliana]
MTLGARLVAPMIILLLFIPIELVKAEVITLTPETFSDKVDLYMCSVLL

SEQ ID NO: 38579 - DNA, 930 bp, Arabidopsis thaliana
  misc_feature (1)..(930): Ceres Seq. ID no. 13492957
  misc_feature: MA Experiment ID: 20000173 Result: Down-regulated in Transcription
  misc_feature: MA Experiment 20000173 PARAMETER Experiment Name: At_42deg_Heat_P Parameter: Age (day) Value: 14
  misc_feature: MA Experiment 20000173 PARAMETER Experiment Name: At_42deg_Heat_P Parameter: Organism Value: A. thaliana
  misc_feature: MA Experiment 20000173 PARAMETER Experiment Name: At_42deg_Heat_P Parameter: Plant Line Value: WS
  misc_feature: MA Experiment 20000173 PARAMETER Experiment Name: At_42deg_Heat_P Parameter: Temperature (deg C) Value: 42 vs. 22
  misc_feature: MA Experiment 20000173 PARAMETER Experiment Name: At_42deg_Heat_P Parameter: Timepoint (hr) Value: 6
  misc_feature: MA Experiment 20000173 PARAMETER Experiment Name: At_42deg_Heat_P Parameter: Tissue Value: Aerial
  misc_feature: MA Experiment ID: 20000234 Result: Up-regulated in Transcription
  misc_feature: MA Experiment 20000234 PARAMETER Experiment Name: At_Siliques_P Parameter: Age (day) Value: 21
  misc_feature: MA Experiment 20000234 PARAMETER Experiment Name: At_Siliques_P Parameter: Organism Value: A. thaliana
  misc_feature: MA Experiment 20000234 PARAMETER Experiment Name: At_Siliques_P Parameter: Plant Line Value: WS
  misc_feature: MA Experiment 20000234 PARAMETER Experiment Name: At_Siliques_P Parameter: Tissue Value: Less Than 5mm Siliques vs. Whole Plant
  misc_feature: MA Experiment ID: 20000235 Result: Up-regulated in Transcription
  misc_feature: MA Experiment 20000235 PARAMETER Experiment Name: At_Siliques_P Parameter: Age (day) Value: 21
  misc_feature: MA Experiment 20000235 PARAMETER Experiment Name: At_Siliques_P Parameter: Organism Value: A. thaliana
  misc_feature: MA Experiment 20000235 PARAMETER Experiment Name: At_Siliques_P Parameter: Plant Line Value: WS
  misc_feature: MA Experiment 20000235 PARAMETER Experiment Name: At_Siliques_P Parameter: Tissue Value: 5-10mm Siliques vs. Whole Plant
  misc_feature: MA Experiment ID: 20000265 Result: Up-regulated in Transcription
  misc_feature: MA Experiment 20000265 PARAMETER Experiment Name: At_Open_Flower_P Parameter: Age (day) Value: 21
  misc_feature: MA Experiment 20000265 PARAMETER Experiment Name: At_Open_Flower_P Parameter: Plant Line Value: WS
  misc_feature: MA Experiment 20000265 PARAMETER Experiment Name: At_Open_Flower_P Parameter: Tissue Value: Closed Flower vs. Whole Plant
  misc_feature: MA Experiment ID: 20000286 Result: Up-regulated in Transcription
  misc_feature: MA Experiment 20000286 PARAMETER Experiment Name: At_Open_Flower_P Parameter: Age (day) Value: 21
  misc_feature: MA Experiment 20000286 PARAMETER Experiment Name: At_Open_Flower_P Parameter: Plant Line Value: WS
  misc_feature: MA Experiment 20000286 PARAMETER Experiment Name: At_Open_Flower_P Parameter: Tissue Value: Half Open vs. Whole Plant
atgtgcttctatttgctttccgaaaaaaaccaaacgcacccatctccttcctcttctccttttctctccgaacaaagaacacaaccaaaacaaaaatctatgttagatatgtcggaatctgtactcacggcgatgtatagttggttcactccgacagttctcttcgtcttcctcaaccttatgattggtaccatcgccattagctcatctttctcttccaaatccaacgacccaaatcaaactcagatccaacgctctccttccatgattcatcgtctcaaatccataaacttctcttctttcacttctccagacaagtctcatctcgagtttcctccttcaacacctgaagacaacagcaacaacaactttcaccaaccagcttcaatcgaacagaatcaaccattcttgtctagatctccttctgttcttcacagaatcaaatctttcaatctttataactacatttctcaagaacccaccaatataatcgaagcttcaccaccgtcggtgaccgtagagacaaaacaagaacaagtacaagaacaagaagtaaaagaagaacaagaagaagaagaacagagtcttgaagaggtttatagtaaacttaatctaaaccatgtcgctaggacaaaatctgacactgaaccagctgctggaattagacctccgaagcttccaaagaagatgaaaaaatctgctagtaccaaatctccgttctctcactttcaagaagatgaaatctccgtggaggctcgccgtcctgcgacggtgaaagtgccgagagttacgacggtggaagaagctgatgaagaagtagatgcaaaagctgatgactttatcaatcgattcaagcatcagttgaagttacagagaattgattccatcactaagtataaggagatggtgaagaaaagaaacgacaagtga

SEQ ID NO: 38580 - protein, 309 aa, Arabidopsis thaliana
  peptide (1)..(309): Ceres Seq. ID no. 13492958
  misc_feature (41)..(291): Homolog of NCBI NO: 15236117 NR Description: uncharacterized protein [Arabidopsis thaliana]
  misc_feature (41)..(291): Homolog of NCBI NO: 549977 NR Description: cDNA-5-encoded protein
  misc_feature (77)..(304): Homolog of NCBI NO: 14326479 NR Description: AT5g56980/MHM17_10 [Arabidopsis thaliana]
  misc_feature (77)..(304): Homolog of NCBI NO: 18423922 NR Description: expressed protein [Arabidopsis thaliana]
  misc_feature (77)..(304): Homolog of NCBI NO: 9757987 NR Description: gene_id:MHM17.10~pir||T04268~similar to unknown
  misc_feature (77)..(304): Homolog of NCBI NO: 21592758 NR Description: unknown [Arabidopsis thaliana]
  misc_feature (71)..(308): Homolog of NCBI NO: 21594851 NR Description: uncharacterized protein [Arabidopsis thaliana]
  misc_feature (71)..(308): Homolog of NCBI NO: 15236117 NR Description: uncharacterized protein [Arabidopsis thaliana]
  misc_feature (71)..(308): Homolog of NCBI NO: 549977 NR Description: cDNA-5-encoded protein
  misc_feature (1)..(309): Homolog of NCBI NO: 15225251 NR Description: expressed protein [Arabidopsis thaliana]
MCFYLLSEKNQTHPSPSSSPFLSEQRTQPKQKSMLDMSESVLTAMYSWFTPTVLFVFLNLMIGTIAISSSFSSKSNDPNQTQIQRSPSMIHRLKSINFSSFTSPDKSHLEFPPSTPEDNSNNNFHQPASIEQNQPFLSRSPSVLHRIKSFNLYNYISQEPTNIIEASPPSVTVETKQEQVQEQEVKEEQEEEEQSLEEVYSKLNLNHVARTKSDTEPAAGIRPPKLPKKMKKSASTKSPFSHFQEDEISVEARRPATVKVPRVTTVEEADEEVDAKADDFINRFKHQLKLQRIDSITKYKEMVKKRNDK

SEQ ID NO: 38581 - protein, 276 aa, Arabidopsis thaliana
  peptide (1)..(276): Ceres Seq. ID no. 13492959
  misc_feature (8)..(258): Homolog of NCBI NO: 15236117 NR Description: uncharacterized protein [Arabidopsis thaliana]
  misc_feature (8)..(258): Homolog of NCBI NO: 549977 NR Description: cDNA-5-encoded protein
  misc_feature (44)..(271): Homolog of NCBI NO: 14326479 NR Description: AT5g56980/MHM17_10 [Arabidopsis thaliana]
  misc_feature (44)..(271): Homolog of NCBI NO: 18423922 NR Description: expressed protein [Arabidopsis thaliana]
  misc_feature (44)..(271): Homolog of NCBI NO: 9757987 NR Description: gene_id:MHM17.10~pir||T04268~similar to unknown
  misc_feature (44)..(271): Homolog of NCBI NO: 21592758 NR Description: unknown [Arabidopsis thaliana]
  misc_feature (38)..(275): Homolog of NCBI NO: 15236117 NR Description: uncharacterized protein [Arabidopsis thaliana]
  misc_feature (38)..(275): Homolog of NCBI NO: 21594851 NR Description: uncharacterized protein [Arabidopsis thaliana]
  misc_feature (38)..(275): Homolog of NCBI NO: 549977 NR Description: cDNA-5-encoded protein
  misc_feature (1)..(276): Homolog of NCBI NO: 15225251 NR Description: expressed protein [Arabidopsis thaliana]
MLDMSESVLTAMYSWFTPTVLFVFLNLMIGTIAISSSFSSKSNDPNQTQIQRSPSMIHRLKSINFSSFTSPDKSHLEFPPSTPEDNSNNNFHQPASIEQNQPFLSRSPSVLHRIKSFNLYNYISQEPTNIIEASPPSVTVETKQEQVQEQEVKEEQEEEEQSLEEVYSKLNLNHVARTKSDTEPAAGIRPPKLPKKMKKSASTKSPFSHFQEDEISVEARRPATVKVPRVTTVEEADEEVDAKADDFINRFKHQLKLQRIDSITKYKEMVKKRNDK

SEQ ID NO: 38582 - protein, 273 aa, Arabidopsis thaliana
  peptide (1)..(273): Ceres Seq. ID no. 13492960
  misc_feature (5)..(255): Homolog of NCBI NO: 15236117 NR Description: uncharacterized protein [Arabidopsis thaliana]
  misc_feature (5)..(255): Homolog of NCBI NO: 549977 NR Description: cDNA-5-encoded protein
  misc_feature (41)..(268): Homolog of NCBI NO: 14326479 NR Description: AT5g56980/MHM17_10 [Arabidopsis thaliana]
  misc_feature (41)..(268): Homolog of NCBI NO: 18423922 NR Description: expressed protein [Arabidopsis thaliana]
  misc_feature (41)..(268): Homolog of NCBI NO: 9757987 NR Description: gene_id:MHM17.10~pir||T04268~similar to unknown
  misc_feature (41)..(268): Homolog of NCBI NO: 21592758 NR Description: unknown [Arabidopsis thaliana]
  misc_feature (35)..(272): Homolog of NCBI NO: 21594851 NR Description: uncharacterized protein [Arabidopsis thaliana]
  misc_feature (35)..(272): Homolog of NCBI NO: 15236117 NR Description: uncharacterized protein [Arabidopsis thaliana]
  misc_feature (35)..(272): Homolog of NCBI NO: 549977 NR Description: cDNA-5-encoded protein
  misc_feature (1)..(273): Homolog of NCBI NO: 15225251 NR Description: expressed protein [Arabidopsis thaliana]
MSESVLTAMYSWFTPTVLFVFLNLMIGTIAISSSFSSKSNDPNQTQIQRSPSMIHRLKSINFSSFTSPDKSHLEFPPSTPEDNSNNNFHQPASIEQNQPFLSRSPSVLHRIKSFNLYNYISQEPTNIIEASPPSVTVETKQEQVQEQEVKEEQEEEEQSLEEVYSKLNLNHVARTKSDTEPAAGIRPPKLPKKMKKSASTKSPFSHFQEDEISVEARRPATVKVPRVTTVEEADEEVDAKADDFINRFKHQLKLQRIDSITKYKEMVKKRNDK

SEQ ID NO: 38583 - DNA, 1225 bp, Arabidopsis thaliana
  misc_feature (1)..(1225): Ceres Seq. ID no. 12328732
  misc_feature: MA Experiment ID: 108434 Result: Up-regulated in Transcription
  misc_feature: MA Experiment 108434 PARAMETER Experiment Name: At_Root_Tips_cDNA_P Parameter: Tissue Value: Root Tips
  misc_feature: MA Experiment ID: 108461 Result: Up-regulated in Transcription
  misc_feature: MA Experiment 108461 PARAMETER Experiment Name: At_Germinating_Seeds_cDNA_P Parameter: Age (day) Value: 1 vs. 0
  misc_feature: MA Experiment 108461 PARAMETER Experiment Name: At_Germinating_Seeds_cDNA_P Parameter: Tissue Value: Germinating Seeds
  misc_feature: MA Experiment ID: 108561 Result: Down-regulated in Transcription
  misc_feature: MA Experiment 108561 PARAMETER Experiment Name: At_100uM_ABA_cDNA_P Parameter: Timepoint (hr) Value: 6
  misc_feature: MA Experiment 108561 PARAMETER Experiment Name: At_100uM_ABA_cDNA_P Parameter: Tissue Value: Aerial
  misc_feature: MA Experiment 108561 PARAMETER Experiment Name: At_100uM_ABA_cDNA_P Parameter: Treatment Value: 100uM ABA vs. No Treatment
  misc_feature: MA Experiment ID: 108573 Result: Down-regulated in Transcription
  misc_feature: MA Experiment 108573 PARAMETER Experiment Name: At_Drought_cDNA_P Parameter: Timepoint (hr) Value: 6
  misc_feature: MA Experiment 108573 PARAMETER Experiment Name: At_Drought_cDNA_P Parameter: Tissue Value: Aerial
  misc_feature: MA Experiment 108573 PARAMETER Experiment Name: At_Drought_cDNA_P Parameter: Treatment Value: Drought vs. No Drought
  misc_feature: MA Experiment ID: 108585 Result: Down-regulated in Transcription
  misc_feature: MA Experiment 108585 PARAMETER Experiment Name: At_5mM_NaNP_cDNA_P Parameter: Timepoint (hr) Value: 6
  misc_feature: MA Experiment 108585 PARAMETER Experiment Name: At_5mM_NaNP_cDNA_P Parameter: Tissue Value: Aerial
  misc_feature: MA Experiment 108585 PARAMETER Experiment Name: At_5mM_NaNP_cDNA_P Parameter: Treatment Value: null
  misc_feature: MA Experiment ID: 20000173 Result: Down-regulated in Transcription
  misc_feature: MA Experiment 20000173 PARAMETER Experiment Name: At_42deg_Heat_P Parameter: Age (day) Value: 14
  misc_feature: MA Experiment 20000173 PARAMETER Experiment Name: At_42deg_Heat_P Parameter: Organism Value: A. thaliana
  misc_feature: MA Experiment 20000173 PARAMETER Experiment Name: At_42deg_Heat_P Parameter: Plant Line Value: WS
  misc_feature: MA Experiment 20000173 PARAMETER Experiment Name: At_42deg_Heat_P Parameter: Temperature (deg C) Value: 42 vs. 22
  misc_feature: MA Experiment 20000173 PARAMETER Experiment Name: At_42deg_Heat_P Parameter: Timepoint (hr) Value: 6
  misc_feature: MA Experiment 20000173 PARAMETER Experiment Name: At_42deg_Heat_P Parameter: Tissue Value: Aerial
  misc_feature: MA Experiment ID: 20000179 Result: Up-regulated in Transcription
  misc_feature: MA Experiment 20000179 PARAMETER Experiment Name: At_Germinating_Seeds_P Parameter: Age (hr) Value: 6 vs. 0
  misc_feature: MA Experiment 20000179 PARAMETER Experiment Name: At_Germinating_Seeds_P Parameter: Tissue Value: Germinating Seeds
  misc_feature: MA Experiment ID: 20000180 Result: Up-regulated in Transcription
  misc_feature: MA Experiment 20000180 PARAMETER Experiment Name: At_Germinating_Seeds_P Parameter: Age (hr) Value: 24 vs. 0
  misc_feature: MA Experiment 20000180 PARAMETER Experiment Name: At_Germinating_Seeds_P Parameter: Tissue Value: Germinating Seeds
  misc_feature: MA Experiment ID: 20000185 Result: Up-regulated in Transcription
  misc_feature: MA Experiment 20000185 PARAMETER Experiment Name: At_Roots__P Parameter: Age (day) Value: 7 vs. 21
  misc_feature: MA Experiment 20000185 PARAMETER Experiment Name: At_Roots__P Parameter: Organism Value: A. thaliana
  misc_feature: MA Experiment 20000185 PARAMETER Experiment Name: At_Roots__P Parameter: Tissue Value: Roots vs. Whole Plant
  misc_feature: MA Experiment ID: 20000227 Result: Up-regulated in Transcription
  misc_feature: MA Experiment 20000227 PARAMETER Experiment Name: At_Root-Tips-vs-Tops_P Parameter: Tissue Value: Root Tips vs. Root Tops
  misc_feature: MA Experiment ID: 20000234 Result: Up-regulated in Transcription
  misc_feature: MA Experiment 20000234 PARAMETER Experiment Name: At_Siliques_P Parameter: Age (day) Value: 21
  misc_feature: MA Experiment 20000234 PARAMETER Experiment Name: At_Siliques_P Parameter: Organism Value: A. thaliana
  misc_feature: MA Experiment 20000234 PARAMETER Experiment Name: At_Siliques_P Parameter: Plant Line Value: WS
  misc_feature: MA Experiment 20000234 PARAMETER Experiment Name: At_Siliques_P Parameter: Tissue Value: Less Than 5mm Siliques vs. Whole Plant
  misc_feature: MA Experiment ID: 20000264 Result: Up-regulated in Transcription
  misc_feature: MA Experiment 20000264 PARAMETER Experiment Name: At_Open_Flower_P Parameter: Age (day) Value: 21
  misc_feature: MA Experiment 20000264 PARAMETER Experiment Name: At_Open_Flower_P Parameter: Plant Line Value: WS
  misc_feature: MA Experiment 20000264 PARAMETER Experiment Name: At_Open_Flower_P Parameter: Tissue Value: Open Flower vs. Whole Plant
  misc_feature: MA Experiment ID: 20000265 Result: Up-regulated in Transcription
  misc_feature: MA Experiment 20000265 PARAMETER Experiment Name: At_Open_Flower_P Parameter: Age (day) Value: 21
  misc_feature: MA Experiment 20000265 PARAMETER Experiment Name: At_Open_Flower_P Parameter: Plant Line Value: WS
  misc_feature: MA Experiment 20000265 PARAMETER Experiment Name: At_Open_Flower_P Parameter: Tissue Value: Closed Flower vs. Whole Plant
  misc_feature: MA Experiment ID: 20000436 Result: Down-regulated in Transcription
  misc_feature: MA Experiment 20000436 PARAMETER Experiment Name: At_Drought_P Parameter: Age (day) Value: 7
  misc_feature: MA Experiment 20000436 PARAMETER Experiment Name: At_Drought_P Parameter: Organism Value: A. thaliana
  misc_feature: MA Experiment 20000436 PARAMETER Experiment Name: At_Drought_P Parameter: Plant Line Value: WS
  misc_feature: MA Experiment 20000436 PARAMETER Experiment Name: At_Drought_P Parameter: Timepoint (hr) Value: 12
  misc_feature: MA Experiment 20000436 PARAMETER Experiment Name: At_Drought_P Parameter: Tissue Value: Whole Plant
  misc_feature: MA Experiment 20000436 PARAMETER Experiment Name: At_Drought_P Parameter: Treatment Value: Drought vs. No Drought
  misc_feature: MA Experiment ID: 20000437 Result: Down-regulated in Transcription
  misc_feature: MA Experiment 20000437 PARAMETER Experiment Name: At_Drought_P Parameter: Age (day) Value: 8
  misc_feature: MA Experiment 20000437 PARAMETER Experiment Name: At_Drought_P Parameter: Organism Value: A. thaliana
  misc_feature: MA Experiment 20000437 PARAMETER Experiment Name: At_Drought_P Parameter: Plant Line Value: WS
  misc_feature: MA Experiment 20000437 PARAMETER Experiment Name: At_Drought_P Parameter: Timepoint (hr) Value: 24
  misc_feature: MA Experiment 20000437 PARAMETER Experiment Name: At_Drought_P Parameter: Tissue Value: Whole Plant
  misc_feature: MA Experiment 20000437 PARAMETER Experiment Name: At_Drought_P Parameter: Treatment Value: Drought vs. No Drought
  misc_feature: MA Experiment ID: 20000441 Result: Down-regulated in Transcription
  misc_feature: MA Experiment 20000441 PARAMETER Experiment Name: At_1uM_BR-BRZ__P Parameter: Tissue Value: Shoot Apices
  misc_feature: MA Experiment 20000441 PARAMETER Experiment Name: At_1uM_BR-BRZ__P Parameter: Treatment Value: 1uM BR vs. No Treatment
  misc_feature: MA Experiment ID: 20000443 Result: Down-regulated in Transcription
  misc_feature: MA Experiment 20000443 PARAMETER Experiment Name: At_1uM_BR-BRZ__P Parameter: Tissue Value: Shoot Apices
  misc_feature: MA Experiment 20000443 PARAMETER Experiment Name: At_1uM_BR-BRZ__P Parameter: Treatment Value: 1uM BRZ vs. No Treatment
  misc_feature: MA Experiment ID: 20001560 Result: Up-regulated in Transcription
  misc_feature: MA Experiment 20001560 PARAMETER Experiment Name: At_Drought_Soil_Dry_P Parameter: Age (day) Value: 28
  misc_feature: MA Experiment 20001560 PARAMETER Experiment Name: At_Drought_Soil_Dry_P Parameter: Organism Value: A. thaliana
  misc_feature: MA Experiment 20001560 PARAMETER Experiment Name: At_Drought_Soil_Dry_P Parameter: Plant Line Value: WS
  misc_feature: MA Experiment 20001560 PARAMETER Experiment Name: At_Drought_Soil_Dry_P Parameter: Post Timepoint (hr) Value: None
  misc_feature: MA Experiment 20001560 PARAMETER Experiment Name: At_Drought_Soil_Dry_P Parameter: Post-Treatment Value: None
  misc_feature: MA Experiment 20001560 PARAMETER Experiment Name: At_Drought_Soil_Dry_P Parameter: Timepoint (day) Value: 14
  misc_feature: MA Experiment 20001560 PARAMETER Experiment Name: At_Drought_Soil_Dry_P Parameter: Treatment Value: Drought vs. No Drought
  misc_feature: MA Experiment ID: 20001911 Result: Down-regulated in Transcription
  misc_feature: MA Experiment 20001911 PARAMETER Experiment Name: At_Drought_Reproduction_P Parameter: Age (day) Value: 40
  misc_feature: MA Experiment 20001911 PARAMETER Experiment Name: At_Drought_Reproduction_P Parameter: Organism Value: A. thaliana
  misc_feature: MA Experiment 20001911 PARAMETER Experiment Name: At_Drought_Reproduction_P Parameter: Plant Line Value: WS
  misc_feature: MA Experiment 20001911 PARAMETER Experiment Name: At_Drought_Reproduction_P Parameter: Timepoint (day) Value: 10
  misc_feature: MA Experiment 20001911 PARAMETER Experiment Name: At_Drought_Reproduction_P Parameter: Tissue Value: Flowers
  misc_feature: MA Experiment 20001911 PARAMETER Experiment Name: At_Drought_Reproduction_P Parameter: Treatment Value: Drought vs. No Drought
attcacacaaacccagagatctgaaactaagaagccatggatgctcaatatcaagatctacctcctctcaaaagattaagactgttgcagagagatctcgaagctgctcaacagcaccagctaccgaaccaaccggagatgaagtcgttgcagttgccggcaaagaagaggaagcagactcgtgttgattatgacgatgacgacgcagagaactccaatcccacctatcattgtcttccggcgaagaaaaggatctgggcgattgatcccgatcttctctccggtggtggtaaccccttttcgccttttgatctaaatgtagagtataagccttatgttgaagagaaatcaattgagaaaaagtcaactctaaatgttgaatctagtctagaggtagaagaagatgatgataaagagaatatagatcctctagggaaaggaaaagctttagatctctctgatagagaagtagaagatgaagatgggattatgtgtgctgtatgtcaaagtacagatggtgatccattgaatccaattgtgttctgtgatggttgtgatttgatggttcatgcttcttgctatgggaatcctcttgttaaggctattccagaaggtgattggttttgtagacagtgtttatcgtcgaagaaccgagaaaagatcttctcttgctgcttgtgtacaactaaaggcggggcgatgaaacctacgaatgatggtagatgggctcatattacttgtgcgttgtttgttccggaagtttactttgaggatcctgaaggaagagaagggatttgttgtagtgaggtattgagtaagagatggaaagataggtgttatttgtgtaaggttagacgcggttgtgttattgagtgttcggagatgagatgtaagttggcttttcatgttacttgtgggttaaaggaagatctttgtattgagtatcgtgaagggaagaagagtggtggtattgttgttggtttctgtaatgagcataccaaactttgggaaagggaaagtggaaagtacaagattgttgccagagaagaagataaaaagtaggagaaagctcaagggccatgacctgaagaccatgctttttttgcttgcaactctgaagcttccactcatgtatttgattgttttaaaacgtttgttcttcttatttatctgattagtgagagtagctgatcctaaatgctatcaagtttattatatttttgtg

SEQ ID NO: 38584 - protein, 341 aa, Arabidopsis thaliana
  peptide (1)..(341): Ceres Seq. ID no. 12328733
  misc_feature (152)..(203): Pfam Name: PHD-finger Pfam Description: PHD-finger
  misc_feature (147)..(341): Homolog of NCBI NO: 26340050 NR Description: unnamed protein product [Mus musculus]
  misc_feature (76)..(330): Homolog of NCBI NO: 40389473 NR Description: TPA: Jade protein [Ciona intestinalis]
  misc_feature (147)..(337): Homolog of NCBI NO: 22760789 NR Description: unnamed protein product [Homo sapiens]
  misc_feature (147)..(337): Homolog of NCBI NO: 19923609 NR Description: PHD protein Jade-1 [Homo sapiens]
  misc_feature (147)..(341): Homolog of NCBI NO: 40389487 NR Description: TPA: Jade1S protein [Mus musculus]
  misc_feature (147)..(341): Homolog of NCBI NO: 40389479 NR Description: TPA: putative Jade1 [Takifugu rubripes]
  misc_feature (91)..(338): Homolog of NCBI NO: 28422365 NR Description: Similar to RIKEN cDNA D530048A03 gene [Danio
  misc_feature (102)..(336): Homolog of NCBI NO: 34906262 NR Description: P0489A01.16 [Oryza sativa (japonica
  misc_feature (1)..(341): Homolog of NCBI NO: 9294395 NR Description: gene_id:MIE1.25~pir||JC2069~similar to
  misc_feature (1)..(341): Homolog of NCBI NO: 18400507 NR Description: zinc finger protein-related
MDAQYQDLPPLKRLRLLQRDLEAAQQHQLPNQPEMKSLQLPAKKRKQTRVDYDDDDAENSNPTYHCLPAKKRIWAIDPDLLSGGGNPFSPFDLNVEYKPYVEEKSIEKKSTLNVESSLEVEEDDDKENIDPLGKGKALDLSDREVEDEDGIMCAVCQSTDGDPLNPIVFCDGCDLMVHASCYGNPLVKAIPEGDWFCRQCLSSKNREKIFSCCLCTTKGGAMKPTNDGRWAHITCALFVPEVYFEDPEGREGICCSEVLSKRWKDRCYLCKVRRGCVIECSEMRCKLAFHVTCGLKEDLCIEYREGKKSGGIVVGFCNEHTKLWERESGKYKIVAREEDKK

SEQ ID NO: 38585 - protein, 307 aa, Arabidopsis thaliana
  peptide (1)..(307): Ceres Seq. ID no. 12328734
  misc_feature (118)..(169): Pfam Name: PHD-finger Pfam Description: PHD-finger
  misc_feature (113)..(307): Homolog of NCBI NO: 26340050 NR Description: unnamed protein product [Mus musculus]
  misc_feature (42)..(296): Homolog of NCBI NO: 40389473 NR Description: TPA: Jade protein [Ciona intestinalis]
  misc_feature (113)..(303): Homolog of NCBI NO: 22760789 NR Description: unnamed protein product [Homo sapiens]
  misc_feature (113)..(303): Homolog of NCBI NO: 19923609 NR Description: PHD protein Jade-1 [Homo sapiens]
  misc_feature (113)..(307): Homolog of NCBI NO: 40389487 NR Description: TPA: Jade1S protein [Mus musculus]
  misc_feature (113)..(307): Homolog of NCBI NO: 40389479 NR Description: TPA: putative Jade1 [Takifugu rubripes]
  misc_feature (57)..(304): Homolog of NCBI NO: 28422365 NR Description: Similar to RIKEN cDNA D530048A03 gene [Danio
  misc_feature (68)..(302): Homolog of NCBI NO: 34906262 NR Description: P0489A01.16 [Oryza sativa (japonica
  misc_feature (1)..(307): Homolog of NCBI NO: 9294395 NR Description: gene_id:MIE1.25~pir||JC2069~similar to
  misc_feature (1)..(307): Homolog of NCBI NO: 18400507 NR Description: zinc finger protein-related
MKSLQLPAKKRKQTRVDYDDDDAENSNPTYHCLPAKKRIWAIDPDLLSGGGNPFSPFDLNVEYKPYVEEKSIEKKSTLNVESSLEVEEDDDKENIDPLGKGKALDLSDREVEDEDGIMCAVCQSTDGDPLNPIVFCDGCDLMVHASCYGNPLVKAIPEGDWFCRQCLSSKNREKIFSCCLCTTKGGAMKPTNDGRWAHITCALFVPEVYFEDPEGREGICCSEVLSKRWKDRCYLCKVRRGCVIECSEMRCKLAFHVTCGLKEDLCIEYREGKKSGGIVVGFCNEHTKLWERESGKYKIVAREEDKK

SEQ ID NO: 38586 - protein, 190 aa, Arabidopsis thaliana
  peptide (1)..(190): Ceres Seq. ID no. 12328735
  misc_feature (1)..(52): Pfam Name: PHD-finger Pfam Description: PHD-finger
  misc_feature (1)..(190): Homolog of NCBI NO: 26340050 NR Description: unnamed protein product [Mus musculus]
  misc_feature (1)..(179): Homolog of NCBI NO: 40389473 NR Description: TPA: Jade protein [Ciona intestinalis]
  misc_feature (1)..(186): Homolog of NCBI NO: 22760789 NR Description: unnamed protein product [Homo sapiens]
  misc_feature (1)..(186): Homolog of NCBI NO: 19923609 NR Description: PHD protein Jade-1 [Homo sapiens]
  misc_feature (1)..(190): Homolog of NCBI NO: 40389487 NR Description: TPA: Jade1S protein [Mus musculus]
  misc_feature (1)..(190): Homolog of NCBI NO: 40389479 NR Description: TPA: putative Jade1 [Takifugu rubripes]
  misc_feature (1)..(187): Homolog of NCBI NO: 28422365 NR Description: Similar to RIKEN cDNA D530048A03 gene [Danio
  misc_feature (1)..(185): Homolog of NCBI NO: 34906262 NR Description: P0489A01.16 [Oryza sativa (japonica
  misc_feature (1)..(190): Homolog of NCBI NO: 9294395 NR Description: gene_id:MIE1.25~pir||JC2069~similar to
  misc_feature (1)..(190): Homolog of NCBI NO: 18400507 NR Description: zinc finger protein-related
MCAVCQSTDGDPLNPIVFCDGCDLMVHASCYGNPLVKAIPEGDWFCRQCLSSKNREKIFSCCLCTTKGGAMKPTNDGRWAHITCALFVPEVYFEDPEGREGICCSEVLSKRWKDRCYLCKVRRGCVIECSEMRCKLAFHVTCGLKEDLCIEYREGKKSGGIVVGFCNEHTKLWERESGKYKIVAREEDKK

SEQ ID NO: 38587 - DNA, 2022 bp, Arabidopsis thaliana
  misc_feature (1)..(2022): Ceres Seq. ID no. 12328620
  misc_feature: MA Experiment ID: 108434 Result: Up-regulated in Transcription
  misc_feature: MA Experiment 108434 PARAMETER Experiment Name: At_Root_Tips_cDNA_P Parameter: Tissue Value: Root Tips
  misc_feature: MA Experiment ID: 108464 Result: Up-regulated in Transcription
  misc_feature: MA Experiment 108464 PARAMETER Experiment Name: At_Germinating_Seeds_cDNA_P Parameter: Age (day) Value: 4 vs. 0
  misc_feature: MA Experiment 108464 PARAMETER Experiment Name: At_Germinating_Seeds_cDNA_P Parameter: Tissue Value: Germinating Seeds
  misc_feature: MA Experiment ID: 108489 Result: Down-regulated in Transcription
  misc_feature: MA Experiment ID: 108576 Result: Up-regulated in Transcription
  misc_feature: MA Experiment 108576 PARAMETER Experiment Name: At_42deg_Heat_cDNA_P Parameter: Temperature (deg C) Value: 42 vs. 22
  misc_feature: MA Experiment 108576 PARAMETER Experiment Name: At_42deg_Heat_cDNA_P Parameter: Timepoint (hr) Value: 1
  misc_feature: MA Experiment 108576 PARAMETER Experiment Name: At_42deg_Heat_cDNA_P Parameter: Tissue Value: Aerial
  misc_feature: MA Experiment ID: 108577 Result: Up-regulated in Transcription
  misc_feature: MA Experiment 108577 PARAMETER Experiment Name: At_42deg_Heat_cDNA_P Parameter: Temperature (deg C) Value: 42 vs. 22
  misc_feature: MA Experiment 108577 PARAMETER Experiment Name: At_42deg_Heat_cDNA_P Parameter: Timepoint (hr) Value: 6
  misc_feature: MA Experiment 108577 PARAMETER Experiment Name: At_42deg_Heat_cDNA_P Parameter: Tissue Value: Aerial
  misc_feature: MA Experiment ID: 108595 Result: Up-regulated in Transcription
  misc_feature: MA Experiment 108595 PARAMETER Experiment Name: At_Ler-pi_Ovule_cDNA_P Parameter: Plant Line Value: null
  misc_feature: MA Experiment ID: 108667 Result: Up-regulated in Transcription
  misc_feature: MA Experiment 108667 PARAMETER Experiment Name: At_2mM_SA_cDNA_P Parameter: Plant Line Value: WS
  misc_feature: MA Experiment 108667 PARAMETER Experiment Name: At_2mM_SA_cDNA_P Parameter: Timepoint (hr) Value: 1
  misc_feature: MA Experiment 108667 PARAMETER Experiment Name: At_2mM_SA_cDNA_P Parameter: Treatment Value: 2mM SA vs. No Treatment
  misc_feature: MA Experiment ID: 20000093 Result: Up-regulated in Transcription
  misc_feature: MA Experiment 20000093 PARAMETER Experiment Name: At_42deg_Heat_cDNA_P Parameter: Temperature (deg C) Value: 42 vs. 22
  misc_feature: MA Experiment 20000093 PARAMETER Experiment Name: At_42deg_Heat_cDNA_P Parameter: Timepoint (hr) Value: 0.5
  misc_feature: MA Experiment 20000093 PARAMETER Experiment Name: At_42deg_Heat_cDNA_P Parameter: Tissue Value: Aerial
  misc_feature: MA Experiment ID: 20000111 Result: Up-regulated in Transcription
  misc_feature: MA Experiment 20000111 PARAMETER Experiment Name: At_42deg_Heat_cDNA_P Parameter: Temperature (deg C) Value: 42 vs. 22
  misc_feature: MA Experiment 20000111 PARAMETER Experiment Name: At_42deg_Heat_cDNA_P Parameter: Timepoint (hr) Value: 6
  misc_feature: MA Experiment 20000111 PARAMETER Experiment Name: At_42deg_Heat_cDNA_P Parameter: Tissue Value: Aerial
  misc_feature: MA Experiment ID: 20000112 Result: Up-regulated in Transcription
  misc_feature: MA Experiment 20000112 PARAMETER Experiment Name: At_42deg_Heat_cDNA_P Parameter: Temperature (deg C) Value: 42 vs. 22
  misc_feature: MA Experiment 20000112 PARAMETER Experiment Name: At_42deg_Heat_cDNA_P Parameter: Timepoint (hr) Value: 2
  misc_feature: MA Experiment 20000112 PARAMETER Experiment Name: At_42deg_Heat_cDNA_P Parameter: Tissue Value: Aerial
  misc_feature: MA Experiment ID: 20000113 Result: Up-regulated in Transcription
  misc_feature: MA Experiment 20000113 PARAMETER Experiment Name: At_42deg_Heat_cDNA_P Parameter: Temperature (deg C) Value: 42 vs. 22
  misc_feature: MA Experiment 20000113 PARAMETER Experiment Name: At_42deg_Heat_cDNA_P Parameter: Timepoint (hr) Value: 8
  misc_feature: MA Experiment 20000113 PARAMETER Experiment Name: At_42deg_Heat_cDNA_P Parameter: Tissue Value: Aerial
  misc_feature: MA Experiment ID: 20000144 Result: Up-regulated in Transcription
  misc_feature: MA Experiment 20000144 PARAMETER Experiment Name: At_42deg_Heat_cDNA_P Parameter: Temperature (deg C) Value: 42 vs. 22
  misc_feature: MA Experiment 20000144 PARAMETER Experiment Name: At_42deg_Heat_cDNA_P Parameter: Timepoint (hr) Value: 1
  misc_feature: MA Experiment 20000144 PARAMETER Experiment Name: At_42deg_Heat_cDNA_P Parameter: Tissue Value: Aerial
  misc_feature: MA Experiment ID: 20000171 Result: Up-regulated in Transcription
  misc_feature: MA Experiment 20000171 PARAMETER Experiment Name: At_42deg_Heat_P Parameter: Age (day) Value: 14
  misc_feature: MA Experiment 20000171 PARAMETER Experiment Name: At_42deg_Heat_P Parameter: Organism Value: A. thaliana
  misc_feature: MA Experiment 20000171 PARAMETER Experiment Name: At_42deg_Heat_P Parameter: Plant Line Value: WS
  misc_feature: MA Experiment 20000171 PARAMETER Experiment Name: At_42deg_Heat_P Parameter: Temperature (deg C) Value: 42 vs. 22
  misc_feature: MA Experiment 20000171 PARAMETER Experiment Name: At_42deg_Heat_P Parameter: Timepoint (hr) Value: 1
  misc_feature: MA Experiment 20000171 PARAMETER Experiment Name: At_42deg_Heat_P Parameter: Tissue Value: Aerial
  misc_feature: MA Experiment ID: 20000173 Result: Up-regulated in Transcription
  misc_feature: MA Experiment 20000173 PARAMETER Experiment Name: At_42deg_Heat_P Parameter: Age (day) Value: 14
  misc_feature: MA Experiment 20000173 PARAMETER Experiment Name: At_42deg_Heat_P Parameter: Organism Value: A. thaliana
  misc_feature: MA Experiment 20000173 PARAMETER Experiment Name: At_42deg_Heat_P Parameter: Plant Line Value: WS
  misc_feature: MA Experiment 20000173 PARAMETER Experiment Name: At_42deg_Heat_P Parameter: Temperature (deg C) Value: 42 vs. 22
  misc_feature: MA Experiment 20000173 PARAMETER Experiment Name: At_42deg_Heat_P Parameter: Timepoint (hr) Value: 6
  misc_feature: MA Experiment 20000173 PARAMETER Experiment Name: At_42deg_Heat_P Parameter: Tissue Value: Aerial
  misc_feature: MA Experiment ID: 20000437 Result: Up-regulated in Transcription
  misc_feature: MA Experiment 20000437 PARAMETER Experiment Name: At_Drought_P Parameter: Age (day) Value: 8
  misc_feature: MA Experiment 20000437 PARAMETER Experiment Name: At_Drought_P Parameter: Organism Value: A. thaliana
  misc_feature: MA Experiment 20000437 PARAMETER Experiment Name: At_Drought_P Parameter: Plant Line Value: WS
  misc_feature: MA Experiment 20000437 PARAMETER Experiment Name: At_Drought_P Parameter: Timepoint (hr) Value: 24
  misc_feature: MA Experiment 20000437 PARAMETER Experiment Name: At_Drought_P Parameter: Tissue Value: Whole Plant
  misc_feature: MA Experiment 20000437 PARAMETER Experiment Name: At_Drought_P Parameter: Treatment Value: Drought vs. No Drought
  misc_feature: MA Experiment ID: 20000441 Result: Up-regulated in Transcription
  misc_feature: MA Experiment 20000441 PARAMETER Experiment Name: At_1uM_BR-BRZ__P Parameter: Tissue Value: Shoot Apices
  misc_feature: MA Experiment 20000441 PARAMETER Experiment Name: At_1uM_BR-BRZ__P Parameter: Treatment Value: 1uM BR vs. No Treatment
  misc_feature: MA Experiment ID: 20000443 Result: Up-regulated in Transcription
  misc_feature: MA Experiment 20000443 PARAMETER Experiment Name: At_1uM_BR-BRZ__P Parameter: Tissue Value: Shoot Apices
  misc_feature: MA Experiment 20000443 PARAMETER Experiment Name: At_1uM_BR-BRZ__P Parameter: Treatment Value: 1uM BRZ vs. No Treatment
  misc_feature: MA Experiment ID: 20000709 Result: Up-regulated in Transcription
  misc_feature: MA Experiment 20000709 PARAMETER Experiment Name: At_15mM_NH4NO3_L-to-H_P Parameter: Age (hr) Value: 14
  misc_feature: MA Experiment 20000709 PARAMETER Experiment Name: At_15mM_NH4NO3_L-to-H_P Parameter: Organism Value: A. thaliana
  misc_feature: MA Experiment 20000709 PARAMETER Experiment Name: At_15mM_NH4NO3_L-to-H_P Parameter: Plant Line Value: WS
  misc_feature: MA Experiment 20000709 PARAMETER Experiment Name: At_15mM_NH4NO3_L-to-H_P Parameter: Timepoint (hr) Value: 4
  misc_feature: MA Experiment 20000709 PARAMETER Experiment Name: At_15mM_NH4NO3_L-to-H_P Parameter: Tissue Value: Aerial
  misc_feature: MA Experiment 20000709 PARAMETER Experiment Name: At_15mM_NH4NO3_L-to-H_P Parameter: Treatment Value: 15mM NH4NO3 vs. 30mM Mannitol
  misc_feature: MA Experiment ID: 20001248 Result: Down-regulated in Transcription
  misc_feature: MA Experiment 20001248 PARAMETER Experiment Name: At_Far-red-induction_P Parameter: Age (day) Value: 7
  misc_feature: MA Experiment 20001248 PARAMETER Experiment Name: At_Far-red-induction_P Parameter: Light Value: Far-red vs. White
  misc_feature: MA Experiment 20001248 PARAMETER Experiment Name: At_Far-red-induction_P Parameter: Organism Value: A. thaliana
  misc_feature: MA Experiment 20001248 PARAMETER Experiment Name: At_Far-red-induction_P Parameter: Plant Line Value: Columbia
  misc_feature: MA Experiment 20001248 PARAMETER Experiment Name: At_Far-red-induction_P Parameter: Timepoint (hr) Value: 4
  misc_feature: MA Experiment 20001248 PARAMETER Experiment Name: At_Far-red-induction_P Parameter: Tissue Value: Whole Plant
  misc_feature: MA Experiment ID: 20001554 Result: Up-regulated in Transcription
  misc_feature: MA Experiment 20001554 PARAMETER Experiment Name: At_Drought_Soil_Dry_P Parameter: Age (day) Value: 21
  misc_feature: MA Experiment 20001554 PARAMETER Experiment Name: At_Drought_Soil_Dry_P Parameter: Organism Value: A. thaliana
  misc_feature: MA Experiment 20001554 PARAMETER Experiment Name: At_Drought_Soil_Dry_P Parameter: Plant Line Value: WS
  misc_feature: MA Experiment 20001554 PARAMETER Experiment Name: At_Drought_Soil_Dry_P Parameter: Post Timepoint (hr) Value: None
  misc_feature: MA Experiment 20001554 PARAMETER Experiment Name: At_Drought_Soil_Dry_P Parameter: Post-Treatment Value: None
  misc_feature: MA Experiment 20001554 PARAMETER Experiment Name: At_Drought_Soil_Dry_P Parameter: Timepoint (day) Value: 7
  misc_feature: MA Experiment 20001554 PARAMETER Experiment Name: At_Drought_Soil_Dry_P Parameter: Treatment Value: Drought vs. No Drought
  misc_feature: MA Experiment ID: 20001555 Result: Up-regulated in Transcription
  misc_feature: MA Experiment 20001555 PARAMETER Experiment Name: At_Drought_Soil_Dry_P Parameter: Age (day) Value: 24
  misc_feature: MA Experiment 20001555 PARAMETER Experiment Name: At_Drought_Soil_Dry_P Parameter: Organism Value: A. thaliana
  misc_feature: MA Experiment 20001555 PARAMETER Experiment Name: At_Drought_Soil_Dry_P Parameter: Plant Line Value: WS
  misc_feature: MA Experiment 20001555 PARAMETER Experiment Name: At_Drought_Soil_Dry_P Parameter: Post Timepoint (hr) Value: None
  misc_feature: MA Experiment 20001555 PARAMETER Experiment Name: At_Drought_Soil_Dry_P Parameter: Post-Treatment Value: None
  misc_feature: MA Experiment 20001555 PARAMETER Experiment Name: At_Drought_Soil_Dry_P Parameter: Timepoint (day) Value: 10
  misc_feature: MA Experiment 20001555 PARAMETER Experiment Name: At_Drought_Soil_Dry_P Parameter: Treatment Value: Drought vs. No Drought
  misc_feature: MA Experiment ID: 20001556 Result: Up-regulated in Transcription
  misc_feature: MA Experiment 20001556 PARAMETER Experiment Name: At_Drought_Soil_Dry_P Parameter: Age (day) Value: 26
  misc_feature: MA Experiment 20001556 PARAMETER Experiment Name: At_Drought_Soil_Dry_P Parameter: Organism Value: A. thaliana
  misc_feature: MA Experiment 20001556 PARAMETER Experiment Name: At_Drought_Soil_Dry_P Parameter: Plant Line Value: WS
  misc_feature: MA Experiment 20001556 PARAMETER Experiment Name: At_Drought_Soil_Dry_P Parameter: Post Timepoint (hr) Value: None
  misc_feature: MA Experiment 20001556 PARAMETER Experiment Name: At_Drought_Soil_Dry_P Parameter: Post-Treatment Value: None
  misc_feature: MA Experiment 20001556 PARAMETER Experiment Name: At_Drought_Soil_Dry_P Parameter: Timepoint (day) Value: 12
  misc_feature: MA Experiment 20001556 PARAMETER Experiment Name: At_Drought_Soil_Dry_P Parameter: Treatment Value: Drought vs. No Drought
  misc_feature: MA Experiment ID: 20001905 Result: Up-regulated in Transcription
  misc_feature: MA Experiment 20001905 PARAMETER Experiment Name: At_Drought_Reproduction_P Parameter: Age (day) Value: 40
  misc_feature: MA Experiment 20001905 PARAMETER Experiment Name: At_Drought_Reproduction_P Parameter: Organism Value: A. thaliana
  misc_feature: MA Experiment 20001905 PARAMETER Experiment Name: At_Drought_Reproduction_P Parameter: Plant Line Value: WS
  misc_feature: MA Experiment 20001905 PARAMETER Experiment Name: At_Drought_Reproduction_P Parameter: Timepoint (day) Value: 10
  misc_feature: MA Experiment 20001905 PARAMETER Experiment Name: At_Drought_Reproduction_P Parameter: Tissue Value: Rosettes
  misc_feature: MA Experiment 20001905 PARAMETER Experiment Name: At_Drought_Reproduction_P Parameter: Treatment Value: Drought vs. No Drought
  misc_feature: MA Experiment ID: 20001911 Result: Up-regulated in Transcription
  misc_feature: MA Experiment 20001911 PARAMETER Experiment Name: At_Drought_Reproduction_P Parameter: Age (day) Value: 40
  misc_feature: MA Experiment 20001911 PARAMETER Experiment Name: At_Drought_Reproduction_P Parameter: Organism Value: A. thaliana
  misc_feature: MA Experiment 20001911 PARAMETER Experiment Name: At_Drought_Reproduction_P Parameter: Plant Line Value: WS
  misc_feature: MA Experiment 20001911 PARAMETER Experiment Name: At_Drought_Reproduction_P Parameter: Timepoint (day) Value: 10
  misc_feature: MA Experiment 20001911 PARAMETER Experiment Name: At_Drought_Reproduction_P Parameter: Tissue Value: Flowers
  misc_feature: MA Experiment 20001911 PARAMETER Experiment Name: At_Drought_Reproduction_P Parameter: Treatment Value: Drought vs. No Drought
acagtaacaatctctctctcgcaccttcttaaaagctgctctatttcttcgcttccctcttctcttcactcacaaaacattttgttctaatcccgcaactgctaaaaacaaacccttttgtcaaaaatctctcctttcggtggtgacagaaatctattgcaggaaatggcagaagcagcatacacagtagcatcagacagtgaaaacactggagaggagaaatcatcatcatctccttcattacccgaaatcgcccttggtatcgacattggtacttctcaatgcagtatagctgtttggaacggttctcaagttcacatcttgaggaacacaagaaaccagaagctcatcaaatcatttgtcactttcaaagatgaagttcctgctggtggtgttagcaaccagctcgcacatgagcaggaaatgctaaccggagccgctatcttcaacatgaagcggctcgttggtcgtgtagacactgatcctgtggttcacgctagcaagaaccttcctttcttggttcaaactcttgatattggagttagaccgtttattgcagctttggtgaacaatgcttggagatcaacaacaccagaggaagttttagctatatttctggtggagttacgtctgatggctgaagctcagttgaaacgtcctgtgagaaatgtagtgcttacggttccggtttcgttctctaggttccagctcacacggttcgaaagagcttgcgctatggctggacttcatgttcttcgtttgatgccggaaccaactgctattgcgttgctttatgcgcaacagcagcagatgactacgcatgataacatgggaagcggaagcgagaggcttgcggttatattcaatatgggagctggttactgcgatgttgcggttactgctactgctggtggtgtttcacagataaaagctttagctggtagccccattgggggtgaagacattttgcagagcacaattcgccatatcgctccacctaatgaagaagcttcggggttgcttcgtgtagcggcacaggacgcgattcacaggctaacggatcaagaaaatgtccaaattgaagtggatttgggaaatggtaacaagatatccaaggttcttgataggttagagtttgaggaagtgaaccagaaggtatttgaggaatgtgagagacttgttgtgcagtgcctgcgagatgcgagagtcaatggtggtgatatcgatgatttgataatggttggagggtgttcgtacatcccgaaagtaagaactattatcaagaacgtatgcaagaaggatgagatatacaaaggcgtgaatcctttagaagctgcggttagaggagctgctttggaaggtgcggtgacttcagggattcatgatccttttgggagcttagatctgttaaccatacaagccacacctcttgcagttggagcaagagctaacggaaacaaattcatacccgtgattcctcgtaacacgatggttccagcgcggaaagacctctttttcacaacggttcaagacaaccagaaggaagctctgatcattatatacgaaggagaaggagagactgttgaagagaatcatcttcttggttatttcaagctcgttgggattccgccagcaccgaaaggtgttccagagatcaatgtttgtatggacatcgatgcgtcgaatgctttacgggttttcgcagctgtgttgatgccgggatcttcgactccggtggttcctgtgattgaggtgaggatgcctacggttgatgatggacatggttggtgtgctcaagctttgaatgtgaaatatggagctactcttgatttgattacttttcagagaaagatgtaagattaaaataaaatggtgttggtgatagattttagattagatgtaagatacgaggatgcttcgtatagaaaagagtttgtaaagtttgtgtgtgttttggggtttgtcgttgaagtggtaaacaatgtttatgtgtgtaatgaagtaataatgctttgcagattg

SEQ ID NO: 38588 - protein, 563 aa, Arabidopsis thaliana
  peptide (1)..(563): Ceres Seq. ID no. 12328621
  misc_feature (319)..(505): Pfam Name: Hsp70 protein Pfam Description: Hsp70 protein
  misc_feature (30)..(513): Homolog of NCBI NO: 2827002 NR Description: HSP70 [Triticum aestivum]
  misc_feature (17)..(514): Homolog of NCBI NO: 11277118 NR Description: dnaK-type molecular chaperone BiP
  misc_feature (30)..(513): Homolog of NCBI NO: 34908140 NR Description: putative HSP70 [Oryza sativa (japonica
  misc_feature (30)..(513): Homolog of NCBI NO: 6969976 NR Description: high molecular weight heat shock protein [Malus x
  misc_feature (28)..(513): Homolog of NCBI NO: 15219109 NR Description: heat shock protein hsp70, putative; protein id:
  misc_feature (17)..(514): Homolog of NCBI NO: 32699500 NR Description: 78 kDa glucose-regulated protein homolog (GRP 78) (Immunoglobulin heavy chain binding protein homolog)
  misc_feature (30)..(513): Homolog of NCBI NO: 3962377 NR Description: heat shock protein 70 [Arabidopsis thaliana]
  misc_feature (30)..(513): Homolog of NCBI NO: 15230534 NR Description: heat shock protein 70; protein id: At3g12580.1
  misc_feature (1)..(563): Homolog of NCBI NO: 15225187 NR Description: 70kD heat shock protein
  misc_feature (1)..(563): Homolog of NCBI NO: 21618151 NR Description: 70kD heat shock protein [Arabidopsis thaliana]
MAEAAYTVASDSENTGEEKSSSSPSLPEIALGIDIGTSQCSIAVWNGSQVHILRNTRNQKLIKSFVTFKDEVPAGGVSNQLAHEQEMLTGAAIFNMKRLVGRVDTDPVVHASKNLPFLVQTLDIGVRPFIAALVNNAWRSTTPEEVLAIFLVELRLMAEAQLKRPVRNVVLTVPVSFSRFQLTRFERACAMAGLHVLRLMPEPTAIALLYAQQQQMTTHDNMGSGSERLAVIFNMGAGYCDVAVTATAGGVSQIKALAGSPIGGEDILQSTIRHIAPPNEEASGLLRVAAQDAIHRLTDQENVQIEVDLGNGNKISKVLDRLEFEEVNQKVFEECERLVVQCLRDARVNGGDIDDLIMVGGCSYIPKVRTIIKNVCKKDEIYKGVNPLEAAVRGAALEGAVTSGIHDPFGSLDLLTIQATPLAVGARANGNKFIPVIPRNTMVPARKDLFFTTVQDNQKEALIIIYEGEGETVEENHLLGYFKLVGIPPAPKGVPEINVCMDIDASNALRVFAAVLMPGSSTPVVPVIEVRMPTVDDGHGWCAQALNVKYGATLDLITFQRKM

SEQ ID NO: 38589 - protein, 477 aa, Arabidopsis thaliana
  peptide (1)..(477): Ceres Seq. ID no. 12328622
  misc_feature (233)..(419): Pfam Name: Hsp70 protein Pfam Description: Hsp70 protein
  misc_feature (1)..(427): Homolog of NCBI NO: 2827002 NR Description: HSP70 [Triticum aestivum]
  misc_feature (1)..(428): Homolog of NCBI NO: 11277118 NR Description: dnaK-type molecular chaperone BiP
  misc_feature (1)..(427): Homolog of NCBI NO: 34908140 NR Description: putative HSP70 [Oryza sativa (japonica
  misc_feature (1)..(427): Homolog of NCBI NO: 6969976 NR Description: high molecular weight heat shock protein [Malus x
  misc_feature (1)..(427): Homolog of NCBI NO: 15219109 NR Description: heat shock protein hsp70, putative; protein id:
  misc_feature (1)..(428): Homolog of NCBI NO: 32699500 NR Description: 78 kDa glucose-regulated protein homolog (GRP 78) (Immunoglobulin heavy chain binding protein homolog)
  misc_feature (1)..(427): Homolog of NCBI NO: 3962377 NR Description: heat shock protein 70 [Arabidopsis thaliana]
  misc_feature (1)..(427): Homolog of NCBI NO: 15230534 NR Description: heat shock protein 70; protein id: At3g12580.1
  misc_feature (1)..(477): Homolog of NCBI NO: 15225187 NR Description: 70kD heat shock protein
  misc_feature (1)..(477): Homolog of NCBI NO: 21618151 NR Description: 70kD heat shock protein [Arabidopsis thaliana]
MLTGAAIFNMKRLVGRVDTDPVVHASKNLPFLVQTLDIGVRPFIAALVNNAWRSTTPEEVLAIFLVELRLMAEAQLKRPVRNVVLTVPVSFSRFQLTRFERACAMAGLHVLRLMPEPTAIALLYAQQQQMTTHDNMGSGSERLAVIFNMGAGYCDVAVTATAGGVSQIKALAGSPIGGEDILQSTIRHIAPPNEEASGLLRVAAQDAIHRLTDQENVQIEVDLGNGNKISKVLDRLEFEEVNQKVFEECERLVVQCLRDARVNGGDIDDLIMVGGCSYIPKVRTIIKNVCKKDEIYKGVNPLEAAVRGAALEGAVTSGIHDPFGSLDLLTIQATPLAVGARANGNKFIPVIPRNTMVPARKDLFFTTVQDNQKEALIIIYEGEGETVEENHLLGYFKLVGIPPAPKGVPEINVCMDIDASNALRVFAAVLMPGSSTPVVPVIEVRMPTVDDGHGWCAQALNVKYGATLDLITFQRKM

SEQ ID NO: 38590 - protein, 468 aa, Arabidopsis thaliana
  peptide (1)..(468): Ceres Seq. ID no. 12328623
  misc_feature (224)..(410): Pfam Name: Hsp70 protein Pfam Description: Hsp70 protein
  misc_feature (1)..(418): Homolog of NCBI NO: 2827002 NR Description: HSP70 [Triticum aestivum]
  misc_feature (1)..(419): Homolog of NCBI NO: 11277118 NR Description: dnaK-type molecular chaperone BiP
  misc_feature (1)..(418): Homolog of NCBI NO: 34908140 NR Description: putative HSP70 [Oryza sativa (japonica
  misc_feature (1)..(418): Homolog of NCBI NO: 6969976 NR Description: high molecular weight heat shock protein [Malus x
  misc_feature (1)..(418): Homolog of NCBI NO: 15219109 NR Description: heat shock protein hsp70, putative; protein id:
  misc_feature (1)..(419): Homolog of NCBI NO: 32699500 NR Description: 78 kDa glucose-regulated protein homolog (GRP 78) (Immunoglobulin heavy chain binding protein homolog)
  misc_feature (1)..(418): Homolog of NCBI NO: 3962377 NR Description: heat shock protein 70 [Arabidopsis thaliana]
  misc_feature (1)..(418): Homolog of NCBI NO: 15230534 NR Description: heat shock protein 70; protein id: At3g12580.1
  misc_feature (1)..(468): Homolog of NCBI NO: 15225187 NR Description: 70kD heat shock protein
  misc_feature (1)..(468): Homolog of NCBI NO: 21618151 NR Description: 70kD heat shock protein [Arabidopsis thaliana]
MKRLVGRVDTDPVVHASKNLPFLVQTLDIGVRPFIAALVNNAWRSTTPEEVLAIFLVELRLMAEAQLKRPVRNVVLTVPVSFSRFQLTRFERACAMAGLHVLRLMPEPTAIALLYAQQQQMTTHDNMGSGSERLAVIFNMGAGYCDVAVTATAGGVSQIKALAGSPIGGEDILQSTIRHIAPPNEEASGLLRVAAQDAIHRLTDQENVQIEVDLGNGNKISKVLDRLEFEEVNQKVFEECERLVVQCLRDARVNGGDIDDLIMVGGCSYIPKVRTIIKNVCKKDEIYKGVNPLEAAVRGAALEGAVTSGIHDPFGSLDLLTIQATPLAVGARANGNKFIPVIPRNTMVPARKDLFFTTVQDNQKEALIIIYEGEGETVEENHLLGYFKLVGIPPAPKGVPEINVCMDIDASNALRVFAAVLMPGSSTPVVPVIEVRMPTVDDGHGWCAQALNVKYGATLDLITFQRKM

SEQ ID NO: 38591 - DNA, 1254 bp, Arabidopsis thaliana
  misc_feature (1)..(1254): Ceres Seq. ID no. 13499860
  misc_feature: MA Experiment ID: 108461 Result: Up-regulated in Transcription
  misc_feature: MA Experiment 108461 PARAMETER Experiment Name: At_Germinating_Seeds_cDNA_P Parameter: Age (day) Value: 1 vs. 0
  misc_feature: MA Experiment 108461 PARAMETER Experiment Name: At_Germinating_Seeds_cDNA_P Parameter: Tissue Value: Germinating Seeds
  misc_feature: MA Experiment ID: 108579 Result: Up-regulated in Transcription
  misc_feature: MA Experiment 108579 PARAMETER Experiment Name: At_4deg_Cold_cDNA_P Parameter: Temperature (deg C) Value: 4 vs. 22
  misc_feature: MA Experiment 108579 PARAMETER Experiment Name: At_4deg_Cold_cDNA_P Parameter: Timepoint (hr) Value: 6
  misc_feature: MA Experiment 108579 PARAMETER Experiment Name: At_4deg_Cold_cDNA_P Parameter: Tissue Value: Aerial
  misc_feature: MA Experiment ID: 108595 Result: Up-regulated in Transcription
  misc_feature: MA Experiment 108595 PARAMETER Experiment Name: At_Ler-pi_Ovule_cDNA_P Parameter: Plant Line Value: null
  misc_feature: MA Experiment ID: 108668 Result: Up-regulated in Transcription
  misc_feature: MA Experiment 108668 PARAMETER Experiment Name: At_2mM_SA_cDNA_P Parameter: Plant Line Value: WS
  misc_feature: MA Experiment 108668 PARAMETER Experiment Name: At_2mM_SA_cDNA_P Parameter: Timepoint (hr) Value: 6
  misc_feature: MA Experiment 108668 PARAMETER Experiment Name: At_2mM_SA_cDNA_P Parameter: Treatment Value: 2mM SA vs. No Treatment
  misc_feature: MA Experiment ID: 20000224 Result: Up-regulated in Transcription
  misc_feature: MA Experiment ID: 20000527 Result: Down-regulated in Transcription
  misc_feature: MA Experiment 20000527 PARAMETER Experiment Name: At_10percent_PEG_P Parameter: Age (day) Value: 20
  misc_feature: MA Experiment 20000527 PARAMETER Experiment Name: At_10percent_PEG_P Parameter: Organism Value: A. thaliana
  misc_feature: MA Experiment 20000527 PARAMETER Experiment Name: At_10percent_PEG_P Parameter: Plant Line Value: WS
  misc_feature: MA Experiment 20000527 PARAMETER Experiment Name: At_10percent_PEG_P Parameter: Timepoint (day) Value: 20
  misc_feature: MA Experiment 20000527 PARAMETER Experiment Name: At_10percent_PEG_P Parameter: Tissue Value: Whole Plant
  misc_feature: MA Experiment 20000527 PARAMETER Experiment Name: At_10percent_PEG_P Parameter: Treatment Value: 10percent PEG vs. No Treatment
aacttcgtggtactcttttgctttacccatttttcaatgtcttacgatgagatgctttctgctgcgaagaaagctgtttctctcgctgctcgtctcagcaacgaagtgaggaaatctctgttggtaactgacgtttggaacaaatcagatgatagtcctgttactgttgctgattatggttcgcaggcggtggttagccttgtactggaaagggaactccagaatgaacctgtgtctttagtggctgaagaggattctggtgagttaaggaagattgctgctgagaccgttttggctcgtattacagagcttgtcaaagatactcttgcaagtgatgaatcatatgctattgcttctcctttgacttcggatgatgtgctcaacgctatagatcgtggtaaatcagaaggaggtcctaagggtcgccactggatcttggatcctattggtggcactagaggatttataagaggagaacaatatgcaataggattagcattgttggtggaaggcaaagtagtactaggtgtaatggcttgtcctaagcttccattggcatcaactgctggtaatgcactcaagtctttacctgaaaaagttggttgccttttctatggttcggttggcaatgggacttatgtccagtctctcagtgtcgactctcttcctgcgaaggtggaggttagcagcatagatgatcctgcgaaagcgagtttcttcgagtcataccacacacctgtccccatccataacaccattgctacgaaattggggataaaagaatctccaatcaagatcaacagccagactaagtatgcagctttatctagaggagatggagaggtttacttgaggtttactcgcaaagcaagacccgaatcaatatggaatcacgctgctggctcaatcattgtttcagaagcaggagggaaagtgactgatgcagcagggaatccattggacttttcgaaagggaagtatcttgattacaagagaggaatcgtcgttacgacgcagaaactgttgccaaggcttttaacagcagtaagagaatcaattaaagaagaagaagaggaagaagaaaaagctgcttctctaaaacttcactaacacgcaactgtaatatacttattattgttgtctttgggtatactctgttgtctctgtgtttttcacagtctatttattgaaaaccagaaacaaaaaaaaaactcacctttgatatatataagaaacactaattctcttttgaat

SEQ ID NO: 38592 - protein, 369 aa, Arabidopsis thaliana
  peptide (1)..(369): Ceres Seq. ID no. 13499861
  misc_feature (14)..(329): Homolog of NCBI NO: 15239631 NR Description: HAL2-related protein (Ahl) [Arabidopsis thaliana]
  misc_feature (15)..(358): Homolog of NCBI NO: 3913517 NR Description: 3'(2'),5'-BISPHOSPHATE NUCLEOTIDASE
  misc_feature (15)..(366): Homolog of NCBI NO: 14268820 NR Description: diphosphonucleotide phosphatase 1 [Zea mays]
  misc_feature (13)..(356): Homolog of NCBI NO: 15242383 NR Description: 3'(2'),5'-bisphosphate nucleotidase-related
  misc_feature (13)..(356): Homolog of NCBI NO: 34395640 NR Description: Probable SAL4 phosphatase (3'(2'),5'-bisphosphate
  misc_feature (13)..(358): Homolog of NCBI NO: 15237567 NR Description: 3(2),5-bisphosphate nucleotidase [Arabidopsis
  misc_feature (13)..(356): Homolog of NCBI NO: 15237589 NR Description: 3(2),5-bisphosphate nucleotidase (emb|CAB05889.1)
  misc_feature (13)..(369): Homolog of NCBI NO: 8777312 NR Description: 3'(2'),5'-bisphosphate nucleotidase [Arabidopsis
  misc_feature (13)..(369): Homolog of NCBI NO: 21618152 NR Description: 3(2),5-bisphosphate nucleotidase [Arabidopsis
  misc_feature (13)..(369): Homolog of NCBI NO: 18424775 NR Description: 3(2),5-bisphosphate nucleotidase [Arabidopsis
NFVVLFCFTHFSMSYDEMLSAAKKAVSLAARLSNEVRKSLLVTDVWNKSDDSPVTVADYGSQAVVSLVLERELQNEPVSLVAEEDSGELRKIAAETVLARITELVKDTLASDESYAIASPLTSDDVLNAIDRGKSEGGPKGRHWILDPIGGTRGFIRGEQYAIGLALLVEGKVVLGVMACPKLPLASTAGNALKSLPEKVGCLFYGSVGNGTYVQSLSVDSLPAKVEVSSIDDPAKASFFESYHTPVPIHNTIATKLGIKESPIKINSQTKYAALSRGDGEVYLRFTRKARPESIWNHAAGSIIVSEAGGKVTDAAGNPLDFSKGKYLDYKRGIVVTTQKLLPRLLTAVRESIKEEEEEEEKAASLKLH

SEQ ID NO: 38593 - protein, 357 aa, Arabidopsis thaliana
  peptide (1)..(357): Ceres Seq. ID no. 13499862
  misc_feature (2)..(317): Homolog of NCBI NO: 15239631 NR Description: HAL2-related protein (Ahl) [Arabidopsis thaliana]
  misc_feature (3)..(346): Homolog of NCBI NO: 3913517 NR Description: 3'(2'),5'-BISPHOSPHATE NUCLEOTIDASE
  misc_feature (3)..(354): Homolog of NCBI NO: 14268820 NR Description: diphosphonucleotide phosphatase 1 [Zea mays]
  misc_feature (1)..(344): Homolog of NCBI NO: 15242383 NR Description: 3'(2'),5'-bisphosphate nucleotidase-related
  misc_feature (1)..(344): Homolog of NCBI NO: 34395640 NR Description: Probable SAL4 phosphatase (3'(2'),5'-bisphosphate
  misc_feature (1)..(346): Homolog of NCBI NO: 15237567 NR Description: 3(2),5-bisphosphate nucleotidase [Arabidopsis
  misc_feature (1)..(344): Homolog of NCBI NO: 15237589 NR Description: 3(2),5-bisphosphate nucleotidase (emb|CAB05889.1)
  misc_feature (1)..(357): Homolog of NCBI NO: 8777312 NR Description: 3'(2'),5'-bisphosphate nucleotidase [Arabidopsis
  misc_feature (1)..(357): Homolog of NCBI NO: 21618152 NR Description: 3(2),5-bisphosphate nucleotidase [Arabidopsis
  misc_feature (1)..(357): Homolog of NCBI NO: 18424775 NR Description: 3(2),5-bisphosphate nucleotidase [Arabidopsis
MSYDEMLSAAKKAVSLAARLSNEVRKSLLVTDVWNKSDDSPVTVADYGSQAVVSLVLERELQNEPVSLVAEEDSGELRKIAAETVLARITELVKDTLASDESYAIASPLTSDDVLNAIDRGKSEGGPKGRHWILDPIGGTRGFIRGEQYAIGLALLVEGKVVLGVMACPKLPLASTAGNALKSLPEKVGCLFYGSVGNGTYVQSLSVDSLPAKVEVSSIDDPAKASFFESYHTPVPIHNTIATKLGIKESPIKINSQTKYAALSRGDGEVYLRFTRKARPESIWNHAAGSIIVSEAGGKVTDAAGNPLDFSKGKYLDYKRGIVVTTQKLLPRLLTAVRESIKEEEEEEEKAASLKLH

SEQ ID NO: 38594 - protein, 352 aa, Arabidopsis thaliana
  peptide (1)..(352): Ceres Seq. ID no. 13499863
  misc_feature (1)..(312): Homolog of NCBI NO: 15239631 NR Description: HAL2-related protein (Ahl) [Arabidopsis thaliana]
  misc_feature (1)..(341): Homolog of NCBI NO: 3913517 NR Description: 3'(2'),5'-BISPHOSPHATE NUCLEOTIDASE
  misc_feature (1)..(349): Homolog of NCBI NO: 14268820 NR Description: diphosphonucleotide phosphatase 1 [Zea mays]
  misc_feature (1)..(339): Homolog of NCBI NO: 15242383 NR Description: 3'(2'),5'-bisphosphate nucleotidase-related
  misc_feature (1)..(339): Homolog of NCBI NO: 34395640 NR Description: Probable SAL4 phosphatase (3'(2'),5'-bisphosphate
  misc_feature (1)..(341): Homolog of NCBI NO: 15237567 NR Description: 3(2),5-bisphosphate nucleotidase [Arabidopsis
  misc_feature (1)..(339): Homolog of NCBI NO: 15237589 NR Description: 3(2),5-bisphosphate nucleotidase (emb|CAB05889.1)
  misc_feature (1)..(352): Homolog of NCBI NO: 8777312 NR Description: 3'(2'),5'-bisphosphate nucleotidase [Arabidopsis
  misc_feature (1)..(352): Homolog of NCBI NO: 21618152 NR Description: 3(2),5-bisphosphate nucleotidase [Arabidopsis
  misc_feature (1)..(352): Homolog of NCBI NO: 18424775 NR Description: 3(2),5-bisphosphate nucleotidase [Arabidopsis
MLSAAKKAVSLAARLSNEVRKSLLVTDVWNKSDDSPVTVADYGSQAVVSLVLERELQNEPVSLVAEEDSGELRKIAAETVLARITELVKDTLASDESYAIASPLTSDDVLNAIDRGKSEGGPKGRHWILDPIGGTRGFIRGEQYAIGLALLVEGKVVLGVMACPKLPLASTAGNALKSLPEKVGCLFYGSVGNGTYVQSLSVDSLPAKVEVSSIDDPAKASFFESYHTPVPIHNTIATKLGIKESPIKINSQTKYAALSRGDGEVYLRFTRKARPESIWNHAAGSIIVSEAGGKVTDAAGNPLDFSKGKYLDYKRGIVVTTQKLLPRLLTAVRESIKEEEEEEEKAASLKLH

SEQ ID NO: 38595 - DNA, 1198 bp, Arabidopsis thaliana
  misc_feature (1)..(1198): Ceres Seq. ID no. 12328752
  misc_feature: MA Experiment ID: 108461 Result: Up-regulated in Transcription
  misc_feature: MA Experiment 108461 PARAMETER Experiment Name: At_Germinating_Seeds_cDNA_P Parameter: Age (day) Value: 1 vs. 0
  misc_feature: MA Experiment 108461 PARAMETER Experiment Name: At_Germinating_Seeds_cDNA_P Parameter: Tissue Value: Germinating Seeds
  misc_feature: MA Experiment ID: 108462 Result: Up-regulated in Transcription
  misc_feature: MA Experiment 108462 PARAMETER Experiment Name: At_Germinating_Seeds_cDNA_P Parameter: Age (day) Value: 2 vs. 0
  misc_feature: MA Experiment 108462 PARAMETER Experiment Name: At_Germinating_Seeds_cDNA_P Parameter: Tissue Value: Germinating Seeds
  misc_feature: MA Experiment ID: 108463 Result: Up-regulated in Transcription
  misc_feature: MA Experiment 108463 PARAMETER Experiment Name: At_Germinating_Seeds_cDNA_P Parameter: Age (day) Value: 3 vs. 0
  misc_feature: MA Experiment 108463 PARAMETER Experiment Name: At_Germinating_Seeds_cDNA_P Parameter: Tissue Value: Germinating Seeds
  misc_feature: MA Experiment ID: 108464 Result: Up-regulated in Transcription
  misc_feature: MA Experiment 108464 PARAMETER Experiment Name: At_Germinating_Seeds_cDNA_P Parameter: Age (day) Value: 4 vs. 0
  misc_feature: MA Experiment 108464 PARAMETER Experiment Name: At_Germinating_Seeds_cDNA_P Parameter: Tissue Value: Germinating Seeds
  misc_feature: MA Experiment ID: 108572 Result: Up-regulated in Transcription
  misc_feature: MA Experiment 108572 PARAMETER Experiment Name: At_Drought_cDNA_P Parameter: Timepoint (hr) Value: 1
  misc_feature: MA Experiment 108572 PARAMETER Experiment Name: At_Drought_cDNA_P Parameter: Tissue Value: Aerial
  misc_feature: MA Experiment 108572 PARAMETER Experiment Name: At_Drought_cDNA_P Parameter: Treatment Value: Drought vs. No Drought
  misc_feature: MA Experiment ID: 108573 Result: Up-regulated in Transcription
  misc_feature: MA Experiment 108573 PARAMETER Experiment Name: At_Drought_cDNA_P Parameter: Timepoint (hr) Value: 6
  misc_feature: MA Experiment 108573 PARAMETER Experiment Name: At_Drought_cDNA_P Parameter: Tissue Value: Aerial
  misc_feature: MA Experiment 108573 PARAMETER Experiment Name: At_Drought_cDNA_P Parameter: Treatment Value: Drought vs. No Drought
  misc_feature: MA Experiment ID: 108574 Result: Up-regulated in Transcription
  misc_feature: MA Experiment 108574 PARAMETER Experiment Name: At_Wounding__cDNA_P Parameter: Timepoint (hr) Value: 1
  misc_feature: MA Experiment 108574 PARAMETER Experiment Name: At_Wounding__cDNA_P Parameter: Tissue Value: Aerial
  misc_feature: MA Experiment 108574 PARAMETER Experiment Name: At_Wounding__cDNA_P Parameter: Treatment Value: Wounding vs. No Wounding
  misc_feature: MA Experiment ID: 108579 Result: Up-regulated in Transcription
  misc_feature: MA Experiment 108579 PARAMETER Experiment Name: At_4deg_Cold_cDNA_P Parameter: Temperature (deg C) Value: 4 vs. 22
  misc_feature: MA Experiment 108579 PARAMETER Experiment Name: At_4deg_Cold_cDNA_P Parameter: Timepoint (hr) Value: 6
  misc_feature: MA Experiment 108579 PARAMETER Experiment Name: At_4deg_Cold_cDNA_P Parameter: Tissue Value: Aerial
  misc_feature: MA Experiment ID: 108585 Result: Up-regulated in Transcription
  misc_feature: MA Experiment 108585 PARAMETER Experiment Name: At_5mM_NaNP_cDNA_P Parameter: Timepoint (hr) Value: 6
  misc_feature: MA Experiment 108585 PARAMETER Experiment Name: At_5mM_NaNP_cDNA_P Parameter: Tissue Value: Aerial
  misc_feature: MA Experiment 108585 PARAMETER Experiment Name: At_5mM_NaNP_cDNA_P Parameter: Treatment Value: null
  misc_feature: MA Experiment ID: 108595 Result: Down-regulated in Transcription
  misc_feature: MA Experiment 108595 PARAMETER Experiment Name: At_Ler-pi_Ovule_cDNA_P Parameter: Plant Line Value: null
  misc_feature: MA Experiment ID: 108607 Result: Up-regulated in Transcription
  misc_feature: MA Experiment 108607 PARAMETER Experiment Name: At_100uM_ABA_cDNA_P Parameter: Timepoint (hr) Value: 4
  misc_feature: MA Experiment 108607 PARAMETER Experiment Name: At_100uM_ABA_cDNA_P Parameter: Tissue Value: Aerial
  misc_feature: MA Experiment 108607 PARAMETER Experiment Name: At_100uM_ABA_cDNA_P Parameter: Treatment Value: 100uM ABA vs. No Treatment
  misc_feature: MA Experiment ID: 108608 Result: Up-regulated in Transcription
  misc_feature: MA Experiment 108608 PARAMETER Experiment Name: At_100uM_ABA_cDNA_P Parameter: Timepoint (hr) Value: 1
  misc_feature: MA Experiment 108608 PARAMETER Experiment Name: At_100uM_ABA_cDNA_P Parameter: Tissue Value: Aerial
  misc_feature: MA Experiment 108608 PARAMETER Experiment Name: At_100uM_ABA_cDNA_P Parameter: Treatment Value: 100uM ABA vs. No Treatment
  misc_feature: MA Experiment ID: 108668 Result: Up-regulated in Transcription
  misc_feature: MA Experiment 108668 PARAMETER Experiment Name: At_2mM_SA_cDNA_P Parameter: Plant Line Value: WS
  misc_feature: MA Experiment 108668 PARAMETER Experiment Name: At_2mM_SA_cDNA_P Parameter: Timepoint (hr) Value: 6
  misc_feature: MA Experiment 108668 PARAMETER Experiment Name: At_2mM_SA_cDNA_P Parameter: Treatment Value: 2mM SA vs. No Treatment
  misc_feature: MA Experiment ID: 20000070 Result: Down-regulated in Transcription
  misc_feature: MA Experiment 20000070 PARAMETER Experiment Name: At_100uM_ABA_Mutants_cDNA_P Parameter: Plant Line Value: CS24
  misc_feature: MA Experiment 20000070 PARAMETER Experiment Name: At_100uM_ABA_Mutants_cDNA_P Parameter: Timepoint (hr) Value: 6
  misc_feature: MA Experiment 20000070 PARAMETER Experiment Name: At_100uM_ABA_Mutants_cDNA_P Parameter: Tissue Value: Aerial
  misc_feature: MA Experiment 20000070 PARAMETER Experiment Name: At_100uM_ABA_Mutants_cDNA_P Parameter: Treatment Value: 100uM ABA vs. No Treatment
  misc_feature: MA Experiment ID: 20000088 Result: Down-regulated in Transcription
  misc_feature: MA Experiment 20000088 PARAMETER Experiment Name: At_100uM_ABA_Mutants_cDNA_P Parameter: Plant Line Value: Landsberg
  misc_feature: MA Experiment 20000088 PARAMETER Experiment Name: At_100uM_ABA_Mutants_cDNA_P Parameter: Timepoint (hr) Value: 6
  misc_feature: MA Experiment 20000088 PARAMETER Experiment Name: At_100uM_ABA_Mutants_cDNA_P Parameter: Tissue Value: Aerial
  misc_feature: MA Experiment 20000088 PARAMETER Experiment Name: At_100uM_ABA_Mutants_cDNA_P Parameter: Treatment Value: 100uM ABA vs. No Treatment
  misc_feature: MA Experiment ID: 20000166 Result: Up-regulated in Transcription
  misc_feature: MA Experiment 20000166 PARAMETER Experiment Name: At_100uM_ABA_P Parameter: Age (day) Value: 14
  misc_feature: MA Experiment 20000166 PARAMETER Experiment Name: At_100uM_ABA_P Parameter: Organism Value: A. thaliana
  misc_feature: MA Experiment 20000166 PARAMETER Experiment Name: At_100uM_ABA_P Parameter: Plant Line Value: WS
  misc_feature: MA Experiment 20000166 PARAMETER Experiment Name: At_100uM_ABA_P Parameter: Timepoint (hr) Value: 1
  misc_feature: MA Experiment 20000166 PARAMETER Experiment Name: At_100uM_ABA_P Parameter: Tissue Value: Aerial
  misc_feature: MA Experiment 20000166 PARAMETER Experiment Name: At_100uM_ABA_P Parameter: Treatment Value: 100uM ABA vs. No Treatment
  misc_feature: MA Experiment ID: 20000179 Result: Up-regulated in Transcription
  misc_feature: MA Experiment 20000179 PARAMETER Experiment Name: At_Germinating_Seeds_P Parameter: Age (hr) Value: 6 vs. 0
  misc_feature: MA Experiment 20000179 PARAMETER Experiment Name: At_Germinating_Seeds_P Parameter: Tissue Value: Germinating Seeds
  misc_feature: MA Experiment ID: 20000180 Result: Up-regulated in Transcription
  misc_feature: MA Experiment 20000180 PARAMETER Experiment Name: At_Germinating_Seeds_P Parameter: Age (hr) Value: 24 vs. 0
  misc_feature: MA Experiment 20000180 PARAMETER Experiment Name: At_Germinating_Seeds_P Parameter: Tissue Value: Germinating Seeds
  misc_feature: MA Experiment ID: 20000182 Result: Up-regulated in Transcription
  misc_feature: MA Experiment 20000182 PARAMETER Experiment Name: At_2mM_SA_P Parameter: Age (day) Value: 14
  misc_feature: MA Experiment 20000182 PARAMETER Experiment Name: At_2mM_SA_P Parameter: Organism Value: A. thaliana
  misc_feature: MA Experiment 20000182 PARAMETER Experiment Name: At_2mM_SA_P Parameter: Plant Line Value: WS
  misc_feature: MA Experiment 20000182 PARAMETER Experiment Name: At_2mM_SA_P Parameter: Timepoint (hr) Value: 6
  misc_feature: MA Experiment 20000182 PARAMETER Experiment Name: At_2mM_SA_P Parameter: Tissue Value: Aerial
  misc_feature: MA Experiment 20000182 PARAMETER Experiment Name: At_2mM_SA_P Parameter: Treatment Value: 2mM SA vs. No Treatment
  misc_feature: MA Experiment ID: 20000224 Result: Up-regulated in Transcription
  misc_feature: MA Experiment ID: 20000227 Result: Up-regulated in Transcription
  misc_feature: MA Experiment 20000227 PARAMETER Experiment Name: At_Root-Tips-vs-Tops_P Parameter: Tissue Value: Root Tips vs. Root Tops
  misc_feature: MA Experiment ID: 20000234 Result: Up-regulated in Transcription
  misc_feature: MA Experiment 20000234 PARAMETER Experiment Name: At_Siliques_P Parameter: Age (day) Value: 21
  misc_feature: MA Experiment 20000234 PARAMETER Experiment Name: At_Siliques_P Parameter: Organism Value: A. thaliana
  misc_feature: MA Experiment 20000234 PARAMETER Experiment Name: At_Siliques_P Parameter: Plant Line Value: WS
  misc_feature: MA Experiment 20000234 PARAMETER Experiment Name: At_Siliques_P Parameter: Tissue Value: Less Than 5mm Siliques vs. Whole Plant
  misc_feature: MA Experiment ID: 20000264 Result: Up-regulated in Transcription
  misc_feature: MA Experiment 20000264 PARAMETER Experiment Name: At_Open_Flower_P Parameter: Age (day) Value: 21
  misc_feature: MA Experiment 20000264 PARAMETER Experiment Name: At_Open_Flower_P Parameter: Plant Line Value: WS
  misc_feature: MA Experiment 20000264 PARAMETER Experiment Name: At_Open_Flower_P Parameter: Tissue Value: Open Flower vs. Whole Plant
  misc_feature: MA Experiment ID: 20000265 Result: Up-regulated in Transcription
  misc_feature: MA Experiment 20000265 PARAMETER Experiment Name: At_Open_Flower_P Parameter: Age (day) Value: 21
  misc_feature: MA Experiment 20000265 PARAMETER Experiment Name: At_Open_Flower_P Parameter: Plant Line Value: WS
  misc_feature: MA Experiment 20000265 PARAMETER Experiment Name: At_Open_Flower_P Parameter: Tissue Value: Closed Flower vs. Whole Plant
  misc_feature: MA Experiment ID: 20000267 Result: Up-regulated in Transcription
  misc_feature: MA Experiment 20000267 PARAMETER Experiment Name: At_Drought_P Parameter: Age (day) Value: 7
  misc_feature: MA Experiment 20000267 PARAMETER Experiment Name: At_Drought_P Parameter: Organism Value: A. thaliana
  misc_feature: MA Experiment 20000267 PARAMETER Experiment Name: At_Drought_P Parameter: Plant Line Value: WS
  misc_feature: MA Experiment 20000267 PARAMETER Experiment Name: At_Drought_P Parameter: Timepoint (hr) Value: 6
  misc_feature: MA Experiment 20000267 PARAMETER Experiment Name: At_Drought_P Parameter: Tissue Value: Whole Plant
  misc_feature: MA Experiment 20000267 PARAMETER Experiment Name: At_Drought_P Parameter: Treatment Value: Drought vs. No Drought
  misc_feature: MA Experiment ID: 20000268 Result: Up-regulated in Transcription
  misc_feature: MA Experiment 20000268 PARAMETER Experiment Name: At_100mM_NaCl__P Parameter: Age (day) Value: 14
  misc_feature: MA Experiment 20000268 PARAMETER Experiment Name: At_100mM_NaCl__P Parameter: Organism Value: A. thaliana
  misc_feature: MA Experiment 20000268 PARAMETER Experiment Name: At_100mM_NaCl__P Parameter: Plant Line Value: WS
  misc_feature: MA Experiment 20000268 PARAMETER Experiment Name: At_100mM_NaCl__P Parameter: Timepoint (hr) Value: 6
  misc_feature: MA Experiment 20000268 PARAMETER Experiment Name: At_100mM_NaCl__P Parameter: Tissue Value: Whole Plant
  misc_feature: MA Experiment 20000268 PARAMETER Experiment Name: At_100mM_NaCl__P Parameter: Treatment Value: 100mM NaCl vs. No Treatment
  misc_feature: MA Experiment ID: 20000286 Result: Up-regulated in Transcription
  misc_feature: MA Experiment 20000286 PARAMETER Experiment Name: At_Open_Flower_P Parameter: Age (day) Value: 21
  misc_feature: MA Experiment 20000286 PARAMETER Experiment Name: At_Open_Flower_P Parameter: Plant Line Value: WS
  misc_feature: MA Experiment 20000286 PARAMETER Experiment Name: At_Open_Flower_P Parameter: Tissue Value: Half Open vs. Whole Plant
  misc_feature: MA Experiment ID: 20000436 Result: Up-regulated in Transcription
  misc_feature: MA Experiment 20000436 PARAMETER Experiment Name: At_Drought_P Parameter: Age (day) Value: 7
  misc_feature: MA Experiment 20000436 PARAMETER Experiment Name: At_Drought_P Parameter: Organism Value: A. thaliana
  misc_feature: MA Experiment 20000436 PARAMETER Experiment Name: At_Drought_P Parameter: Plant Line Value: WS
  misc_feature: MA Experiment 20000436 PARAMETER Experiment Name: At_Drought_P Parameter: Timepoint (hr) Value: 12
  misc_feature: MA Experiment 20000436 PARAMETER Experiment Name: At_Drought_P Parameter: Tissue Value: Whole Plant
  misc_feature: MA Experiment 20000436 PARAMETER Experiment Name: At_Drought_P Parameter: Treatment Value: Drought vs. No Drought
  misc_feature: MA Experiment ID: 20000437 Result: Up-regulated in Transcription
  misc_feature: MA Experiment 20000437 PARAMETER Experiment Name: At_Drought_P Parameter: Age (day) Value: 8
  misc_feature: MA Experiment 20000437 PARAMETER Experiment Name: At_Drought_P Parameter: Organism Value: A. thaliana
  misc_feature: MA Experiment 20000437 PARAMETER Experiment Name: At_Drought_P Parameter: Plant Line Value: WS
  misc_feature: MA Experiment 20000437 PARAMETER Experiment Name: At_Drought_P Parameter: Timepoint (hr) Value: 24
  misc_feature: MA Experiment 20000437 PARAMETER Experiment Name: At_Drought_P Parameter: Tissue Value: Whole Plant
  misc_feature: MA Experiment 20000437 PARAMETER Experiment Name: At_Drought_P Parameter: Treatment Value: Drought vs. No Drought
  misc_feature: MA Experiment ID: 20000794 Result: Up-regulated in Transcription
  misc_feature: MA Experiment 20000794 PARAMETER Experiment Name: At_Petals_P Parameter: Age (day) Value: 23-25 days
  misc_feature: MA Experiment 20000794 PARAMETER Experiment Name: At_Petals_P Parameter: Plant Line Value: WS
  misc_feature: MA Experiment 20000794 PARAMETER Experiment Name: At_Petals_P Parameter: Tissue Value: Petals vs. Whole plant
  misc_feature: MA Experiment ID: 20001248 Result: Down-regulated in Transcription
  misc_feature: MA Experiment 20001248 PARAMETER Experiment Name: At_Far-red-induction_P Parameter: Age (day) Value: 7
  misc_feature: MA Experiment 20001248 PARAMETER Experiment Name: At_Far-red-induction_P Parameter: Light Value: Far-red vs. White
  misc_feature: MA Experiment 20001248 PARAMETER Experiment Name: At_Far-red-induction_P Parameter: Organism Value: A. thaliana
  misc_feature: MA Experiment 20001248 PARAMETER Experiment Name: At_Far-red-induction_P Parameter: Plant Line Value: Columbia
  misc_feature: MA Experiment 20001248 PARAMETER Experiment Name: At_Far-red-induction_P Parameter: Timepoint (hr) Value: 4
  misc_feature: MA Experiment 20001248 PARAMETER Experiment Name: At_Far-red-induction_P Parameter: Tissue Value: Whole Plant
  misc_feature: MA Experiment ID: 20001904 Result: Up-regulated in Transcription
  misc_feature: MA Experiment 20001904 PARAMETER Experiment Name: At_Drought_Reproduction_P Parameter: Age (day) Value: 37
  misc_feature: MA Experiment 20001904 PARAMETER Experiment Name: At_Drought_Reproduction_P Parameter: Organism Value: A. thaliana
  misc_feature: MA Experiment 20001904 PARAMETER Experiment Name: At_Drought_Reproduction_P Parameter: Plant Line Value: WS
  misc_feature: MA Experiment 20001904 PARAMETER Experiment Name: At_Drought_Reproduction_P Parameter: Timepoint (day) Value: 7
  misc_feature: MA Experiment 20001904 PARAMETER Experiment Name: At_Drought_Reproduction_P Parameter: Tissue Value: Rosettes
  misc_feature: MA Experiment 20001904 PARAMETER Experiment Name: At_Drought_Reproduction_P Parameter: Treatment Value: Drought vs. No Drought
  misc_feature: MA Experiment ID: 20001905 Result: Up-regulated in Transcription
  misc_feature: MA Experiment 20001905 PARAMETER Experiment Name: At_Drought_Reproduction_P Parameter: Age (day) Value: 40
  misc_feature: MA Experiment 20001905 PARAMETER Experiment Name: At_Drought_Reproduction_P Parameter: Organism Value: A. thaliana
  misc_feature: MA Experiment 20001905 PARAMETER Experiment Name: At_Drought_Reproduction_P Parameter: Plant Line Value: WS
  misc_feature: MA Experiment 20001905 PARAMETER Experiment Name: At_Drought_Reproduction_P Parameter: Timepoint (day) Value: 10
  misc_feature: MA Experiment 20001905 PARAMETER Experiment Name: At_Drought_Reproduction_P Parameter: Tissue Value: Rosettes
  misc_feature: MA Experiment 20001905 PARAMETER Experiment Name: At_Drought_Reproduction_P Parameter: Treatment Value: Drought vs. No Drought
atgagggacaccattgaaacgtttggttaacatattgccttcaaagccttttttggtttttcttcatttctctttcgcgaagtttcattgatcagaaagggttcccactttctccattgattattcttttgttcgattcttctcggtgtgatttggtatcaaaatggcgtatgaggaacactttcagcaaacttctgaagctaaatatgattgtcttttatttgatatagatgatactctttaccctctcagttctggtttggccatggaagtgaaaaagaacattcaagaatatatggttcagaaacttggtattgaagaagataaagtccaagaactttgcctttccctttataaaatctatggaactactatggctggtctcaaggctgtgggttatgactttgattatgacgatttccatcgttttgttcatgggagattgccatactcaacactgaagcctgacccaattctgaggaatattattcttagcttgcctattcggaaagttgtttttacgaatgcagacaaggctcatgcagccaagattattgccaggctaggcctagagggctgctttgagaaaatcatatctttcgagactctgaaccccatcaccaaaactgaatctcctgttgataccaaaaccagagaaatcttcgacataatcagttacatggcaaatcctgattcaagcattgaacttccaaagacttctgttgtatgcaaaccttctgaaggagcattcgaacaggttttcaagatggccaacatcaatcctaagaagacattgttcttcgatgacagcatccgcaacattcaaactgggaagcgcgttggtctccacaccgtatgggttgggacctcacacagagaggaaggagtagatattgcattggagcatattcacaacatacgtgaagctcttcctcaactatgggatgctgttgatgacaaagccaaggagattagaaccaggcaaaaggtcgccattgaaaccattgcttaaacaaaacattcactggctcattttgcagctaatagtatcgagaatagcgagaaaaccacataactatttcactcttgtaagaggaaaaataagtgtaatttaaagctttgattgagaccactttttgagattatgagtagttatgaaaaaagctttactttattcaatgaagtgcaacatcgtttg

SEQ ID NO: 38596 - protein, 282 aa, Arabidopsis thaliana
  peptide (1)..(282): Ceres Seq. ID no. 12328753
  misc_feature (15)..(236): Pfam Name: haloacid dehalogenase-like hydrolase Pfam Description: haloacid dehalogenase-like hydrolase
  misc_feature (7)..(156): Homolog of NCBI NO: 15238429 NR Description: putative ripening-related protein - like; protein
  misc_feature (182)..(280): Homolog of NCBI NO: 8885554 NR Description: ripening-related protein-like; hydrolase-like
  misc_feature (4)..(156): Homolog of NCBI NO: 8885554 NR Description: ripening-related protein-like; hydrolase-like
  misc_feature (1)..(280): Homolog of NCBI NO: 21593165 NR Description: unknown [Arabidopsis thaliana]
  misc_feature (1)..(280): Homolog of NCBI NO: 15241720 NR Description: putative protein
  misc_feature (141)..(280): Homolog of NCBI NO: 7406669 NR Description: putative ripening-related protein [Vitis vinifera]
  misc_feature (1)..(155): Homolog of NCBI NO: 7406669 NR Description: putative ripening-related protein [Vitis vinifera]
  misc_feature (1)..(282): Homolog of NCBI NO: 21618155 NR Description: putative ripening-related protein-like
  misc_feature (1)..(282): Homolog of NCBI NO: 30697236 NR Description: haloacid dehalogenase-like hydrolase family
  misc_feature (1)..(282): Homolog of NCBI NO: 30697234 NR Description: haloacid dehalogenase-like hydrolase family
MAYEEHFQQTSEAKYDCLLFDIDDTLYPLSSGLAMEVKKNIQEYMVQKLGIEEDKVQELCLSLYKIYGTTMAGLKAVGYDFDYDDFHRFVHGRLPYSTLKPDPILRNIILSLPIRKVVFTNADKAHAAKIIARLGLEGCFEKIISFETLNPITKTESPVDTKTREIFDIISYMANPDSSIELPKTSVVCKPSEGAFEQVFKMANINPKKTLFFDDSIRNIQTGKRVGLHTVWVGTSHREEGVDIALEHIHNIREALPQLWDAVDDKAKEIRTRQKVAIETIA

SEQ ID NO: 38597 - protein, 248 aa, Arabidopsis thaliana
  peptide (1)..(248): Ceres Seq. ID no. 12328754
  misc_feature (1)..(202): Pfam Name: haloacid dehalogenase-like hydrolase Pfam Description: haloacid dehalogenase-like hydrolase
  misc_feature (1)..(122): Homolog of NCBI NO: 15238429 NR Description: putative ripening-related protein - like; protein
  misc_feature (148)..(246): Homolog of NCBI NO: 8885554 NR Description: ripening-related protein-like; hydrolase-like
  misc_feature (1)..(122): Homolog of NCBI NO: 8885554 NR Description: ripening-related protein-like; hydrolase-like
  misc_feature (1)..(246): Homolog of NCBI NO: 21593165 NR Description: unknown [Arabidopsis thaliana]
  misc_feature (1)..(246): Homolog of NCBI NO: 15241720 NR Description: putative protein
  misc_feature (107)..(246): Homolog of NCBI NO: 7406669 NR Description: putative ripening-related protein [Vitis vinifera]
  misc_feature (1)..(121): Homolog of NCBI NO: 7406669 NR Description: putative ripening-related protein [Vitis vinifera]
  misc_feature (1)..(248): Homolog of NCBI NO: 21618155 NR Description: putative ripening-related protein-like
  misc_feature (1)..(248): Homolog of NCBI NO: 30697236 NR Description: haloacid dehalogenase-like hydrolase family
  misc_feature (1)..(248): Homolog of NCBI NO: 30697234 NR Description: haloacid dehalogenase-like hydrolase family
MEVKKNIQEYMVQKLGIEEDKVQELCLSLYKIYGTTMAGLKAVGYDFDYDDFHRFVHGRLPYSTLKPDPILRNIILSLPIRKVVFTNADKAHAAKIIARLGLEGCFEKIISFETLNPITKTESPVDTKTREIFDIISYMANPDSSIELPKTSVVCKPSEGAFEQVFKMANINPKKTLFFDDSIRNIQTGKRVGLHTVWVGTSHREEGVDIALEHIHNIREALPQLWDAVDDKAKEIRTRQKVAIETIA

SEQ ID NO: 38598 - protein, 238 aa, Arabidopsis thaliana
  peptide (1)..(238): Ceres Seq. ID no. 12328755
  misc_feature (1)..(192): Pfam Name: haloacid dehalogenase-like hydrolase Pfam Description: haloacid dehalogenase-like hydrolase
  misc_feature (1)..(112): Homolog of NCBI NO: 15238429 NR Description: putative ripening-related protein - like; protein
  misc_feature (138)..(236): Homolog of NCBI NO: 8885554 NR Description: ripening-related protein-like; hydrolase-like
  misc_feature (1)..(112): Homolog of NCBI NO: 8885554 NR Description: ripening-related protein-like; hydrolase-like
  misc_feature (1)..(236): Homolog of NCBI NO: 21593165 NR Description: unknown [Arabidopsis thaliana]
  misc_feature (1)..(236): Homolog of NCBI NO: 15241720 NR Description: putative protein
  misc_feature (97)..(236): Homolog of NCBI NO: 7406669 NR Description: putative ripening-related protein [Vitis vinifera]
  misc_feature (1)..(111): Homolog of NCBI NO: 7406669 NR Description: putative ripening-related protein [Vitis vinifera]
  misc_feature (1)..(238): Homolog of NCBI NO: 21618155 NR Description: putative ripening-related protein-like
  misc_feature (1)..(238): Homolog of NCBI NO: 30697236 NR Description: haloacid dehalogenase-like hydrolase family
  misc_feature (1)..(238): Homolog of NCBI NO: 30697234 NR Description: haloacid dehalogenase-like hydrolase family
MVQKLGIEEDKVQELCLSLYKIYGTTMAGLKAVGYDFDYDDFHRFVHGRLPYSTLKPDPILRNIILSLPIRKVVFTNADKAHAAKIIARLGLEGCFEKIISFETLNPITKTESPVDTKTREIFDIISYMANPDSSIELPKTSVVCKPSEGAFEQVFKMANINPKKTLFFDDSIRNIQTGKRVGLHTVWVGTSHREEGVDIALEHIHNIREALPQLWDAVDDKAKEIRTRQKVAIETIA

SEQ ID NO: 38599 - DNA, 745 bp, Arabidopsis thaliana
  misc_feature (1)..(745): Ceres Seq. ID no. 5672374
  misc_feature: MA Experiment ID: 108488 Result: Down-regulated in Transcription
  misc_feature: MA Experiment ID: 108569 Result: Down-regulated in Transcription
  misc_feature: MA Experiment 108569 PARAMETER Experiment Name: At_0.001%_MeJA__cDNA_P Parameter: Timepoint (hr) Value: 6
  misc_feature: MA Experiment 108569 PARAMETER Experiment Name: At_0.001%_MeJA__cDNA_P Parameter: Tissue Value: Aerial
  misc_feature: MA Experiment 108569 PARAMETER Experiment Name: At_0.001%_MeJA__cDNA_P Parameter: Treatment Value: 0.001% MeJA vs. No Treatment
  misc_feature: MA Experiment ID: 20000235 Result: Down-regulated in Transcription
  misc_feature: MA Experiment 20000235 PARAMETER Experiment Name: At_Siliques_P Parameter: Age (day) Value: 21
  misc_feature: MA Experiment 20000235 PARAMETER Experiment Name: At_Siliques_P Parameter: Organism Value: A. thaliana
  misc_feature: MA Experiment 20000235 PARAMETER Experiment Name: At_Siliques_P Parameter: Plant Line Value: WS
  misc_feature: MA Experiment 20000235 PARAMETER Experiment Name: At_Siliques_P Parameter: Tissue Value: 5-10mm Siliques vs. Whole Plant
  misc_feature: MA Experiment ID: 20001557 Result: Down-regulated in Transcription
  misc_feature: MA Experiment 20001557 PARAMETER Experiment Name: At_Drought_Soil_Dry_P Parameter: Age (day) Value: 27
  misc_feature: MA Experiment 20001557 PARAMETER Experiment Name: At_Drought_Soil_Dry_P Parameter: Organism Value: A. thaliana
  misc_feature: MA Experiment 20001557 PARAMETER Experiment Name: At_Drought_Soil_Dry_P Parameter: Plant Line Value: WS
  misc_feature: MA Experiment 20001557 PARAMETER Experiment Name: At_Drought_Soil_Dry_P Parameter: Post Timepoint (hr) Value: 3
  misc_feature: MA Experiment 20001557 PARAMETER Experiment Name: At_Drought_Soil_Dry_P Parameter: Post-Treatment Value: Re-Water vs. No Drought
  misc_feature: MA Experiment 20001557 PARAMETER Experiment Name: At_Drought_Soil_Dry_P Parameter: Timepoint (day) Value: 13
  misc_feature: MA Experiment 20001557 PARAMETER Experiment Name: At_Drought_Soil_Dry_P Parameter: Treatment Value: Drought vs. No Drought
agaaagcggaaaaaaaaacaaaaggtcgtgaatgtctctgtccctttcttcctcagttctcacgcaagcttcaacgagaaaagatcggaatctcgccgtcggtaaagcgccgccgtaagtaaaagacggaaaaccagaagaaggaggagattgtatttatgtgtagcagcgtttagtgtgaggaaggaggagattttgtatatagttagaatttgcttcgaagacgatgtcgctgagaattaaattagtggtggataagtttgtggaggagcttaagcaagcacttgacgctgatatacaagatcggatcatgaaggagagagagatgcagagttatatagaagagcgtgagcgtgaagtcgctgagcgagaagctgcctggaaagctgagctctctcgccgtgagacggagatcgctagacaggaagcgaggttgaagatggagagagagaatctggagaaggagaagagtgttcttatggggactgcgtcgaatcaggataatcaagatggtgctctggaaattactgtgagtggtgagaaatatcggtgtcttagattctctaaggctaagaaatgaggttggaaattggaatctggattctaaatttagggcacaaaaggaaaagatttgttcttgcgtttatgatggatgcaatgggaattgttggaatgatgcttggtttgtgtaaattattaattcaatgaagaaagtattgtgttttctggaaagagagtttgtctg

SEQ ID NO: 38600 - protein, 117 aa, Arabidopsis thaliana
  peptide (1)..(117): Ceres Seq. ID no. 5672375
  misc_feature (1)..(117): Homolog of NCBI NO: 18398390 NR Description: expressed protein
  misc_feature (1)..(106): Homolog of NCBI NO: 25371273 NR Description: hypothetical protein At2g17350 [imported] -
MSLRIKLVVDKFVEELKQALDADIQDRIMKEREMQSYIEEREREVAEREAAWKAELSRRETEIARQEARLKMERENLEKEKSVLMGTASNQDNQDGALEITVSGEKYRCLRFSKAKK

SEQ ID NO: 38601 - protein, 89 aa, Arabidopsis thaliana
  peptide (1)..(89): Ceres Seq. ID no. 5672376
  misc_feature (1)..(89): Homolog of NCBI NO: 18398390 NR Description: expressed protein
  misc_feature (1)..(78): Homolog of NCBI NO: 25371273 NR Description: hypothetical protein At2g17350 [imported] -
MKEREMQSYIEEREREVAEREAAWKAELSRRETEIARQEARLKMERENLEKEKSVLMGTASNQDNQDGALEITVSGEKYRCLRFSKAKK

SEQ ID NO: 38602 - protein, 84 aa, Arabidopsis thaliana
  peptide (1)..(84): Ceres Seq. ID no. 5672377
  misc_feature (1)..(84): Homolog of NCBI NO: 18398390 NR Description: expressed protein
  misc_feature (1)..(73): Homolog of NCBI NO: 25371273 NR Description: hypothetical protein At2g17350 [imported] -
MQSYIEEREREVAEREAAWKAELSRRETEIARQEARLKMERENLEKEKSVLMGTASNQDNQDGALEITVSGEKYRCLRFSKAKK

SEQ ID NO: 38603 - DNA, 1945 bp, Arabidopsis thaliana
  misc_feature (1)..(1945): Ceres Seq. ID no. 13574947
  misc_feature: MA Experiment ID: 20000184 Result: Down-regulated in Transcription
  misc_feature: MA Experiment 20000184 PARAMETER Experiment Name: At_Shoots__P Parameter: Age (day) Value: 7
  misc_feature: MA Experiment 20000184 PARAMETER Experiment Name: At_Shoots__P Parameter: Tissue Value: Shoots vs. Whole Plant
  misc_feature: MA Experiment ID: 20000234 Result: Down-regulated in Transcription
  misc_feature: MA Experiment 20000234 PARAMETER Experiment Name: At_Siliques_P Parameter: Age (day) Value: 21
  misc_feature: MA Experiment 20000234 PARAMETER Experiment Name: At_Siliques_P Parameter: Organism Value: A. thaliana
  misc_feature: MA Experiment 20000234 PARAMETER Experiment Name: At_Siliques_P Parameter: Plant Line Value: WS
  misc_feature: MA Experiment 20000234 PARAMETER Experiment Name: At_Siliques_P Parameter: Tissue Value: Less Than 5mm Siliques vs. Whole Plant
  misc_feature: MA Experiment ID: 20000235 Result: Down-regulated in Transcription
  misc_feature: MA Experiment 20000235 PARAMETER Experiment Name: At_Siliques_P Parameter: Age (day) Value: 21
  misc_feature: MA Experiment 20000235 PARAMETER Experiment Name: At_Siliques_P Parameter: Organism Value: A. thaliana
  misc_feature: MA Experiment 20000235 PARAMETER Experiment Name: At_Siliques_P Parameter: Plant Line Value: WS
  misc_feature: MA Experiment 20000235 PARAMETER Experiment Name: At_Siliques_P Parameter: Tissue Value: 5-10mm Siliques vs. Whole Plant
  misc_feature: MA Experiment ID: 20000264 Result: Down-regulated in Transcription
  misc_feature: MA Experiment 20000264 PARAMETER Experiment Name: At_Open_Flower_P Parameter: Age (day) Value: 21
  misc_feature: MA Experiment 20000264 PARAMETER Experiment Name: At_Open_Flower_P Parameter: Plant Line Value: WS
  misc_feature: MA Experiment 20000264 PARAMETER Experiment Name: At_Open_Flower_P Parameter: Tissue Value: Open Flower vs. Whole Plant
  misc_feature: MA Experiment ID: 20000265 Result: Down-regulated in Transcription
  misc_feature: MA Experiment 20000265 PARAMETER Experiment Name: At_Open_Flower_P Parameter: Age (day) Value: 21
  misc_feature: MA Experiment 20000265 PARAMETER Experiment Name: At_Open_Flower_P Parameter: Plant Line Value: WS
  misc_feature: MA Experiment 20000265 PARAMETER Experiment Name: At_Open_Flower_P Parameter: Tissue Value: Closed Flower vs. Whole Plant
  misc_feature: MA Experiment ID: 20000286 Result: Down-regulated in Transcription
  misc_feature: MA Experiment 20000286 PARAMETER Experiment Name: At_Open_Flower_P Parameter: Age (day) Value: 21
  misc_feature: MA Experiment 20000286 PARAMETER Experiment Name: At_Open_Flower_P Parameter: Plant Line Value: WS
  misc_feature: MA Experiment 20000286 PARAMETER Experiment Name: At_Open_Flower_P Parameter: Tissue Value: Half Open vs. Whole Plant
  misc_feature: MA Experiment ID: 20000495 Result: Down-regulated in Transcription
  misc_feature: MA Experiment 20000495 PARAMETER Experiment Name: At_Guard_Cells_P Parameter: Harvest Date Value: 8/2/2002
  misc_feature: MA Experiment 20000495 PARAMETER Experiment Name: At_Guard_Cells_P Parameter: Organism Value: A. thaliana
  misc_feature: MA Experiment 20000495 PARAMETER Experiment Name: At_Guard_Cells_P Parameter: Tissue Value: Guard Cells vs. Leaves
  misc_feature: MA Experiment ID: 20000496 Result: Down-regulated in Transcription
  misc_feature: MA Experiment 20000496 PARAMETER Experiment Name: At_Guard_Cells_P Parameter: Harvest Date Value: 7/19/2002
  misc_feature: MA Experiment 20000496 PARAMETER Experiment Name: At_Guard_Cells_P Parameter: Organism Value: Canola
  misc_feature: MA Experiment 20000496 PARAMETER Experiment Name: At_Guard_Cells_P Parameter: Tissue Value: Guard Cells vs. Leaves
aagtgtctctctataaccagagaaattatttcaagatctacttctcatcatcgttcttttcttatctcttcttgtccaacttcttctgaatcaagacaagagaaaagcaaccaaagatggcacatcttcaaagaacatttcctactgagatgtcaaaaggtagagctagctttccaaaaggctttctctttggaactgcttcatcttcttatcagtacgaaggagcagtgaatgaaggtgcgagaggacaaagcgtgtgggatcatttctccaacaggtttcctcacagaatcagtgattctagcgacggaaacgttgccgttgatttctaccatcgttacaaggaagatattaagagaatgaaggatataaacatggattcgtttcggctttccattgcttggccacgagttctaccttatggcaaaagggatagaggagttagtgaagaaggaattaagttttacaatgatgttattgatgaactcttagccaatgaaatcactcctcttgttactatctttcattgggacataccacaggatcttgaagatgaatacggcggttttctaagcgagcagattatagatgacttcagagactatgcgagtctctgcttcgagagatttggggacagagtgagtctgtggtgcacaatgaatgagccgtgggtctacagtgtcgcgggctatgacacaggaaggaaagcgccaggacggtgctccaagtatgttaatggcgctagtgttgctggaatgtcgggatacgaggcatatattgtgagccataacatgcttctagcgcacgcagaagcagtggaagtgtttagaaaatgtgaccatattaaaaacggacaaattgggattgcgcataatccactttggtacgagccatatgatccgagtgatccagatgatgtcgaaggatgtaatcgagctatggacttcatgcttggttggcatcagcatccgactgcttgtggagactatccagaaacgatgaagaaatcagttggagatagattaccgagttttacaccagaacaatctaagaaacttataggctcttgcgattacgttggtataaactactatagctcgcttttcgtgaagagtatcaaacacgtggatcctacgcaacctacttggagaactgaccaaggcgttgattggatgaaaaccaacatagatgggaaacaaatagcaaaacaaggaggatcagagtggagtttcacatatccaacaggactcagaaacattttgaagtatgtgaaaaaaacttatggcaatcctcccattctcataactgaaaacgggtatggtgaagtagcggaacagagtcagagtctttatatgtacaatccttcaatcgacacagagagattggagtacattgaaggacatatccacgctattcatcaagccatccatgaagatggagtaagagtggaaggttattacgtatggtcattgctagataacttcgagtggaacagtggatatggtgtgagatatggtttatattacattgattacaaagatgggcttagacgatacccgaaaatgtcggcgttatggttgaaagagttcttgaggtttgatcaagaagacgattcttcgacgtctaagaaagaagagaagaaagagagctatggaaaacagttattgcattctgttcaggacagtcaatttgttcattcgattaaagacagtggtgcgttacctgcggttttggggagcttgttcgttgtgtctgcaactgttggtacttctctgttcttcaaaggagctaataattgaaacagaagaaacaaaattttaaaaaattgttgggatttgttgttgttcttgaaagattgaaaaagaactatgtgatactttgtactattcttttctataatttattgtgtgttttgttattgaaaacttgtgtggtctattagttg

SEQ ID NO: 38604 - protein, 560 aa, Arabidopsis thaliana
  peptide (1)..(560): Ceres Seq. ID no. 13574948
  misc_feature (9)..(507): Homolog of NCBI NO: 1363489 NR Description: thioglucosidase (EC 3.2.1.147) 3D precursor -
  misc_feature (9)..(507): Homolog of NCBI NO: 22331243 NR Description: glycosyl hydrolase family 1 [Arabidopsis
  misc_feature (16)..(493): Homolog of NCBI NO: 22327030 NR Description: glycosyl hydrolase family 1 [Arabidopsis thaliana]
  misc_feature (9)..(507): Homolog of NCBI NO: 15232626 NR Description: glycosyl hydrolase family 1 [Arabidopsis
  misc_feature (16)..(492): Homolog of NCBI NO: 18377977 NR Description: putative beta-glucosidase [Arabidopsis thaliana]
  misc_feature (10)..(492): Homolog of NCBI NO: 25404995 NR Description: protein T4O12.15 [imported] - Arabidopsis
  misc_feature (10)..(492): Homolog of NCBI NO: 15222905 NR Description: glycosyl hydrolase family 1,
  misc_feature (10)..(492): Homolog of NCBI NO: 25289457 NR Description: probable beta-glucosidase (EC 3.2.1.21) ATA27
  misc_feature (13)..(515): Homolog of NCBI NO: 15232260 NR Description: glycosyl hydrolase family 1 [Arabidopsis
  misc_feature (1)..(560): Homolog of NCBI NO: 15224886 NR Description: glycosyl hydrolase family 1 [Arabidopsis
MAHLQRTFPTEMSKGRASFPKGFLFGTASSSYQYEGAVNEGARGQSVWDHFSNRFPHRISDSSDGNVAVDFYHRYKEDIKRMKDINMDSFRLSIAWPRVLPYGKRDRGVSEEGIKFYNDVIDELLANEITPLVTIFHWDIPQDLEDEYGGFLSEQIIDDFRDYASLCFERFGDRVSLWCTMNEPWVYSVAGYDTGRKAPGRCSKYVNGASVAGMSGYEAYIVSHNMLLAHAEAVEVFRKCDHIKNGQIGIAHNPLWYEPYDPSDPDDVEGCNRAMDFMLGWHQHPTACGDYPETMKKSVGDRLPSFTPEQSKKLIGSCDYVGINYYSSLFVKSIKHVDPTQPTWRTDQGVDWMKTNIDGKQIAKQGGSEWSFTYPTGLRNILKYVKKTYGNPPILITENGYGEVAEQSQSLYMYNPSIDTERLEYIEGHIHAIHQAIHEDGVRVEGYYVWSLLDNFEWNSGYGVRYGLYYIDYKDGLRRYPKMSALWLKEFLRFDQEDDSSTSKKEEKKESYGKQLLHSVQDSQFVHSIKDSGALPAVLGSLFVVSATVGTSLFFKGANN

SEQ ID NO: 38605 - protein, 549 aa, Arabidopsis thaliana
  peptide (1)..(549): Ceres Seq. ID no. 13574949
  misc_feature (1)..(496): Homolog of NCBI NO: 1363489 NR Description: thioglucosidase (EC 3.2.1.147) 3D precursor -
  misc_feature (1)..(496): Homolog of NCBI NO: 22331243 NR Description: glycosyl hydrolase family 1 [Arabidopsis
  misc_feature (5)..(482): Homolog of NCBI NO: 22327030 NR Description: glycosyl hydrolase family 1 [Arabidopsis thaliana]
  misc_feature (1)..(496): Homolog of NCBI NO: 15232626 NR Description: glycosyl hydrolase family 1 [Arabidopsis
  misc_feature (5)..(481): Homolog of NCBI NO: 18377977 NR Description: putative beta-glucosidase [Arabidopsis thaliana]
  misc_feature (1)..(481): Homolog of NCBI NO: 25404995 NR Description: protein T4O12.15 [imported] - Arabidopsis
  misc_feature (1)..(481): Homolog of NCBI NO: 15222905 NR Description: glycosyl hydrolase family 1,
  misc_feature (1)..(481): Homolog of NCBI NO: 25289457 NR Description: probable beta-glucosidase (EC 3.2.1.21) ATA27
  misc_feature (2)..(504): Homolog of NCBI NO: 15232260 NR Description: glycosyl hydrolase family 1 [Arabidopsis
  misc_feature (1)..(549): Homolog of NCBI NO: 15224886 NR Description: glycosyl hydrolase family 1 [Arabidopsis
MSKGRASFPKGFLFGTASSSYQYEGAVNEGARGQSVWDHFSNRFPHRISDSSDGNVAVDFYHRYKEDIKRMKDINMDSFRLSIAWPRVLPYGKRDRGVSEEGIKFYNDVIDELLANEITPLVTIFHWDIPQDLEDEYGGFLSEQIIDDFRDYASLCFERFGDRVSLWCTMNEPWVYSVAGYDTGRKAPGRCSKYVNGASVAGMSGYEAYIVSHNMLLAHAEAVEVFRKCDHIKNGQIGIAHNPLWYEPYDPSDPDDVEGCNRAMDFMLGWHQHPTACGDYPETMKKSVGDRLPSFTPEQSKKLIGSCDYVGINYYSSLFVKSIKHVDPTQPTWRTDQGVDWMKTNIDGKQIAKQGGSEWSFTYPTGLRNILKYVKKTYGNPPILITENGYGEVAEQSQSLYMYNPSIDTERLEYIEGHIHAIHQAIHEDGVRVEGYYVWSLLDNFEWNSGYGVRYGLYYIDYKDGLRRYPKMSALWLKEFLRFDQEDDSSTSKKEEKKESYGKQLLHSVQDSQFVHSIKDSGALPAVLGSLFVVSATVGTSLFFKGANN

SEQ ID NO: 38606 - protein, 479 aa, Arabidopsis thaliana
  peptide (1)..(479): Ceres Seq. ID no. 13574950
  misc_feature (1)..(426): Homolog of NCBI NO: 1363489 NR Description: thioglucosidase (EC 3.2.1.147) 3D precursor -
  misc_feature (1)..(426): Homolog of NCBI NO: 22331243 NR Description: glycosyl hydrolase family 1 [Arabidopsis
  misc_feature (1)..(412): Homolog of NCBI NO: 22327030 NR Description: glycosyl hydrolase family 1 [Arabidopsis thaliana]
  misc_feature (1)..(426): Homolog of NCBI NO: 15232626 NR Description: glycosyl hydrolase family 1 [Arabidopsis
  misc_feature (1)..(411): Homolog of NCBI NO: 18377977 NR Description: putative beta-glucosidase [Arabidopsis thaliana]
  misc_feature (1)..(411): Homolog of NCBI NO: 25404995 NR Description: protein T4O12.15 [imported] - Arabidopsis
  misc_feature (1)..(411): Homolog of NCBI NO: 15222905 NR Description: glycosyl hydrolase family 1,
  misc_feature (1)..(411): Homolog of NCBI NO: 25289457 NR Description: probable beta-glucosidase (EC 3.2.1.21) ATA27
  misc_feature (1)..(434): Homolog of NCBI NO: 15232260 NR Description: glycosyl hydrolase family 1 [Arabidopsis
  misc_feature (1)..(479): Homolog of NCBI NO: 15224886 NR Description: glycosyl hydrolase family 1 [Arabidopsis
MKDINMDSFRLSIAWPRVLPYGKRDRGVSEEGIKFYNDVIDELLANEITPLVTIFHWDIPQDLEDEYGGFLSEQIIDDFRDYASLCFERFGDRVSLWCTMNEPWVYSVAGYDTGRKAPGRCSKYVNGASVAGMSGYEAYIVSHNMLLAHAEAVEVFRKCDHIKNGQIGIAHNPLWYEPYDPSDPDDVEGCNRAMDFMLGWHQHPTACGDYPETMKKSVGDRLPSFTPEQSKKLIGSCDYVGINYYSSLFVKSIKHVDPTQPTWRTDQGVDWMKTNIDGKQIAKQGGSEWSFTYPTGLRNILKYVKKTYGNPPILITENGYGEVAEQSQSLYMYNPSIDTERLEYIEGHIHAIHQAIHEDGVRVEGYYVWSLLDNFEWNSGYGVRYGLYYIDYKDGLRRYPKMSALWLKEFLRFDQEDDSSTSKKEEKKESYGKQLLHSVQDSQFVHSIKDSGALPAVLGSLFVVSATVGTSLFFKGANN

SEQ ID NO: 38607 - DNA, 2028 bp, Arabidopsis thaliana
  misc_feature (1)..(2028): Ceres Seq. ID no. 13492917
  misc_feature: MA Experiment ID: 108434 Result: Down-regulated in Transcription
  misc_feature: MA Experiment 108434 PARAMETER Experiment Name: At_Root_Tips_cDNA_P Parameter: Tissue Value: Root Tips
  misc_feature: MA Experiment ID: 108464 Result: Up-regulated in Transcription
  misc_feature: MA Experiment 108464 PARAMETER Experiment Name: At_Germinating_Seeds_cDNA_P Parameter: Age (day) Value: 4 vs. 0
  misc_feature: MA Experiment 108464 PARAMETER Experiment Name: At_Germinating_Seeds_cDNA_P Parameter: Tissue Value: Germinating Seeds
  misc_feature: MA Experiment ID: 108668 Result: Up-regulated in Transcription
  misc_feature: MA Experiment 108668 PARAMETER Experiment Name: At_2mM_SA_cDNA_P Parameter: Plant Line Value: WS
  misc_feature: MA Experiment 108668 PARAMETER Experiment Name: At_2mM_SA_cDNA_P Parameter: Timepoint (hr) Value: 6
  misc_feature: MA Experiment 108668 PARAMETER Experiment Name: At_2mM_SA_cDNA_P Parameter: Treatment Value: 2mM SA vs. No Treatment
  misc_feature: MA Experiment ID: 20000069 Result: Up-regulated in Transcription
  misc_feature: MA Experiment 20000069 PARAMETER Experiment Name: At_100uM_ABA_Mutants_cDNA_P Parameter: Plant Line Value: CS23
  misc_feature: MA Experiment 20000069 PARAMETER Experiment Name: At_100uM_ABA_Mutants_cDNA_P Parameter: Timepoint (hr) Value: 6
  misc_feature: MA Experiment 20000069 PARAMETER Experiment Name: At_100uM_ABA_Mutants_cDNA_P Parameter: Tissue Value: Aerial
  misc_feature: MA Experiment 20000069 PARAMETER Experiment Name: At_100uM_ABA_Mutants_cDNA_P Parameter: Treatment Value: 100uM ABA vs. No Treatment
  misc_feature: MA Experiment ID: 20000070 Result: Up-regulated in Transcription
  misc_feature: MA Experiment 20000070 PARAMETER Experiment Name: At_100uM_ABA_Mutants_cDNA_P Parameter: Plant Line Value: CS24
  misc_feature: MA Experiment 20000070 PARAMETER Experiment Name: At_100uM_ABA_Mutants_cDNA_P Parameter: Timepoint (hr) Value: 6
  misc_feature: MA Experiment 20000070 PARAMETER Experiment Name: At_100uM_ABA_Mutants_cDNA_P Parameter: Tissue Value: Aerial
  misc_feature: MA Experiment 20000070 PARAMETER Experiment Name: At_100uM_ABA_Mutants_cDNA_P Parameter: Treatment Value: 100uM ABA vs. No Treatment
  misc_feature: MA Experiment ID: 20000071 Result: Up-regulated in Transcription
  misc_feature: MA Experiment 20000071 PARAMETER Experiment Name: At_100uM_ABA_Mutants_cDNA_P Parameter: Plant Line Value: CS8104
  misc_feature: MA Experiment 20000071 PARAMETER Experiment Name: At_100uM_ABA_Mutants_cDNA_P Parameter: Timepoint (hr) Value: 6
  misc_feature: MA Experiment 20000071 PARAMETER Experiment Name: At_100uM_ABA_Mutants_cDNA_P Parameter: Tissue Value: Aerial
  misc_feature: MA Experiment 20000071 PARAMETER Experiment Name: At_100uM_ABA_Mutants_cDNA_P Parameter: Treatment Value: 100uM ABA vs. No Treatment
  misc_feature: MA Experiment ID: 20000072 Result: Up-regulated in Transcription
  misc_feature: MA Experiment 20000072 PARAMETER Experiment Name: At_100uM_ABA_Mutants_cDNA_P Parameter: Plant Line Value: CS8105
  misc_feature: MA Experiment 20000072 PARAMETER Experiment Name: At_100uM_ABA_Mutants_cDNA_P Parameter: Timepoint (hr) Value: 6
  misc_feature: MA Experiment 20000072 PARAMETER Experiment Name: At_100uM_ABA_Mutants_cDNA_P Parameter: Tissue Value: Aerial
  misc_feature: MA Experiment 20000072 PARAMETER Experiment Name: At_100uM_ABA_Mutants_cDNA_P Parameter: Treatment Value: 100uM ABA vs. No Treatment
  misc_feature: MA Experiment ID: 20000088 Result: Up-regulated in Transcription
  misc_feature: MA Experiment 20000088 PARAMETER Experiment Name: At_100uM_ABA_Mutants_cDNA_P Parameter: Plant Line Value: Landsberg
  misc_feature: MA Experiment 20000088 PARAMETER Experiment Name: At_100uM_ABA_Mutants_cDNA_P Parameter: Timepoint (hr) Value: 6
  misc_feature: MA Experiment 20000088 PARAMETER Experiment Name: At_100uM_ABA_Mutants_cDNA_P Parameter: Tissue Value: Aerial
  misc_feature: MA Experiment 20000088 PARAMETER Experiment Name: At_100uM_ABA_Mutants_cDNA_P Parameter: Treatment Value: 100uM ABA vs. No Treatment
  misc_feature: MA Experiment ID: 20000089 Result: Up-regulated in Transcription
  misc_feature: MA Experiment ID: 20000090 Result: Up-regulated in Transcription
  misc_feature: MA Experiment ID: 20000111 Result: Down-regulated in Transcription
  misc_feature: MA Experiment 20000111 PARAMETER Experiment Name: At_42deg_Heat_cDNA_P Parameter: Temperature (deg C) Value: 42 vs. 22
  misc_feature: MA Experiment 20000111 PARAMETER Experiment Name: At_42deg_Heat_cDNA_P Parameter: Timepoint (hr) Value: 6
  misc_feature: MA Experiment 20000111 PARAMETER Experiment Name: At_42deg_Heat_cDNA_P Parameter: Tissue Value: Aerial
  misc_feature: MA Experiment ID: 20000182 Result: Up-regulated in Transcription
  misc_feature: MA Experiment 20000182 PARAMETER Experiment Name: At_2mM_SA_P Parameter: Age (day) Value: 14
  misc_feature: MA Experiment 20000182 PARAMETER Experiment Name: At_2mM_SA_P Parameter: Organism Value: A. thaliana
  misc_feature: MA Experiment 20000182 PARAMETER Experiment Name: At_2mM_SA_P Parameter: Plant Line Value: WS
  misc_feature: MA Experiment 20000182 PARAMETER Experiment Name: At_2mM_SA_P Parameter: Timepoint (hr) Value: 6
  misc_feature: MA Experiment 20000182 PARAMETER Experiment Name: At_2mM_SA_P Parameter: Tissue Value: Aerial
  misc_feature: MA Experiment 20000182 PARAMETER Experiment Name: At_2mM_SA_P Parameter: Treatment Value: 2mM SA vs. No Treatment
  misc_feature: MA Experiment ID: 20000184 Result: Down-regulated in Transcription
  misc_feature: MA Experiment 20000184 PARAMETER Experiment Name: At_Shoots__P Parameter: Age (day) Value: 7
  misc_feature: MA Experiment 20000184 PARAMETER Experiment Name: At_Shoots__P Parameter: Tissue Value: Shoots vs. Whole Plant
  misc_feature: MA Experiment ID: 20000185 Result: Down-regulated in Transcription
  misc_feature: MA Experiment 20000185 PARAMETER Experiment Name: At_Roots__P Parameter: Age (day) Value: 7 vs. 21
  misc_feature: MA Experiment 20000185 PARAMETER Experiment Name: At_Roots__P Parameter: Organism Value: A. thaliana
  misc_feature: MA Experiment 20000185 PARAMETER Experiment Name: At_Roots__P Parameter: Tissue Value: Roots vs. Whole Plant
  misc_feature: MA Experiment ID: 20000234 Result: Down-regulated in Transcription
  misc_feature: MA Experiment 20000234 PARAMETER Experiment Name: At_Siliques_P Parameter: Age (day) Value: 21
  misc_feature: MA Experiment 20000234 PARAMETER Experiment Name: At_Siliques_P Parameter: Organism Value: A. thaliana
  misc_feature: MA Experiment 20000234 PARAMETER Experiment Name: At_Siliques_P Parameter: Plant Line Value: WS
  misc_feature: MA Experiment 20000234 PARAMETER Experiment Name: At_Siliques_P Parameter: Tissue Value: Less Than 5mm Siliques vs. Whole Plant
  misc_feature: MA Experiment ID: 20000235 Result: Down-regulated in Transcription
  misc_feature: MA Experiment 20000235 PARAMETER Experiment Name: At_Siliques_P Parameter: Age (day) Value: 21
  misc_feature: MA Experiment 20000235 PARAMETER Experiment Name: At_Siliques_P Parameter: Organism Value: A. thaliana
  misc_feature: MA Experiment 20000235 PARAMETER Experiment Name: At_Siliques_P Parameter: Plant Line Value: WS
  misc_feature: MA Experiment 20000235 PARAMETER Experiment Name: At_Siliques_P Parameter: Tissue Value: 5-10mm Siliques vs. Whole Plant
  misc_feature: MA Experiment ID: 20000264 Result: Down-regulated in Transcription
  misc_feature: MA Experiment 20000264 PARAMETER Experiment Name: At_Open_Flower_P Parameter: Age (day) Value: 21
  misc_feature: MA Experiment 20000264 PARAMETER Experiment Name: At_Open_Flower_P Parameter: Plant Line Value: WS
  misc_feature: MA Experiment 20000264 PARAMETER Experiment Name: At_Open_Flower_P Parameter: Tissue Value: Open Flower vs. Whole Plant
  misc_feature: MA Experiment ID: 20000265 Result: Down-regulated in Transcription
  misc_feature: MA Experiment 20000265 PARAMETER Experiment Name: At_Open_Flower_P Parameter: Age (day) Value: 21
  misc_feature: MA Experiment 20000265 PARAMETER Experiment Name: At_Open_Flower_P Parameter: Plant Line Value: WS
  misc_feature: MA Experiment 20000265 PARAMETER Experiment Name: At_Open_Flower_P Parameter: Tissue Value: Closed Flower vs. Whole Plant
  misc_feature: MA Experiment ID: 20000438 Result: Down-regulated in Transcription
  misc_feature: MA Experiment 20000438 PARAMETER Experiment Name: At_Shoots__P Parameter: Age (day) Value: 14
  misc_feature: MA Experiment 20000438 PARAMETER Experiment Name: At_Shoots__P Parameter: Tissue Value: Shoots vs. Whole Plant
  misc_feature: MA Experiment ID: 20001555 Result: Down-regulated in Transcription
  misc_feature: MA Experiment 20001555 PARAMETER Experiment Name: At_Drought_Soil_Dry_P Parameter: Age (day) Value: 24
  misc_feature: MA Experiment 20001555 PARAMETER Experiment Name: At_Drought_Soil_Dry_P Parameter: Organism Value: A. thaliana
  misc_feature: MA Experiment 20001555 PARAMETER Experiment Name: At_Drought_Soil_Dry_P Parameter: Plant Line Value: WS
  misc_feature: MA Experiment 20001555 PARAMETER Experiment Name: At_Drought_Soil_Dry_P Parameter: Post Timepoint (hr) Value: None
  misc_feature: MA Experiment 20001555 PARAMETER Experiment Name: At_Drought_Soil_Dry_P Parameter: Post-Treatment Value: None
  misc_feature: MA Experiment 20001555 PARAMETER Experiment Name: At_Drought_Soil_Dry_P Parameter: Timepoint (day) Value: 10
  misc_feature: MA Experiment 20001555 PARAMETER Experiment Name: At_Drought_Soil_Dry_P Parameter: Treatment Value: Drought vs. No Drought
  misc_feature: MA Experiment ID: 20001560 Result: Down-regulated in Transcription
  misc_feature: MA Experiment 20001560 PARAMETER Experiment Name: At_Drought_Soil_Dry_P Parameter: Age (day) Value: 28
  misc_feature: MA Experiment 20001560 PARAMETER Experiment Name: At_Drought_Soil_Dry_P Parameter: Organism Value: A. thaliana
  misc_feature: MA Experiment 20001560 PARAMETER Experiment Name: At_Drought_Soil_Dry_P Parameter: Plant Line Value: WS
  misc_feature: MA Experiment 20001560 PARAMETER Experiment Name: At_Drought_Soil_Dry_P Parameter: Post Timepoint (hr) Value: None
  misc_feature: MA Experiment 20001560 PARAMETER Experiment Name: At_Drought_Soil_Dry_P Parameter: Post-Treatment Value: None
  misc_feature: MA Experiment 20001560 PARAMETER Experiment Name: At_Drought_Soil_Dry_P Parameter: Timepoint (day) Value: 14
  misc_feature: MA Experiment 20001560 PARAMETER Experiment Name: At_Drought_Soil_Dry_P Parameter: Treatment Value: Drought vs. No Drought
atttttgtaatctggctctataattgtctctgtttgctgctactctcgagcttggttgacgcggatcaggccaacatagattgcttaaggacctttaaatctcaagtagaggatccaaatagatatttatcgacttgggtttttggcaacgagactgctggttatatctgcaagttcagtggtgtgacttgttggcatgatgatgagaatagggttttgagtattaagctatctggttatggtcttagaggagtgtttcctcctgcggttaagctatgtgctgatctcactggtttagatctttctagaaacaacttctctggacctttaccagccaacattagcaccttgattccacttgttacgattctagacctctcctacaatagcttctctggtgaaatccctatgttgatctccaacattacctttttgaacactcttatgcttcagcataaccagttcacgggtactcttcctccccagctagcgcaacttggacggctcaaaacattctctgtgtctgacaatcgtctcgttggtcctatcccaaatttcaaccaaaccttgcagtttaagcaggaattgtttgctaataacctggatctgtgtggtaagcctctagatgactgtaagagtgcttctagctctcgtggtaaagttgttattatagcggcagttggtggactgactgcagcagcattagtcgttggggttgttttgttcttctatttccgtaaattgggtgctgttcggaagaagcaggatgatcctgaaggaaacagatgggcaaagagcttgaaaggacagaaaggtgttaaggttttcatgtttaagaaatcggtttcaaagatgaaattaagcgatcttatgaaggcaacagaggaattcaagaaagataatatcattgcaacaggaagaacaggaactatgtacaaaggtaggcttgaagacgggtctctacttatgataaagaggttgcaggattctcaacgctctgagaaagagtttgatgcagagatgaagactttgggctctgttaaaaacagaaacttagtccctctcttgggctattgtgttgccaataaggagaggcttctaatgtatgagtacatggcaaacggttacctttatgatcagttacatcctgcagatgaagaatccttcaagcccttggattggccttcaaggctgaaaatcgcgattgggacggcaaaaggattggcatggcttcatcatagctgcaacccgagaatcatccatcgcaacataagctcgaaatgcatattgntgactgcagagtttgagccaaagatctcggatttcggtctagctaggctgatgaacccaattgatacccatttaagcacattcgtcaatggagaatttggggatttcggttatgttgctcccgagtattcaagaaccatggttgcaactccaaaaggagatgtctacagcttcggtgttgtgcttctagagctagtaacgggccaaaaagcaacgagtgtaacaaaagtatctgaagaaaaagctgaggaagaaaacttcaagggtaacctcgtggaatggattacaaagctatcaagtgaatcaaaactgcaggaagcaatcgacaggtccttacttgggaacggtgtggatgatgaaatcttcaaagtactcaaagtagcatgcaactgcgttctaccggaaatagcaaagcagaggccaaccatgtttgaagtttatcagcttctaagagccattggagagagctacaacttcaccgccgatgatgatatcttaatcccatctgaatcaggtgaaggcgatttcattgaagagctcatagttgctcgttgatcaagaggaagggtaagaattgtgaaacaaacatctctagtcgtagcagtccaaagatatatataatgtataagtattgtttttattttatttttgggttctcgtcgtcgatggtgtgttgtaatatgatatattgttagatgcactctcttattactatgtactaagctttgggtgtgtggc

SEQ ID NO: 38608 - protein, 614 aa, Arabidopsis thaliana
  peptide (1)..(614): Ceres Seq. ID no. 13492918
  misc_feature (74)..(184): Homolog of NCBI NO: 38423526 NR Description: putative brassinosteroid-insensitive protein 1
  misc_feature (59)..(213): Homolog of NCBI NO: 34910644 NR Description: putative brassinosteroid-insensitive protein BRI1
  misc_feature (263)..(583): Homolog of NCBI NO: 34910644 NR Description: putative brassinosteroid-insensitive protein BRI1
  misc_feature (67)..(213): Homolog of NCBI NO: 38423526 NR Description: putative brassinosteroid-insensitive protein 1
  misc_feature (261)..(583): Homolog of NCBI NO: 38423526 NR Description: putative brassinosteroid-insensitive protein 1
  misc_feature (96)..(592): Homolog of NCBI NO: 25406019 NR Description: hypothetical protein F20P5.27 [imported] -
  misc_feature (25)..(605): Homolog of NCBI NO: 38344230 NR Description: OJ991113_30.7 [Oryza sativa (japonica
  misc_feature (12)..(592): Homolog of NCBI NO: 15222519 NR Description: leucine-rich repeat transmembrane protein kinase,
  misc_feature (2)..(594): Homolog of NCBI NO: 15233004 NR Description: leucine-rich repeat transmembrane protein kinase,
  misc_feature (10)..(594): Homolog of NCBI NO: 15223445 NR Description: leucine-rich repeat transmembrane protein kinase,
  misc_feature (431)..(431): Xaa is any aa, unknown or other
IFVIWLYNCLCLLLLSSLVDADQANIDCLRTFKSQVEDPNRYLSTWVFGNETAGYICKFSGVTCWHDDENRVLSIKLSGYGLRGVFPPAVKLCADLTGLDLSRNNFSGPLPANISTLIPLVTILDLSYNSFSGEIPMLISNITFLNTLMLQHNQFTGTLPPQLAQLGRLKTFSVSDNRLVGPIPNFNQTLQFKQELFANNLDLCGKPLDDCKSASSSRGKVVIIAAVGGLTAAALVVGVVLFFYFRKLGAVRKKQDDPEGNRWAKSLKGQKGVKVFMFKKSVSKMKLSDLMKATEEFKKDNIIATGRTGTMYKGRLEDGSLLMIKRLQDSQRSEKEFDAEMKTLGSVKNRNLVPLLGYCVANKERLLMYEYMANGYLYDQLHPADEESFKPLDWPSRLKIAIGTAKGLAWLHHSCNPRIIHRNISSKCILXTAEFEPKISDFGLARLMNPIDTHLSTFVNGEFGDFGYVAPEYSRTMVATPKGDVYSFGVVLLELVTGQKATSVTKVSEEKAEEENFKGNLVEWITKLSSESKLQEAIDRSLLGNGVDDEIFKVLKVACNCVLPEIAKQRPTMFEVYQLLRAIGESYNFTADDDILIPSESGEGDFIEELIVAR

SEQ ID NO: 38609 - protein, 478 aa, Arabidopsis thaliana
  peptide (1)..(478): Ceres Seq. ID no. 13492919
  misc_feature (1)..(48): Homolog of NCBI NO: 38423526 NR Description: putative brassinosteroid-insensitive protein 1
  misc_feature (1)..(77): Homolog of NCBI NO: 34910644 NR Description: putative brassinosteroid-insensitive protein BRI1
  misc_feature (127)..(447): Homolog of NCBI NO: 34910644 NR Description: putative brassinosteroid-insensitive protein BRI1
  misc_feature (1)..(77): Homolog of NCBI NO: 38423526 NR Description: putative brassinosteroid-insensitive protein 1
  misc_feature (125)..(447): Homolog of NCBI NO: 38423526 NR Description: putative brassinosteroid-insensitive protein 1
  misc_feature (1)..(456): Homolog of NCBI NO: 25406019 NR Description: hypothetical protein F20P5.27 [imported] -
  misc_feature (1)..(469): Homolog of NCBI NO: 38344230 NR Description: OJ991113_30.7 [Oryza sativa (japonica
  misc_feature (1)..(456): Homolog of NCBI NO: 15222519 NR Description: leucine-rich repeat transmembrane protein kinase,
  misc_feature (1)..(458): Homolog of NCBI NO: 15233004 NR Description: leucine-rich repeat transmembrane protein kinase,
  misc_feature (1)..(458): Homolog of NCBI NO: 15223445 NR Description: leucine-rich repeat transmembrane protein kinase,
  misc_feature (295)..(295): Xaa is any aa, unknown or other
MLISNITFLNTLMLQHNQFTGTLPPQLAQLGRLKTFSVSDNRLVGPIPNFNQTLQFKQELFANNLDLCGKPLDDCKSASSSRGKVVIIAAVGGLTAAALVVGVVLFFYFRKLGAVRKKQDDPEGNRWAKSLKGQKGVKVFMFKKSVSKMKLSDLMKATEEFKKDNIIATGRTGTMYKGRLEDGSLLMIKRLQDSQRSEKEFDAEMKTLGSVKNRNLVPLLGYCVANKERLLMYEYMANGYLYDQLHPADEESFKPLDWPSRLKIAIGTAKGLAWLHHSCNPRIIHRNISSKCILXTAEFEPKISDFGLARLMNPIDTHLSTFVNGEFGDFGYVAPEYSRTMVATPKGDVYSFGVVLLELVTGQKATSVTKVSEEKAEEENFKGNLVEWITKLSSESKLQEAIDRSLLGNGVDDEIFKVLKVACNCVLPEIAKQRPTMFEVYQLLRAIGESYNFTADDDILIPSESGEGDFIEELIVAR

SEQ ID NO: 38610 - protein, 466 aa, Arabidopsis thaliana
  peptide (1)..(466): Ceres Seq. ID no. 13492920
  misc_feature (1)..(36): Homolog of NCBI NO: 38423526 NR Description: putative brassinosteroid-insensitive protein 1
  misc_feature (1)..(65): Homolog of NCBI NO: 34910644 NR Description: putative brassinosteroid-insensitive protein BRI1
  misc_feature (115)..(435): Homolog of NCBI NO: 34910644 NR Description: putative brassinosteroid-insensitive protein BRI1
  misc_feature (1)..(65): Homolog of NCBI NO: 38423526 NR Description: putative brassinosteroid-insensitive protein 1
  misc_feature (113)..(435): Homolog of NCBI NO: 38423526 NR Description: putative brassinosteroid-insensitive protein 1
  misc_feature (1)..(444): Homolog of NCBI NO: 25406019 NR Description: hypothetical protein F20P5.27 [imported] -
  misc_feature (1)..(457): Homolog of NCBI NO: 38344230 NR Description: OJ991113_30.7 [Oryza sativa (japonica
  misc_feature (1)..(444): Homolog of NCBI NO: 15222519 NR Description: leucine-rich repeat transmembrane protein kinase,
  misc_feature (1)..(446): Homolog of NCBI NO: 15233004 NR Description: leucine-rich repeat transmembrane protein kinase,
  misc_feature (1)..(446): Homolog of NCBI NO: 15223445 NR Description: leucine-rich repeat transmembrane protein kinase,
  misc_feature (283)..(283): Xaa is any aa, unknown or other
MLQHNQFTGTLPPQLAQLGRLKTFSVSDNRLVGPIPNFNQTLQFKQELFANNLDLCGKPLDDCKSASSSRGKVVIIAAVGGLTAAALVVGVVLFFYFRKLGAVRKKQDDPEGNRWAKSLKGQKGVKVFMFKKSVSKMKLSDLMKATEEFKKDNIIATGRTGTMYKGRLEDGSLLMIKRLQDSQRSEKEFDAEMKTLGSVKNRNLVPLLGYCVANKERLLMYEYMANGYLYDQLHPADEESFKPLDWPSRLKIAIGTAKGLAWLHHSCNPRIIHRNISSKCILXTAEFEPKISDFGLARLMNPIDTHLSTFVNGEFGDFGYVAPEYSRTMVATPKGDVYSFGVVLLELVTGQKATSVTKVSEEKAEEENFKGNLVEWITKLSSESKLQEAIDRSLLGNGVDDEIFKVLKVACNCVLPEIAKQRPTMFEVYQLLRAIGESYNFTADDDILIPSESGEGDFIEELIVAR

SEQ ID NO: 38611 - DNA, 2019 bp, Arabidopsis thaliana
  misc_feature (1)..(2019): Ceres Seq. ID no. 12328728
  misc_feature: MA Experiment ID: 108573 Result: Up-regulated in Transcription
  misc_feature: MA Experiment 108573 PARAMETER Experiment Name: At_Drought_cDNA_P Parameter: Timepoint (hr) Value: 6
  misc_feature: MA Experiment 108573 PARAMETER Experiment Name: At_Drought_cDNA_P Parameter: Tissue Value: Aerial
  misc_feature: MA Experiment 108573 PARAMETER Experiment Name: At_Drought_cDNA_P Parameter: Treatment Value: Drought vs. No Drought
  misc_feature: MA Experiment ID: 108574 Result: Up-regulated in Transcription
  misc_feature: MA Experiment 108574 PARAMETER Experiment Name: At_Wounding__cDNA_P Parameter: Timepoint (hr) Value: 1
  misc_feature: MA Experiment 108574 PARAMETER Experiment Name: At_Wounding__cDNA_P Parameter: Tissue Value: Aerial
  misc_feature: MA Experiment 108574 PARAMETER Experiment Name: At_Wounding__cDNA_P Parameter: Treatment Value: Wounding vs. No Wounding
  misc_feature: MA Experiment ID: 108576 Result: Down-regulated in Transcription
  misc_feature: MA Experiment 108576 PARAMETER Experiment Name: At_42deg_Heat_cDNA_P Parameter: Temperature (deg C) Value: 42 vs. 22
  misc_feature: MA Experiment 108576 PARAMETER Experiment Name: At_42deg_Heat_cDNA_P Parameter: Timepoint (hr) Value: 1
  misc_feature: MA Experiment 108576 PARAMETER Experiment Name: At_42deg_Heat_cDNA_P Parameter: Tissue Value: Aerial
  misc_feature: MA Experiment ID: 108577 Result: Down-regulated in Transcription
  misc_feature: MA Experiment 108577 PARAMETER Experiment Name: At_42deg_Heat_cDNA_P Parameter: Temperature (deg C) Value: 42 vs. 22
  misc_feature: MA Experiment 108577 PARAMETER Experiment Name: At_42deg_Heat_cDNA_P Parameter: Timepoint (hr) Value: 6
  misc_feature: MA Experiment 108577 PARAMETER Experiment Name: At_42deg_Heat_cDNA_P Parameter: Tissue Value: Aerial
  misc_feature: MA Experiment ID: 108579 Result: Up-regulated in Transcription
  misc_feature: MA Experiment 108579 PARAMETER Experiment Name: At_4deg_Cold_cDNA_P Parameter: Temperature (deg C) Value: 4 vs. 22
  misc_feature: MA Experiment 108579 PARAMETER Experiment Name: At_4deg_Cold_cDNA_P Parameter: Timepoint (hr) Value: 6
  misc_feature: MA Experiment 108579 PARAMETER Experiment Name: At_4deg_Cold_cDNA_P Parameter: Tissue Value: Aerial
  misc_feature: MA Experiment ID: 20000171 Result: Down-regulated in Transcription
  misc_feature: MA Experiment 20000171 PARAMETER Experiment Name: At_42deg_Heat_P Parameter: Age (day) Value: 14
  misc_feature: MA Experiment 20000171 PARAMETER Experiment Name: At_42deg_Heat_P Parameter: Organism Value: A. thaliana
  misc_feature: MA Experiment 20000171 PARAMETER Experiment Name: At_42deg_Heat_P Parameter: Plant Line Value: WS
  misc_feature: MA Experiment 20000171 PARAMETER Experiment Name: At_42deg_Heat_P Parameter: Temperature (deg C) Value: 42 vs. 22
  misc_feature: MA Experiment 20000171 PARAMETER Experiment Name: At_42deg_Heat_P Parameter: Timepoint (hr) Value: 1
  misc_feature: MA Experiment 20000171 PARAMETER Experiment Name: At_42deg_Heat_P Parameter: Tissue Value: Aerial
  misc_feature: MA Experiment ID: 20000173 Result: Down-regulated in Transcription
  misc_feature: MA Experiment 20000173 PARAMETER Experiment Name: At_42deg_Heat_P Parameter: Age (day) Value: 14
  misc_feature: MA Experiment 20000173 PARAMETER Experiment Name: At_42deg_Heat_P Parameter: Organism Value: A. thaliana
  misc_feature: MA Experiment 20000173 PARAMETER Experiment Name: At_42deg_Heat_P Parameter: Plant Line Value: WS
  misc_feature: MA Experiment 20000173 PARAMETER Experiment Name: At_42deg_Heat_P Parameter: Temperature (deg C) Value: 42 vs. 22
  misc_feature: MA Experiment 20000173 PARAMETER Experiment Name: At_42deg_Heat_P Parameter: Timepoint (hr) Value: 6
  misc_feature: MA Experiment 20000173 PARAMETER Experiment Name: At_42deg_Heat_P Parameter: Tissue Value: Aerial
  misc_feature: MA Experiment ID: 20000180 Result: Up-regulated in Transcription
  misc_feature: MA Experiment 20000180 PARAMETER Experiment Name: At_Germinating_Seeds_P Parameter: Age (hr) Value: 24 vs. 0
  misc_feature: MA Experiment 20000180 PARAMETER Experiment Name: At_Germinating_Seeds_P Parameter: Tissue Value: Germinating Seeds
  misc_feature: MA Experiment ID: 20000184 Result: Up-regulated in Transcription
  misc_feature: MA Experiment 20000184 PARAMETER Experiment Name: At_Shoots__P Parameter: Age (day) Value: 7
  misc_feature: MA Experiment 20000184 PARAMETER Experiment Name: At_Shoots__P Parameter: Tissue Value: Shoots vs. Whole Plant
  misc_feature: MA Experiment ID: 20000234 Result: Up-regulated in Transcription
  misc_feature: MA Experiment 20000234 PARAMETER Experiment Name: At_Siliques_P Parameter: Age (day) Value: 21
  misc_feature: MA Experiment 20000234 PARAMETER Experiment Name: At_Siliques_P Parameter: Organism Value: A. thaliana
  misc_feature: MA Experiment 20000234 PARAMETER Experiment Name: At_Siliques_P Parameter: Plant Line Value: WS
  misc_feature: MA Experiment 20000234 PARAMETER Experiment Name: At_Siliques_P Parameter: Tissue Value: Less Than 5mm Siliques vs. Whole Plant
  misc_feature: MA Experiment ID: 20000264 Result: Up-regulated in Transcription
  misc_feature: MA Experiment 20000264 PARAMETER Experiment Name: At_Open_Flower_P Parameter: Age (day) Value: 21
  misc_feature: MA Experiment 20000264 PARAMETER Experiment Name: At_Open_Flower_P Parameter: Plant Line Value: WS
  misc_feature: MA Experiment 20000264 PARAMETER Experiment Name: At_Open_Flower_P Parameter: Tissue Value: Open Flower vs. Whole Plant
  misc_feature: MA Experiment ID: 20000286 Result: Up-regulated in Transcription
  misc_feature: MA Experiment 20000286 PARAMETER Experiment Name: At_Open_Flower_P Parameter: Age (day) Value: 21
  misc_feature: MA Experiment 20000286 PARAMETER Experiment Name: At_Open_Flower_P Parameter: Plant Line Value: WS
  misc_feature: MA Experiment 20000286 PARAMETER Experiment Name: At_Open_Flower_P Parameter: Tissue Value: Half Open vs. Whole Plant
  misc_feature: MA Experiment ID: 20000436 Result: Up-regulated in Transcription
  misc_feature: MA Experiment 20000436 PARAMETER Experiment Name: At_Drought_P Parameter: Age (day) Value: 7
  misc_feature: MA Experiment 20000436 PARAMETER Experiment Name: At_Drought_P Parameter: Organism Value: A. thaliana
  misc_feature: MA Experiment 20000436 PARAMETER Experiment Name: At_Drought_P Parameter: Plant Line Value: WS
  misc_feature: MA Experiment 20000436 PARAMETER Experiment Name: At_Drought_P Parameter: Timepoint (hr) Value: 12
  misc_feature: MA Experiment 20000436 PARAMETER Experiment Name: At_Drought_P Parameter: Tissue Value: Whole Plant
  misc_feature: MA Experiment 20000436 PARAMETER Experiment Name: At_Drought_P Parameter: Treatment Value: Drought vs. No Drought
  misc_feature: MA Experiment ID: 20000437 Result: Up-regulated in Transcription
  misc_feature: MA Experiment 20000437 PARAMETER Experiment Name: At_Drought_P Parameter: Age (day) Value: 8
  misc_feature: MA Experiment 20000437 PARAMETER Experiment Name: At_Drought_P Parameter: Organism Value: A. thaliana
  misc_feature: MA Experiment 20000437 PARAMETER Experiment Name: At_Drought_P Parameter: Plant Line Value: WS
  misc_feature: MA Experiment 20000437 PARAMETER Experiment Name: At_Drought_P Parameter: Timepoint (hr) Value: 24
  misc_feature: MA Experiment 20000437 PARAMETER Experiment Name: At_Drought_P Parameter: Tissue Value: Whole Plant
  misc_feature: MA Experiment 20000437 PARAMETER Experiment Name: At_Drought_P Parameter: Treatment Value: Drought vs. No Drought
  misc_feature: MA Experiment ID: 20001557 Result: Up-regulated in Transcription
  misc_feature: MA Experiment 20001557 PARAMETER Experiment Name: At_Drought_Soil_Dry_P Parameter: Age (day) Value: 27
  misc_feature: MA Experiment 20001557 PARAMETER Experiment Name: At_Drought_Soil_Dry_P Parameter: Organism Value: A. thaliana
  misc_feature: MA Experiment 20001557 PARAMETER Experiment Name: At_Drought_Soil_Dry_P Parameter: Plant Line Value: WS
  misc_feature: MA Experiment 20001557 PARAMETER Experiment Name: At_Drought_Soil_Dry_P Parameter: Post Timepoint (hr) Value: 3
  misc_feature: MA Experiment 20001557 PARAMETER Experiment Name: At_Drought_Soil_Dry_P Parameter: Post-Treatment Value: Re-Water vs. No Drought
  misc_feature: MA Experiment 20001557 PARAMETER Experiment Name: At_Drought_Soil_Dry_P Parameter: Timepoint (day) Value: 13
  misc_feature: MA Experiment 20001557 PARAMETER Experiment Name: At_Drought_Soil_Dry_P Parameter: Treatment Value: Drought vs. No Drought
  misc_feature: MA Experiment ID: 20001558 Result: Up-regulated in Transcription
  misc_feature: MA Experiment 20001558 PARAMETER Experiment Name: At_Drought_Soil_Dry_P Parameter: Age (day) Value: 27
  misc_feature: MA Experiment 20001558 PARAMETER Experiment Name: At_Drought_Soil_Dry_P Parameter: Organism Value: A. thaliana
  misc_feature: MA Experiment 20001558 PARAMETER Experiment Name: At_Drought_Soil_Dry_P Parameter: Plant Line Value: WS
  misc_feature: MA Experiment 20001558 PARAMETER Experiment Name: At_Drought_Soil_Dry_P Parameter: Post Timepoint (hr) Value: 6
  misc_feature: MA Experiment 20001558 PARAMETER Experiment Name: At_Drought_Soil_Dry_P Parameter: Post-Treatment Value: Re-Water vs. No Drought
  misc_feature: MA Experiment 20001558 PARAMETER Experiment Name: At_Drought_Soil_Dry_P Parameter: Timepoint (day) Value: 13
  misc_feature: MA Experiment 20001558 PARAMETER Experiment Name: At_Drought_Soil_Dry_P Parameter: Treatment Value: Drought vs. No Drought
  misc_feature: MA Experiment ID: 20001906 Result: Down-regulated in Transcription
  misc_feature: MA Experiment 20001906 PARAMETER Experiment Name: At_Drought_Reproduction_P Parameter: Age (day) Value: 35
  misc_feature: MA Experiment 20001906 PARAMETER Experiment Name: At_Drought_Reproduction_P Parameter: Organism Value: A. thaliana
  misc_feature: MA Experiment 20001906 PARAMETER Experiment Name: At_Drought_Reproduction_P Parameter: Plant Line Value: WS
  misc_feature: MA Experiment 20001906 PARAMETER Experiment Name: At_Drought_Reproduction_P Parameter: Timepoint (day) Value: 5
  misc_feature: MA Experiment 20001906 PARAMETER Experiment Name: At_Drought_Reproduction_P Parameter: Tissue Value: Siliques
  misc_feature: MA Experiment 20001906 PARAMETER Experiment Name: At_Drought_Reproduction_P Parameter: Treatment Value: Drought vs. No Drought
  misc_feature: MA Experiment ID: 20001908 Result: Down-regulated in Transcription
  misc_feature: MA Experiment 20001908 PARAMETER Experiment Name: At_Drought_Reproduction_P Parameter: Age (day) Value: 40
  misc_feature: MA Experiment 20001908 PARAMETER Experiment Name: At_Drought_Reproduction_P Parameter: Organism Value: A. thaliana
  misc_feature: MA Experiment 20001908 PARAMETER Experiment Name: At_Drought_Reproduction_P Parameter: Plant Line Value: WS
  misc_feature: MA Experiment 20001908 PARAMETER Experiment Name: At_Drought_Reproduction_P Parameter: Timepoint (day) Value: 10
  misc_feature: MA Experiment 20001908 PARAMETER Experiment Name: At_Drought_Reproduction_P Parameter: Tissue Value: Siliques
  misc_feature: MA Experiment 20001908 PARAMETER Experiment Name: At_Drought_Reproduction_P Parameter: Treatment Value: Drought vs. No Drought
  misc_feature: MA Experiment ID: 20001911 Result: Down-regulated in Transcription
  misc_feature: MA Experiment 20001911 PARAMETER Experiment Name: At_Drought_Reproduction_P Parameter: Age (day) Value: 40
  misc_feature: MA Experiment 20001911 PARAMETER Experiment Name: At_Drought_Reproduction_P Parameter: Organism Value: A. thaliana
  misc_feature: MA Experiment 20001911 PARAMETER Experiment Name: At_Drought_Reproduction_P Parameter: Plant Line Value: WS
  misc_feature: MA Experiment 20001911 PARAMETER Experiment Name: At_Drought_Reproduction_P Parameter: Timepoint (day) Value: 10
  misc_feature: MA Experiment 20001911 PARAMETER Experiment Name: At_Drought_Reproduction_P Parameter: Tissue Value: Flowers
  misc_feature: MA Experiment 20001911 PARAMETER Experiment Name: At_Drought_Reproduction_P Parameter: Treatment Value: Drought vs. No Drought
  misc_feature: Phenotype: SENESCENCE TIME Senescence Time-Late Senescence
  misc_feature: Phenotype: SENESCENCE TIME Senescence Time-Late Senescence
  misc_feature: Phenotype: SENESCENCE TIME Senescence Time-Late Senescence
gtaaatcaaaagagaactaaaccaagaaacaaaatgggatacgaaaggctcggaccatccggagcaactggttcggtcaccacctccactactacagctccaatccttaaccaagtctccacgtcagaacaaccggagaacaacaaccgaagaagcaaaaagaagcttgtagtatcatctatcgtcttagccatctcacttatcctcgccgccgcgatcttcgccggagtcagatcacgtctcaagttaaaccaatcagtcccaggcctagctcgtaaaccgagtcaagcaatctctaaagcttgtgagttaactcgtttccccgagttatgcgttgactcactcatggactttcccggctcactcgccgcttcctcctctaaagatctcatccacgtgactgtgaacatgacgctccaccacttcagccacgctctctactcgtctgcttccctctccttcgtcgacatgccgccacgtgctcgctcagcttacgactcttgcgtcgagctacttgacgattccgttgacgcgctatcacgcgctctttcctccgtcgtatcctcctccgctaagccgcaagatgttacaacgtggcttagcgcggctttaacaaaccatgacacgtgtactgaaggattcgacggcgtcgacgacggtggagtgaaggatcatatgacggcggcgttacagaatctttctgagcttgttagtaactgtcttgctatattctcggcgagtcacgacggtgacgatttcgccggagttccaatacagaacaggaggctgctgggagtggaggaacgagaagagaaattcccgagatggatgagaccaaaagaacgcgagatactggaaatgccggtatctcagatacaagctgatattatcgtatcgaaagacggtaacggcacgtgcaaaactatatcggaagctatcaagaaagctcctcagaacagtactcgccggataattatctacgtcaaggccggaagatatgaagagaacaacctcaaggtcggtaggaaaaaaattaatttgatgttcgttggagatggcaagggtaaaactgttatttcgggaggcaaaagtatatttgacaacatcactactttccacacggcgtcatttgctgcgaccggagctggatttattgcaagggacatcacattcgaaaactgggccggtccagcgaagcaccaagccgtggctctccgcatcggagctgaccacgcagtgatctaccgatgcaatataatcggttaccaagacacactctacgtccattcaaaccgccaattctttcgtgaatgcgatatctacggtacagtcgattttatctttggtaacgcagccgtcgtactacaaaactgtagcatctacgcacggaagccaatggattttcagaaaaatacaatcacggctcaaaacagaaaagatccgaaccaaaacaccggaatatcaatacatgcgtctagggttcttgcagcatccgatctccaagcgacaaacggtagtacacagacgtatctaggccgaccttggaagctattctctaggacagtgtatatgatgtcgtatatcggtggtcatgtacacacgagaggttggctcgagtggaacacaacatttgctttagatactttgtattacggagagtatttgaacagtggacctgggtcgggtctcgggcaacgtgtgagctggccgggttatcgggtcatcaattcgacggccgaggcaaaccggttcactgtggcagaatttatatacggttcctcgtggttgccatcgaccggagtttcgttcttggccggattaagcatataggtagagaaaaaattgaaatgcttatttttccgatgaattgtttcattcttacggtccttatattaatggacatatcagtattccaatatatatgagtatattttaactttaattgtaatgtctccactctccagaggtattattcaataatagatgaacactcgaggataattttcccttgttttcttg

SEQ ID NO: 38612 - protein, 609 aa, Arabidopsis thaliana
  peptide (1)..(609): Ceres Seq. ID no. 12328729
  misc_feature (295)..(594): Pfam Name: Pectinesterase Pfam Description: Pectinesterase
  misc_feature (53)..(607): Homolog of NCBI NO: 6689892 NR Description: pectin methyl esterase [Solanum tuberosum]
  misc_feature (356)..(608): Homolog of NCBI NO: 38566730 NR Description: pectin methylesterase [Cicer arietinum]
  misc_feature (97)..(608): Homolog of NCBI NO: 34393863 NR Description: putative pectinesterase [Oryza sativa (japonica
  misc_feature (48)..(607): Homolog of NCBI NO: 29602797 NR Description: pectin methyl-esterase [Nicotiana benthamiana]
  misc_feature (48)..(607): Homolog of NCBI NO: 8671350 NR Description: pectin methylesterase [Nicotiana tabacum]
  misc_feature (40)..(607): Homolog of NCBI NO: 6174912 NR Description: Pectinesterase 1.1 precursor (Pectin
  misc_feature (40)..(607): Homolog of NCBI NO: 2098711 NR Description: pectinesterase [Citrus sinensis]
  misc_feature (48)..(221): Homolog of NCBI NO: 34904380 NR Description: unnamed protein product [Oryza sativa (japonica
  misc_feature (195)..(609): Homolog of NCBI NO: 34904380 NR Description: unnamed protein product [Oryza sativa (japonica
  misc_feature (12)..(608): Homolog of NCBI NO: 15238729 NR Description: pectinesterase
VNQKRTKPRNKMGYERLGPSGATGSVTTSTTTAPILNQVSTSEQPENNNRRSKKKLVVSSIVLAISLILAAAIFAGVRSRLKLNQSVPGLARKPSQAISKACELTRFPELCVDSLMDFPGSLAASSSKDLIHVTVNMTLHHFSHALYSSASLSFVDMPPRARSAYDSCVELLDDSVDALSRALSSVVSSSAKPQDVTTWLSAALTNHDTCTEGFDGVDDGGVKDHMTAALQNLSELVSNCLAIFSASHDGDDFAGVPIQNRRLLGVEEREEKFPRWMRPKEREILEMPVSQIQADIIVSKDGNGTCKTISEAIKKAPQNSTRRIIIYVKAGRYEENNLKVGRKKINLMFVGDGKGKTVISGGKSIFDNITTFHTASFAATGAGFIARDITFENWAGPAKHQAVALRIGADHAVIYRCNIIGYQDTLYVHSNRQFFRECDIYGTVDFIFGNAAVVLQNCSIYARKPMDFQKNTITAQNRKDPNQNTGISIHASRVLAASDLQATNGSTQTYLGRPWKLFSRTVYMMSYIGGHVHTRGWLEWNTTFALDTLYYGEYLNSGPGSGLGQRVSWPGYRVINSTAEANRFTVAEFIYGSSWLPSTGVSFLAGLSI

SEQ ID NO: 38613 - protein, 598 aa, Arabidopsis thaliana; identical to SEQ ID NO: 27422
  peptide (1)..(598): Ceres Seq. ID no. 12328730
  misc_feature (284)..(583): Pfam Name: Pectinesterase Pfam Description: Pectinesterase
  misc_feature (42)..(596): Homolog of NCBI NO: 6689892 NR Description: pectin methyl esterase [Solanum tuberosum]
  misc_feature (345)..(597): Homolog of NCBI NO: 38566730 NR Description: pectin methylesterase [Cicer arietinum]
  misc_feature (86)..(597): Homolog of NCBI NO: 34393863 NR Description: putative pectinesterase [Oryza sativa (japonica
  misc_feature (37)..(596): Homolog of NCBI NO: 29602797 NR Description: pectin methyl-esterase [Nicotiana benthamiana]
  misc_feature (37)..(596): Homolog of NCBI NO: 8671350 NR Description: pectin methylesterase [Nicotiana tabacum]
  misc_feature (29)..(596): Homolog of NCBI NO: 6174912 NR Description: Pectinesterase 1.1 precursor (Pectin
  misc_feature (29)..(596): Homolog of NCBI NO: 2098711 NR Description: pectinesterase [Citrus sinensis]
  misc_feature (37)..(210): Homolog of NCBI NO: 34904380 NR Description: unnamed protein product [Oryza sativa (japonica
  misc_feature (184)..(598): Homolog of NCBI NO: 34904380 NR Description: unnamed protein product [Oryza sativa (japonica
  misc_feature (1)..(597): Homolog of NCBI NO: 15238729 NR Description: pectinesterase

SEQ ID NO: 38614 - protein, 494 aa, Arabidopsis thaliana; identical to SEQ ID NO: 27423
  peptide (1)..(494): Ceres Seq. ID no. 12328731
  misc_feature (180)..(479): Pfam Name: Pectinesterase Pfam Description: Pectinesterase
  misc_feature (1)..(492): Homolog of NCBI NO: 6689892 NR Description: pectin methyl esterase [Solanum tuberosum]
  misc_feature (241)..(493): Homolog of NCBI NO: 38566730 NR Description: pectin methylesterase [Cicer arietinum]
  misc_feature (1)..(493): Homolog of NCBI NO: 34393863 NR Description: putative pectinesterase [Oryza sativa (japonica
  misc_feature (1)..(492): Homolog of NCBI NO: 29602797 NR Description: pectin methyl-esterase [Nicotiana benthamiana]
  misc_feature (1)..(492): Homolog of NCBI NO: 8671350 NR Description: pectin methylesterase [Nicotiana tabacum]
  misc_feature (1)..(492): Homolog of NCBI NO: 6174912 NR Description: Pectinesterase 1.1 precursor (Pectin
  misc_feature (1)..(492): Homolog of NCBI NO: 2098711 NR Description: pectinesterase [Citrus sinensis]
  misc_feature (1)..(106): Homolog of NCBI NO: 34904380 NR Description: unnamed protein product [Oryza sativa (japonica
  misc_feature (80)..(494): Homolog of NCBI NO: 34904380 NR Description: unnamed protein product [Oryza sativa (japonica
  misc_feature (1)..(493): Homolog of NCBI NO: 15238729 NR Description: pectinesterase

SEQ ID NO: 38615 - DNA, 1499 bp, Arabidopsis thaliana
  misc_feature (1)..(1499): Ceres Seq. ID no. 12394512
  misc_feature: MA Experiment ID: 20000173 Result: Down-regulated in Transcription
  misc_feature: MA Experiment 20000173 PARAMETER Experiment Name: At_42deg_Heat_P Parameter: Age (day) Value: 14
  misc_feature: MA Experiment 20000173 PARAMETER Experiment Name: At_42deg_Heat_P Parameter: Organism Value: A. thaliana
  misc_feature: MA Experiment 20000173 PARAMETER Experiment Name: At_42deg_Heat_P Parameter: Plant Line Value: WS
  misc_feature: MA Experiment 20000173 PARAMETER Experiment Name: At_42deg_Heat_P Parameter: Temperature (deg C) Value: 42 vs. 22
  misc_feature: MA Experiment 20000173 PARAMETER Experiment Name: At_42deg_Heat_P Parameter: Timepoint (hr) Value: 6
  misc_feature: MA Experiment 20000173 PARAMETER Experiment Name: At_42deg_Heat_P Parameter: Tissue Value: Aerial
  misc_feature: MA Experiment ID: 20000184 Result: Down-regulated in Transcription
  misc_feature: MA Experiment 20000184 PARAMETER Experiment Name: At_Shoots__P Parameter: Age (day) Value: 7
  misc_feature: MA Experiment 20000184 PARAMETER Experiment Name: At_Shoots__P Parameter: Tissue Value: Shoots vs. Whole Plant
  misc_feature: MA Experiment ID: 20000227 Result: Up-regulated in Transcription
  misc_feature: MA Experiment 20000227 PARAMETER Experiment Name: At_Root-Tips-vs-Tops_P Parameter: Tissue Value: Root Tips vs. Root Tops
  misc_feature: MA Experiment ID: 20000234 Result: Up-regulated in Transcription
  misc_feature: MA Experiment 20000234 PARAMETER Experiment Name: At_Siliques_P Parameter: Age (day) Value: 21
  misc_feature: MA Experiment 20000234 PARAMETER Experiment Name: At_Siliques_P Parameter: Organism Value: A. thaliana
  misc_feature: MA Experiment 20000234 PARAMETER Experiment Name: At_Siliques_P Parameter: Plant Line Value: WS
  misc_feature: MA Experiment 20000234 PARAMETER Experiment Name: At_Siliques_P Parameter: Tissue Value: Less Than 5mm Siliques vs. Whole Plant
  misc_feature: MA Experiment ID: 20000235 Result: Up-regulated in Transcription
  misc_feature: MA Experiment 20000235 PARAMETER Experiment Name: At_Siliques_P Parameter: Age (day) Value: 21
  misc_feature: MA Experiment 20000235 PARAMETER Experiment Name: At_Siliques_P Parameter: Organism Value: A. thaliana
  misc_feature: MA Experiment 20000235 PARAMETER Experiment Name: At_Siliques_P Parameter: Plant Line Value: WS
  misc_feature: MA Experiment 20000235 PARAMETER Experiment Name: At_Siliques_P Parameter: Tissue Value: 5-10mm Siliques vs. Whole Plant
  misc_feature: MA Experiment ID: 20000264 Result: Up-regulated in Transcription
  misc_feature: MA Experiment 20000264 PARAMETER Experiment Name: At_Open_Flower_P Parameter: Age (day) Value: 21
  misc_feature: MA Experiment 20000264 PARAMETER Experiment Name: At_Open_Flower_P Parameter: Plant Line Value: WS
  misc_feature: MA Experiment 20000264 PARAMETER Experiment Name: At_Open_Flower_P Parameter: Tissue Value: Open Flower vs. Whole Plant
  misc_feature: MA Experiment ID: 20000265 Result: Up-regulated in Transcription
  misc_feature: MA Experiment 20000265 PARAMETER Experiment Name: At_Open_Flower_P Parameter: Age (day) Value: 21
  misc_feature: MA Experiment 20000265 PARAMETER Experiment Name: At_Open_Flower_P Parameter: Plant Line Value: WS
  misc_feature: MA Experiment 20000265 PARAMETER Experiment Name: At_Open_Flower_P Parameter: Tissue Value: Closed Flower vs. Whole Plant
  misc_feature: MA Experiment ID: 20000438 Result: Down-regulated in Transcription
  misc_feature: MA Experiment 20000438 PARAMETER Experiment Name: At_Shoots__P Parameter: Age (day) Value: 14
  misc_feature: MA Experiment 20000438 PARAMETER Experiment Name: At_Shoots__P Parameter: Tissue Value: Shoots vs. Whole Plant
  misc_feature: MA Experiment ID: 20000495 Result: Up-regulated in Transcription
  misc_feature: MA Experiment 20000495 PARAMETER Experiment Name: At_Guard_Cells_P Parameter: Harvest Date Value: 8/2/2002
  misc_feature: MA Experiment 20000495 PARAMETER Experiment Name: At_Guard_Cells_P Parameter: Organism Value: A. thaliana
  misc_feature: MA Experiment 20000495 PARAMETER Experiment Name: At_Guard_Cells_P Parameter: Tissue Value: Guard Cells vs. Leaves
atttctcaattcccaagttctttatccaaattgttctgaaacatagagagaaacaatgggtgttacaggaggattagtcagaagcattttcttcaggaacaaatcatttggagctcatgactacaacaatggaagaggcaatctaggagagaagaaacgatggagctcggttagatcatacctttgcggagatgaatttaactctgttcgcgctgtgaatgattcagaatcgataaaggattctgaggctcttcttacaatgtctcagcaactgagttcagagttcggtatgccttttggttcggttatcgcaatcgaagattcagcttctgtgagacatttggaggatgaggactctggttccgttaagagctctgaggcacagtgactcaacctttactggaggagaaatcgaaaggactggattgttatctaaaagaagaagatgttgaagataaccaaagcgaagcaacagagacacacatacccaagaagcatcagactactccaatctccaagttgttcctcgaagaagacgctgcagtcataattcagtcagcattcaggagttacctggcaatacgccggagcaaagaagaagaggaaacatttgctaaggaggagagcttctcaggagaggaatctcaagacaatgcatccatggggacatcactagaagctcagacaggtaattccgtgaaagcaccatttttcaggagaaagcgagtatctgcgaatcgaagaacactacagaagaacaacactcaagttctgaggataaaggaagactgggatgatagtacagtgagcagcaccatatcaaaatcaaggattcaaagcagagtcgaagcaatgacaaaacgggagagagcacttgcgtatgcattttcacagcagctaagaatttgctcaaagaagaaacaaatagatcgtagcagtgaagatgattccaatatcggttggagttggttagaacgctggatggcaacccgtgtaccagacagcattccaattgaaccaagaacagatgttgcaacgaaaaatcaaagcttgataagaaagaatagagcttttggtacagctggcgagttggagagctgtgcttccaacgacctacctctccattttgaaagcatatcagagacacaaggagatgcaactacagttttgcagaccgaaaaaagtagttttaaaccaagtatatctaagcgtaaatctgttccaagctacaaaagccagagaaagcatcacaagcttcaggccaccaaaagtgatctgcaacaacaaacaaagaaagcaaagaaggccaaaaccacacccacaagctgcaaaacaggaaacgaatgcgaagaaacctcacataagctaaatagcagcacctaagataagcattacctgtaaatctttgcatttaaatcacaaaagtttgttctttcgaatcagataacaactttctgtaaattatttagggattcaaatcaaaccagtaatagtaaggg

SEQ ID NO: 38616 - protein, 240 aa, Arabidopsis thaliana
  peptide (1)..(240): Ceres Seq. ID no. 12394513
  misc_feature (1)..(240): Homolog of NCBI NO: 34903518 NR Description: P0001B06.11 [Oryza sativa (japonica
  misc_feature (1)..(135): Homolog of NCBI NO: 15225258 NR Description: putative SF16 protein {Helianthus annuus}
  misc_feature (1)..(115): Homolog of NCBI NO: 18414094 NR Description: putative protein
  misc_feature (1)..(238): Homolog of NCBI NO: 15231733 NR Description: putative protein; protein id: At3g59690.1
  misc_feature (1)..(212): Homolog of NCBI NO: 15982840 NR Description: AT5g03040/F15A17_70 [Arabidopsis thaliana]
  misc_feature (1)..(240): Homolog of NCBI NO: 15232741 NR Description: putative SF16 protein; protein id: At3g09710.1
  misc_feature (1)..(226): Homolog of NCBI NO: 15225299 NR Description: putative SF16 protein {Helianthus annuus}
  misc_feature (1)..(205): Homolog of NCBI NO: 15231175 NR Description: unknown protein; protein id: At3g52290.1
  misc_feature (1)..(240): Homolog of NCBI NO: 9758640 NR Description: gene_id:MXH1.1~pir||T00974~similar to unknown
  misc_feature (1)..(240): Homolog of NCBI NO: 18421483 NR Description: putative protein
MGTSLEAQTGNSVKAPFFRRKRVSANRRTLQKNNTQVLRIKEDWDDSTVSSTISKSRIQSRVEAMTKRERALAYAFSQQLRICSKKKQIDRSSEDDSNIGWSWLERWMATRVPDSIPIEPRTDVATKNQSLIRKNRAFGTAGELESCASNDLPLHFESISETQGDATTVLQTEKSSFKPSISKRKSVPSYKSQRKHHKLQATKSDLQQQTKKAKKAKTTPTSCKTGNECEETSHKLNSST

SEQ ID NO: 38617 - protein, 176 aa, Arabidopsis thaliana
  peptide (1)..(176): Ceres Seq. ID no. 12394514
  misc_feature (1)..(176): Homolog of NCBI NO: 34903518 NR Description: P0001B06.11 [Oryza sativa (japonica
  misc_feature (1)..(71): Homolog of NCBI NO: 15225258 NR Description: putative SF16 protein {Helianthus annuus}
  misc_feature (1)..(51): Homolog of NCBI NO: 18414094 NR Description: putative protein
  misc_feature (1)..(174): Homolog of NCBI NO: 15231733 NR Description: putative protein; protein id: At3g59690.1
  misc_feature (1)..(148): Homolog of NCBI NO: 15982840 NR Description: AT5g03040/F15A17_70 [Arabidopsis thaliana]
  misc_feature (1)..(176): Homolog of NCBI NO: 15232741 NR Description: putative SF16 protein; protein id: At3g09710.1
  misc_feature (1)..(162): Homolog of NCBI NO: 15225299 NR Description: putative SF16 protein {Helianthus annuus}
  misc_feature (1)..(141): Homolog of NCBI NO: 15231175 NR Description: unknown protein; protein id: At3g52290.1
  misc_feature (1)..(176): Homolog of NCBI NO: 9758640 NR Description: gene_id:MXH1.1~pir||T00974~similar to unknown
  misc_feature (1)..(176): Homolog of NCBI NO: 18421483 NR Description: putative protein
MTKRERALAYAFSQQLRICSKKKQIDRSSEDDSNIGWSWLERWMATRVPDSIPIEPRTDVATKNQSLIRKNRAFGTAGELESCASNDLPLHFESISETQGDATTVLQTEKSSFKPSISKRKSVPSYKSQRKHHKLQATKSDLQQQTKKAKKAKTTPTSCKTGNECEETSHKLNSST

SEQ ID NO: 38618 - protein, 133 aa, Arabidopsis thaliana
  peptide (1)..(133): Ceres Seq. ID no. 12394515
  misc_feature (1)..(91): Homolog of NCBI NO: 15233296 NR Description: unknown protein; protein id: At3g22190.1
  misc_feature (1)..(133): Homolog of NCBI NO: 34903518 NR Description: P0001B06.11 [Oryza sativa (japonica
  misc_feature (1)..(28): Homolog of NCBI NO: 15225258 NR Description: putative SF16 protein {Helianthus annuus}
  misc_feature (1)..(131): Homolog of NCBI NO: 15231733 NR Description: putative protein; protein id: At3g59690.1
  misc_feature (1)..(105): Homolog of NCBI NO: 15982840 NR Description: AT5g03040/F15A17_70 [Arabidopsis thaliana]
  misc_feature (1)..(133): Homolog of NCBI NO: 15232741 NR Description: putative SF16 protein; protein id: At3g09710.1
  misc_feature (1)..(119): Homolog of NCBI NO: 15225299 NR Description: putative SF16 protein {Helianthus annuus}
  misc_feature (1)..(98): Homolog of NCBI NO: 15231175 NR Description: unknown protein; protein id: At3g52290.1
  misc_feature (1)..(133): Homolog of NCBI NO: 9758640 NR Description: gene_id:MXH1.1~pir||T00974~similar to unknown
  misc_feature (1)..(133): Homolog of NCBI NO: 18421483 NR Description: putative protein
MATRVPDSIPIEPRTDVATKNQSLIRKNRAFGTAGELESCASNDLPLHFESISETQGDATTVLQTEKSSFKPSISKRKSVPSYKSQRKHHKLQATKSDLQQQTKKAKKAKTTPTSCKTGNECEETSHKLNSST

SEQ ID NO: 38619 - DNA, 1699 bp, Arabidopsis thaliana
  misc_feature (1)..(1699): Ceres Seq. ID no. 13487978
  misc_feature: MA Experiment ID: 108434 Result: Down-regulated in Transcription
  misc_feature: MA Experiment 108434 PARAMETER Experiment Name: At_Root_Tips_cDNA_P Parameter: Tissue Value: Root Tips
  misc_feature: MA Experiment ID: 108462 Result: Up-regulated in Transcription
  misc_feature: MA Experiment 108462 PARAMETER Experiment Name: At_Germinating_Seeds_cDNA_P Parameter: Age (day) Value: 2 vs. 0
  misc_feature: MA Experiment 108462 PARAMETER Experiment Name: At_Germinating_Seeds_cDNA_P Parameter: Tissue Value: Germinating Seeds
  misc_feature: MA Experiment ID: 108463 Result: Up-regulated in Transcription
  misc_feature: MA Experiment 108463 PARAMETER Experiment Name: At_Germinating_Seeds_cDNA_P Parameter: Age (day) Value: 3 vs. 0
  misc_feature: MA Experiment 108463 PARAMETER Experiment Name: At_Germinating_Seeds_cDNA_P Parameter: Tissue Value: Germinating Seeds
  misc_feature: MA Experiment ID: 108464 Result: Up-regulated in Transcription
  misc_feature: MA Experiment 108464 PARAMETER Experiment Name: At_Germinating_Seeds_cDNA_P Parameter: Age (day) Value: 4 vs. 0
  misc_feature: MA Experiment 108464 PARAMETER Experiment Name: At_Germinating_Seeds_cDNA_P Parameter: Tissue Value: Germinating Seeds
  misc_feature: MA Experiment ID: 108473 Result: Up-regulated in Transcription
  misc_feature: MA Experiment 108473 PARAMETER Experiment Name: At_Drought_Flowers_cDNA_P Parameter: Timepoint (hr) Value: 7 d
  misc_feature: MA Experiment 108473 PARAMETER Experiment Name: At_Drought_Flowers_cDNA_P Parameter: Tissue Value: Flower
  misc_feature: MA Experiment 108473 PARAMETER Experiment Name: At_Drought_Flowers_cDNA_P Parameter: Treatment Value: Drought vs. No Drought
  misc_feature: MA Experiment ID: 108572 Result: Up-regulated in Transcription
  misc_feature: MA Experiment 108572 PARAMETER Experiment Name: At_Drought_cDNA_P Parameter: Timepoint (hr) Value: 1
  misc_feature: MA Experiment 108572 PARAMETER Experiment Name: At_Drought_cDNA_P Parameter: Tissue Value: Aerial
  misc_feature: MA Experiment 108572 PARAMETER Experiment Name: At_Drought_cDNA_P Parameter: Treatment Value: Drought vs. No Drought
  misc_feature: MA Experiment ID: 108573 Result: Up-regulated in Transcription
  misc_feature: MA Experiment 108573 PARAMETER Experiment Name: At_Drought_cDNA_P Parameter: Timepoint (hr) Value: 6
  misc_feature: MA Experiment 108573 PARAMETER Experiment Name: At_Drought_cDNA_P Parameter: Tissue Value: Aerial
  misc_feature: MA Experiment 108573 PARAMETER Experiment Name: At_Drought_cDNA_P Parameter: Treatment Value: Drought vs. No Drought
  misc_feature: MA Experiment ID: 20000071 Result: Up-regulated in Transcription
  misc_feature: MA Experiment 20000071 PARAMETER Experiment Name: At_100uM_ABA_Mutants_cDNA_P Parameter: Plant Line Value: CS8104
  misc_feature: MA Experiment 20000071 PARAMETER Experiment Name: At_100uM_ABA_Mutants_cDNA_P Parameter: Timepoint (hr) Value: 6
  misc_feature: MA Experiment 20000071 PARAMETER Experiment Name: At_100uM_ABA_Mutants_cDNA_P Parameter: Tissue Value: Aerial
  misc_feature: MA Experiment 20000071 PARAMETER Experiment Name: At_100uM_ABA_Mutants_cDNA_P Parameter: Treatment Value: 100uM ABA vs. No Treatment
  misc_feature: MA Experiment ID: 20000093 Result: Up-regulated in Transcription
  misc_feature: MA Experiment 20000093 PARAMETER Experiment Name: At_42deg_Heat_cDNA_P Parameter: Temperature (deg C) Value: 42 vs. 22
  misc_feature: MA Experiment 20000093 PARAMETER Experiment Name: At_42deg_Heat_cDNA_P Parameter: Timepoint (hr) Value: 0.5
  misc_feature: MA Experiment 20000093 PARAMETER Experiment Name: At_42deg_Heat_cDNA_P Parameter: Tissue Value: Aerial
  misc_feature: MA Experiment ID: 20000113 Result: Up-regulated in Transcription
  misc_feature: MA Experiment 20000113 PARAMETER Experiment Name: At_42deg_Heat_cDNA_P Parameter: Temperature (deg C) Value: 42 vs. 22
  misc_feature: MA Experiment 20000113 PARAMETER Experiment Name: At_42deg_Heat_cDNA_P Parameter: Timepoint (hr) Value: 8
  misc_feature: MA Experiment 20000113 PARAMETER Experiment Name: At_42deg_Heat_cDNA_P Parameter: Tissue Value: Aerial
  misc_feature: MA Experiment ID: 20000117 Result: Up-regulated in Transcription
  misc_feature: MA Experiment 20000117 PARAMETER Experiment Name: At_100uM_ABA_Mutants_cDNA_P Parameter: Plant Line Value: Columbia
  misc_feature: MA Experiment 20000117 PARAMETER Experiment Name: At_100uM_ABA_Mutants_cDNA_P Parameter: Timepoint (hr) Value: 6
  misc_feature: MA Experiment 20000117 PARAMETER Experiment Name: At_100uM_ABA_Mutants_cDNA_P Parameter: Tissue Value: Aerial
  misc_feature: MA Experiment 20000117 PARAMETER Experiment Name: At_100uM_ABA_Mutants_cDNA_P Parameter: Treatment Value: 100uM ABA vs. No Treatment
  misc_feature: MA Experiment ID: 20000144 Result: Up-regulated in Transcription
  misc_feature: MA Experiment 20000144 PARAMETER Experiment Name: At_42deg_Heat_cDNA_P Parameter: Temperature (deg C) Value: 42 vs. 22
  misc_feature: MA Experiment 20000144 PARAMETER Experiment Name: At_42deg_Heat_cDNA_P Parameter: Timepoint (hr) Value: 1
  misc_feature: MA Experiment 20000144 PARAMETER Experiment Name: At_42deg_Heat_cDNA_P Parameter: Tissue Value: Aerial
  misc_feature: MA Experiment ID: 20000224 Result: Down-regulated in Transcription
  misc_feature: MA Experiment ID: 20000307 Result: Up-regulated in Transcription
  misc_feature: MA Experiment 20000307 PARAMETER Experiment Name: At_Germinating_Seeds_Sub_P Parameter: Age (hr) Value: 24 vs. 0
  misc_feature: MA Experiment 20000307 PARAMETER Experiment Name: At_Germinating_Seeds_Sub_P Parameter: Organism Value: A. thaliana
  misc_feature: MA Experiment 20000307 PARAMETER Experiment Name: At_Germinating_Seeds_Sub_P Parameter: Plant Line Value: WS
  misc_feature: MA Experiment 20000307 PARAMETER Experiment Name: At_Germinating_Seeds_Sub_P Parameter: Tissue Value: Germinating Seeds
  misc_feature: MA Experiment ID: 20000314 Result: Down-regulated in Transcription
  misc_feature: MA Experiment 20000314 PARAMETER Experiment Name: At_14day_Shoots-Roots_Sub_P Parameter: Age (day) Value: 14
  misc_feature: MA Experiment 20000314 PARAMETER Experiment Name: At_14day_Shoots-Roots_Sub_P Parameter: Organism Value: A. thaliana
  misc_feature: MA Experiment 20000314 PARAMETER Experiment Name: At_14day_Shoots-Roots_Sub_P Parameter: Plant Line Value: WS
  misc_feature: MA Experiment 20000314 PARAMETER Experiment Name: At_14day_Shoots-Roots_Sub_P Parameter: Tissue Value: Roots vs. Whole Plant
  misc_feature: MA Experiment ID: 20000327 Result: Up-regulated in Transcription
  misc_feature: MA Experiment 20000327 PARAMETER Experiment Name: At_42deg_Heat_Sub_P Parameter: Age (day) Value: 14
  misc_feature: MA Experiment 20000327 PARAMETER Experiment Name: At_42deg_Heat_Sub_P Parameter: Organism Value: A. thaliana
  misc_feature: MA Experiment 20000327 PARAMETER Experiment Name: At_42deg_Heat_Sub_P Parameter: Plant Line Value: WS
  misc_feature: MA Experiment 20000327 PARAMETER Experiment Name: At_42deg_Heat_Sub_P Parameter: Temperature (deg C) Value: 42 vs. 22
  misc_feature: MA Experiment 20000327 PARAMETER Experiment Name: At_42deg_Heat_Sub_P Parameter: Timepoint (hr) Value: 1
  misc_feature: MA Experiment 20000327 PARAMETER Experiment Name: At_42deg_Heat_Sub_P Parameter: Tissue Value: Aerial
  misc_feature: MA Experiment ID: 20000355 Result: Down-regulated in Transcription
  misc_feature: MA Experiment 20000355 PARAMETER Experiment Name: At_Siliques_Sub_P Parameter: Age (day) Value: 21
  misc_feature: MA Experiment 20000355 PARAMETER Experiment Name: At_Siliques_Sub_P Parameter: Organism Value: A. thaliana
  misc_feature: MA Experiment 20000355 PARAMETER Experiment Name: At_Siliques_Sub_P Parameter: Plant Line Value: WS
  misc_feature: MA Experiment 20000355 PARAMETER Experiment Name: At_Siliques_Sub_P Parameter: Tissue Value: Less Than 5mm Siliques vs. Whole Plant
  misc_feature: MA Experiment ID: 20000440 Result: Down-regulated in Transcription
  misc_feature: MA Experiment 20000440 PARAMETER Experiment Name: At_Closed-Flower__Sub_P Parameter: Tissue Value: Closed Flower vs. Whole Plant
gccgaaccaatcaccctaaggggacacttaaagagagaaacaaatccttcttctaaaatattcttcaatcttcttctcgaagcttctccaaaaatggcgattacttcttctagaaccaccagatcaaacggatctgcttcgctccgatccaaatcaccgtccggtcgattctgtggcgtttactcaaaccgtatgccgtcatcatctccgtcgtcgtcaggtttcgcttcttccacaagctcaagtttctcctcaccgtctacagcgtttttcagcagccacaatcagaacaaccaccaccaacacagatctgcttctccgacgcgtgtgaatctattcacatcagctccgatgacgcaatcgtttcgttactcaatcgataacagatctatatcaccgaatcgatccatcgctgtttcttccaacaaacctagcaatcatcacaagattccggattcgaggagaagatgtatgtgctctccgacaacgcatcctggttcattccggtgtagtctacacaagaacgtcgcgaatccacatggtcaaggtacagcttcgtatacaacgaatggattgaatatgcgtcgatctgcgatgacgaattctcttgtgagaattggtggtgttgaaggtgaatgggtgcgaagagctttgactactttgattagaccatcttcacatcaactaaagagaagatctgcttatgagcctcgtcgtagtagactcgcatctatgtcgaaagcagaagatctttgaatctctcttcaggtttgttcttgtttttgatatactcagatctgccatgaacgagttgaatcaaggagcagaatcggagctgagtcataccggaccgagtcaaattcggagctgagttataccggaccgagttatgtaaaacggtgactaagacgacaccgtttttgttttgttgggtgggagatgagatgatgatgatgcattgtacatacacatattgcttattgaagcagaacaaaaaaatttcgcaagtcgaaagtatctagaaatctaaaaatggaaaatagtagtgacgaattgggtaattaaaatctggaaaaggacttagtagtaaatattgtttggattcaactttgcaaatctctccatctccattgttcgttgccttcaccgttagtttgttccgtcaagtcaacgttctctattctccgtcgttgacccgttctgtttgccgttaaccgtcgtcgtgtgttatgtgtgttccgttattatttctccaggtatgtgttgttcgtcgtgtcaggtatgtattttccgtttcttatttatttggttaatttcgttttactttttttgtgcacgtttgatctgtttttttttttttggtttgtctttttcaggtttcgtacaatgaggagaagatgattacttaaccgttacgttcaactttggaatattttgggtttgtggactttggaagaaaaatgaatttggactatgagaaaaatcaaatatatgacctaaaacacggagaatttgataaaggacgatcgaatatgagtgattttgattcgtggaacgattaaggttttggttttggagctggagaatgtgaaagattcgaaggaatcagatttttctctggaatttgtgaatcacagatttagattcctgaaacggttgaggttaaagtgaaaagattcaatgaaatcatatttttacc

SEQ ID NO: 38620 - protein, 251 aa, Arabidopsis thaliana
  peptide (1)..(251): Ceres Seq. ID no. 13487979
  misc_feature (79)..(241): Homolog of NCBI NO: 15241329 NR Description: hypothetical protein [Arabidopsis thaliana]
  misc_feature (32)..(251): Homolog of NCBI NO: 24461857 NR Description: CTV.15 [Poncirus trifoliata]
  misc_feature (32)..(250): Homolog of NCBI NO: 15238947 NR Description: expressed protein [Arabidopsis thaliana]
  misc_feature (32)..(251): Homolog of NCBI NO: 21618161 NR Description: serine-rich protein [Arabidopsis thaliana]
  misc_feature (32)..(251): Homolog of NCBI NO: 15238753 NR Description: serine-rich protein [Arabidopsis thaliana]
AEPITLRGHLKRETNPSSKIFFNLLLEASPKMAITSSRTTRSNGSASLRSKSPSGRFCGVYSNRMPSSSPSSSGFASSTSSSFSSPSTAFFSSHNQNNHHQHRSASPTRVNLFTSAPMTQSFRYSIDNRSISPNRSIAVSSNKPSNHHKIPDSRRRCMCSPTTHPGSFRCSLHKNVANPHGQGTASYTTNGLNMRRSAMTNSLVRIGGVEGEWVRRALTTLIRPSSHQLKRRSAYEPRRSRLASMSKAEDL

SEQ ID NO: 38621 - protein, 220 aa, Arabidopsis thaliana
  peptide (1)..(220): Ceres Seq. ID no. 13487980
  misc_feature (48)..(210): Homolog of NCBI NO: 15241329 NR Description: hypothetical protein [Arabidopsis thaliana]
  misc_feature (1)..(220): Homolog of NCBI NO: 24461857 NR Description: CTV.15 [Poncirus trifoliata]
  misc_feature (1)..(219): Homolog of NCBI NO: 15238947 NR Description: expressed protein [Arabidopsis thaliana]
  misc_feature (1)..(220): Homolog of NCBI NO: 21618161 NR Description: serine-rich protein [Arabidopsis thaliana]
  misc_feature (1)..(220): Homolog of NCBI NO: 15238753 NR Description: serine-rich protein [Arabidopsis thaliana]
MAITSSRTTRSNGSASLRSKSPSGRFCGVYSNRMPSSSPSSSGFASSTSSSFSSPSTAFFSSHNQNNHHQHRSASPTRVNLFTSAPMTQSFRYSIDNRSISPNRSIAVSSNKPSNHHKIPDSRRRCMCSPTTHPGSFRCSLHKNVANPHGQGTASYTTNGLNMRRSAMTNSLVRIGGVEGEWVRRALTTLIRPSSHQLKRRSAYEPRRSRLASMSKAEDL

SEQ ID NO: 38622 - protein, 187 aa, Arabidopsis thaliana
  peptide (1)..(187): Ceres Seq. ID no. 13487981
  misc_feature (15)..(177): Homolog of NCBI NO: 15241329 NR Description: hypothetical protein [Arabidopsis thaliana]
  misc_feature (1)..(187): Homolog of NCBI NO: 24461857 NR Description: CTV.15 [Poncirus trifoliata]
  misc_feature (1)..(186): Homolog of NCBI NO: 15238947 NR Description: expressed protein [Arabidopsis thaliana]
  misc_feature (1)..(187): Homolog of NCBI NO: 21618161 NR Description: serine-rich protein [Arabidopsis thaliana]
  misc_feature (1)..(187): Homolog of NCBI NO: 15238753 NR Description: serine-rich protein [Arabidopsis thaliana]
MPSSSPSSSGFASSTSSSFSSPSTAFFSSHNQNNHHQHRSASPTRVNLFTSAPMTQSFRYSIDNRSISPNRSIAVSSNKPSNHHKIPDSRRRCMCSPTTHPGSFRCSLHKNVANPHGQGTASYTTNGLNMRRSAMTNSLVRIGGVEGEWVRRALTTLIRPSSHQLKRRSAYEPRRSRLASMSKAEDL

SEQ ID NO: 38623 - DNA, 1376 bp, Arabidopsis thaliana; identical to SEQ ID NO: 37205
  misc_feature (1)..(1376): Ceres Seq. ID no. 13575567
  misc_feature: MA Experiment ID: 108434 Result: Down-regulated in Transcription
  misc_feature: MA Experiment 108434 PARAMETER Experiment Name: At_Root_Tips_cDNA_P Parameter: Tissue Value: Root Tips
  misc_feature: MA Experiment ID: 108576 Result: Up-regulated in Transcription
  misc_feature: MA Experiment 108576 PARAMETER Experiment Name: At_42deg_Heat_cDNA_P Parameter: Temperature (deg C) Value: 42 vs. 22
  misc_feature: MA Experiment 108576 PARAMETER Experiment Name: At_42deg_Heat_cDNA_P Parameter: Timepoint (hr) Value: 1
  misc_feature: MA Experiment 108576 PARAMETER Experiment Name: At_42deg_Heat_cDNA_P Parameter: Tissue Value: Aerial
  misc_feature: MA Experiment ID: 108577 Result: Up-regulated in Transcription
  misc_feature: MA Experiment 108577 PARAMETER Experiment Name: At_42deg_Heat_cDNA_P Parameter: Temperature (deg C) Value: 42 vs. 22
  misc_feature: MA Experiment 108577 PARAMETER Experiment Name: At_42deg_Heat_cDNA_P Parameter: Timepoint (hr) Value: 6
  misc_feature: MA Experiment 108577 PARAMETER Experiment Name: At_42deg_Heat_cDNA_P Parameter: Tissue Value: Aerial
  misc_feature: MA Experiment ID: 108595 Result: Down-regulated in Transcription
  misc_feature: MA Experiment 108595 PARAMETER Experiment Name: At_Ler-pi_Ovule_cDNA_P Parameter: Plant Line Value: null
  misc_feature: MA Experiment ID: 20000112 Result: Up-regulated in Transcription
  misc_feature: MA Experiment 20000112 PARAMETER Experiment Name: At_42deg_Heat_cDNA_P Parameter: Temperature (deg C) Value: 42 vs. 22
  misc_feature: MA Experiment 20000112 PARAMETER Experiment Name: At_42deg_Heat_cDNA_P Parameter: Timepoint (hr) Value: 2
  misc_feature: MA Experiment 20000112 PARAMETER Experiment Name: At_42deg_Heat_cDNA_P Parameter: Tissue Value: Aerial
  misc_feature: MA Experiment ID: 20000113 Result: Up-regulated in Transcription
  misc_feature: MA Experiment 20000113 PARAMETER Experiment Name: At_42deg_Heat_cDNA_P Parameter: Temperature (deg C) Value: 42 vs. 22
  misc_feature: MA Experiment 20000113 PARAMETER Experiment Name: At_42deg_Heat_cDNA_P Parameter: Timepoint (hr) Value: 8
  misc_feature: MA Experiment 20000113 PARAMETER Experiment Name: At_42deg_Heat_cDNA_P Parameter: Tissue Value: Aerial
  misc_feature: MA Experiment ID: 20000171 Result: Up-regulated in Transcription
  misc_feature: MA Experiment 20000171 PARAMETER Experiment Name: At_42deg_Heat_P Parameter: Age (day) Value: 14
  misc_feature: MA Experiment 20000171 PARAMETER Experiment Name: At_42deg_Heat_P Parameter: Organism Value: A. thaliana
  misc_feature: MA Experiment 20000171 PARAMETER Experiment Name: At_42deg_Heat_P Parameter: Plant Line Value: WS
  misc_feature: MA Experiment 20000171 PARAMETER Experiment Name: At_42deg_Heat_P Parameter: Temperature (deg C) Value: 42 vs. 22
  misc_feature: MA Experiment 20000171 PARAMETER Experiment Name: At_42deg_Heat_P Parameter: Timepoint (hr) Value: 1
  misc_feature: MA Experiment 20000171 PARAMETER Experiment Name: At_42deg_Heat_P Parameter: Tissue Value: Aerial
  misc_feature: MA Experiment ID: 20000173 Result: Up-regulated in Transcription
  misc_feature: MA Experiment 20000173 PARAMETER Experiment Name: At_42deg_Heat_P Parameter: Age (day) Value: 14
  misc_feature: MA Experiment 20000173 PARAMETER Experiment Name: At_42deg_Heat_P Parameter: Organism Value: A. thaliana
  misc_feature: MA Experiment 20000173 PARAMETER Experiment Name: At_42deg_Heat_P Parameter: Plant Line Value: WS
  misc_feature: MA Experiment 20000173 PARAMETER Experiment Name: At_42deg_Heat_P Parameter: Temperature (deg C) Value: 42 vs. 22
  misc_feature: MA Experiment 20000173 PARAMETER Experiment Name: At_42deg_Heat_P Parameter: Timepoint (hr) Value: 6
  misc_feature: MA Experiment 20000173 PARAMETER Experiment Name: At_42deg_Heat_P Parameter: Tissue Value: Aerial
  misc_feature: MA Experiment ID: 20000224 Result: Down-regulated in Transcription
  misc_feature: MA Experiment ID: 20000234 Result: Down-regulated in Transcription
  misc_feature: MA Experiment 20000234 PARAMETER Experiment Name: At_Siliques_P Parameter: Age (day) Value: 21
  misc_feature: MA Experiment 20000234 PARAMETER Experiment Name: At_Siliques_P Parameter: Organism Value: A. thaliana
  misc_feature: MA Experiment 20000234 PARAMETER Experiment Name: At_Siliques_P Parameter: Plant Line Value: WS
  misc_feature: MA Experiment 20000234 PARAMETER Experiment Name: At_Siliques_P Parameter: Tissue Value: Less Than 5mm Siliques vs. Whole Plant

SEQ ID NO: 38624 - protein, 309 aa, Arabidopsis thaliana; identical to SEQ ID NO: 37206
  peptide (1)..(309): Ceres Seq. ID no. 13575568
  misc_feature (13)..(231): Homolog of NCBI NO: 18424042 NR Description: SKP1 interacting partner 1 (SKIP1) [Arabidopsis
  misc_feature (11)..(231): Homolog of NCBI NO: 30692594 NR Description: predicted protein [Arabidopsis thaliana]
  misc_feature (1)..(231): Homolog of NCBI NO: 18412951 NR Description: F-box protein family, AtFBL22 [Arabidopsis
  misc_feature (12)..(222): Homolog of NCBI NO: 37718854 NR Description: hypothetical protein [Oryza sativa (japonica
  misc_feature (1)..(231): Homolog of NCBI NO: 18412953 NR Description: F-box protein family, AtFBL9/AtFBL23 [Arabidopsis
  misc_feature (4)..(63): Homolog of NCBI NO: 15234238 NR Description: F-box protein family [Arabidopsis thaliana]
  misc_feature (59)..(307): Homolog of NCBI NO: 15234238 NR Description: F-box protein family [Arabidopsis thaliana]
  misc_feature (111)..(309): Homolog of NCBI NO: 37535806 NR Description: putative Rhizobium-induced nodule development
  misc_feature (1)..(309): Homolog of NCBI NO: 21618163 NR Description: unknown [Arabidopsis thaliana]
  misc_feature (1)..(309): Homolog of NCBI NO: 15229043 NR Description: F-box protein family [Arabidopsis thaliana]
  misc_feature (13)..(231): Homolog of NCBI NO: 18424042 NR Description: SKP1 interacting partner 1 (SKIP1) [Arabidopsis
  misc_feature (11)..(231): Homolog of NCBI NO: 30692594 NR Description: predicted protein [Arabidopsis thaliana]
  misc_feature (1)..(231): Homolog of NCBI NO: 18412951 NR Description: F-box protein family, AtFBL22 [Arabidopsis
  misc_feature (12)..(222): Homolog of NCBI NO: 37718854 NR Description: hypothetical protein [Oryza sativa (japonica
  misc_feature (1)..(231): Homolog of NCBI NO: 18412953 NR Description: F-box protein family, AtFBL9/AtFBL23 [Arabidopsis
  misc_feature (4)..(63): Homolog of NCBI NO: 15234238 NR Description: F-box protein family [Arabidopsis thaliana]
  misc_feature (59)..(307): Homolog of NCBI NO: 15234238 NR Description: F-box protein family [Arabidopsis thaliana]
  misc_feature (111)..(309): Homolog of NCBI NO: 37535806 NR Description: putative Rhizobium-induced nodule development
  misc_feature (1)..(309): Homolog of NCBI NO: 21618163 NR Description: unknown [Arabidopsis thaliana]
  misc_feature (1)..(309): Homolog of NCBI NO: 15229043 NR Description: F-box protein family [Arabidopsis thaliana]

SEQ ID NO: 38625 - protein, 248 aa, Arabidopsis thaliana; identical to SEQ ID NO: 37207
  peptide (1)..(248): Ceres Seq. ID no. 13575569
  misc_feature (1)..(170): Homolog of NCBI NO: 18413178 NR Description: F-box protein family, AtFBW2 [Arabidopsis
  misc_feature (1)..(170): Homolog of NCBI NO: 18424042 NR Description: SKP1 interacting partner 1 (SKIP1) [Arabidopsis
  misc_feature (1)..(170): Homolog of NCBI NO: 30692594 NR Description: predicted protein [Arabidopsis thaliana]
  misc_feature (1)..(170): Homolog of NCBI NO: 18412951 NR Description: F-box protein family, AtFBL22 [Arabidopsis
  misc_feature (1)..(161): Homolog of NCBI NO: 37718854 NR Description: hypothetical protein [Oryza sativa (japonica
  misc_feature (1)..(170): Homolog of NCBI NO: 18412953 NR Description: F-box protein family, AtFBL9/AtFBL23 [Arabidopsis
  misc_feature (1)..(246): Homolog of NCBI NO: 15234238 NR Description: F-box protein family [Arabidopsis thaliana]
  misc_feature (50)..(248): Homolog of NCBI NO: 37535806 NR Description: putative Rhizobium-induced nodule development
  misc_feature (1)..(248): Homolog of NCBI NO: 21618163 NR Description: unknown [Arabidopsis thaliana]
  misc_feature (1)..(248): Homolog of NCBI NO: 15229043 NR Description: F-box protein family [Arabidopsis thaliana]
  misc_feature (1)..(170): Homolog of NCBI NO: 18413178 NR Description: F-box protein family, AtFBW2 [Arabidopsis
  misc_feature (1)..(170): Homolog of NCBI NO: 18424042 NR Description: SKP1 interacting partner 1 (SKIP1) [Arabidopsis
  misc_feature (1)..(170): Homolog of NCBI NO: 30692594 NR Description: predicted protein [Arabidopsis thaliana]
  misc_feature (1)..(170): Homolog of NCBI NO: 18412951 NR Description: F-box protein family, AtFBL22 [Arabidopsis
  misc_feature (1)..(161): Homolog of NCBI NO: 37718854 NR Description: hypothetical protein [Oryza sativa (japonica
  misc_feature (1)..(170): Homolog of NCBI NO: 18412953 NR Description: F-box protein family, AtFBL9/AtFBL23 [Arabidopsis
  misc_feature (1)..(246): Homolog of NCBI NO: 15234238 NR Description: F-box protein family [Arabidopsis thaliana]
  misc_feature (50)..(248): Homolog of NCBI NO: 37535806 NR Description: putative Rhizobium-induced nodule development
  misc_feature (1)..(248): Homolog of NCBI NO: 21618163 NR Description: unknown [Arabidopsis thaliana]
  misc_feature (1)..(248): Homolog of NCBI NO: 15229043 NR Description: F-box protein family [Arabidopsis thaliana]

SEQ ID NO: 38626 - protein, 217 aa, Arabidopsis thaliana; identical to SEQ ID NO: 37208
  peptide (1)..(217): Ceres Seq. ID no. 13575570
  misc_feature (1)..(139): Homolog of NCBI NO: 18413178 NR Description: F-box protein family, AtFBW2 [Arabidopsis
  misc_feature (1)..(139): Homolog of NCBI NO: 18424042 NR Description: SKP1 interacting partner 1 (SKIP1) [Arabidopsis
  misc_feature (1)..(139): Homolog of NCBI NO: 30692594 NR Description: predicted protein [Arabidopsis thaliana]
  misc_feature (1)..(139): Homolog of NCBI NO: 18412951 NR Description: F-box protein family, AtFBL22 [Arabidopsis
  misc_feature (1)..(130): Homolog of NCBI NO: 37718854 NR Description: hypothetical protein [Oryza sativa (japonica
  misc_feature (1)..(139): Homolog of NCBI NO: 18412953 NR Description: F-box protein family, AtFBL9/AtFBL23 [Arabidopsis
  misc_feature (1)..(215): Homolog of NCBI NO: 15234238 NR Description: F-box protein family [Arabidopsis thaliana]
  misc_feature (19)..(217): Homolog of NCBI NO: 37535806 NR Description: putative Rhizobium-induced nodule development
  misc_feature (1)..(217): Homolog of NCBI NO: 21618163 NR Description: unknown [Arabidopsis thaliana]
  misc_feature (1)..(217): Homolog of NCBI NO: 15229043 NR Description: F-box protein family [Arabidopsis thaliana]
  misc_feature (1)..(139): Homolog of NCBI NO: 18413178 NR Description: F-box protein family, AtFBW2 [Arabidopsis
  misc_feature (1)..(139): Homolog of NCBI NO: 18424042 NR Description: SKP1 interacting partner 1 (SKIP1) [Arabidopsis
  misc_feature (1)..(139): Homolog of NCBI NO: 30692594 NR Description: predicted protein [Arabidopsis thaliana]
  misc_feature (1)..(139): Homolog of NCBI NO: 18412951 NR Description: F-box protein family, AtFBL22 [Arabidopsis
  misc_feature (1)..(130): Homolog of NCBI NO: 37718854 NR Description: hypothetical protein [Oryza sativa (japonica
  misc_feature (1)..(139): Homolog of NCBI NO: 18412953 NR Description: F-box protein family, AtFBL9/AtFBL23 [Arabidopsis
  misc_feature (1)..(215): Homolog of NCBI NO: 15234238 NR Description: F-box protein family [Arabidopsis thaliana]
  misc_feature (19)..(217): Homolog of NCBI NO: 37535806 NR Description: putative Rhizobium-induced nodule development
  misc_feature (1)..(217): Homolog of NCBI NO: 21618163 NR Description: unknown [Arabidopsis thaliana]
  misc_feature (1)..(217): Homolog of NCBI NO: 15229043 NR Description: F-box protein family [Arabidopsis thaliana]

SEQ ID NO: 38627 - DNA, 2315 bp, Arabidopsis thaliana
  misc_feature (1)..(2315): Ceres Seq. ID no. 12562127
  misc_feature: MA Experiment ID: 20000439 Result: Up-regulated in Transcription
  misc_feature: MA Experiment 20000439 PARAMETER Experiment Name: At_Roots__P Parameter: Age (day) Value: 14 vs. 21
  misc_feature: MA Experiment 20000439 PARAMETER Experiment Name: At_Roots__P Parameter: Organism Value: A. thaliana
  misc_feature: MA Experiment 20000439 PARAMETER Experiment Name: At_Roots__P Parameter: Tissue Value: Roots vs. Whole Plant
caaaaaccaaaatcacaatcgaagaaatcttttgaaagcaaaatggaagagatttcgacggatccggttgttccagcggtgaaacctgacccgagaacatcttcagttggtgaaggtgctaatcgtcatgaaaatgacgacggaggaagcggcggttctgagattggagcaccggatctggataaagacttgctttgtccgatttgtatgcagattattaaagatgctttcctcacggcttgtggtcatagtttctgctatatgtgtatcatcacacatcttaggaacaagagtgattgtccctgttgtagccaacacctcaccaataatcagctttaccctaatttcttgctcgataagctattgaagaaaacttcagctcggcatgtgtcaaaaactgcatcgcccttggatcagtttcgggaagcactacaaaggggttgtgatgtgtcaattaaggaggttgataatcttctgacacttcttgcggaaaggaagagaaaaatggaacaggaagaagctgagaggaacatgcagatacttttggactttttgcattgtctaaggaagcaaaaagttgatgaactaaatgaggtgcaaactgatctccagtatattaaagaagatataaatgccgttgagagacatagaatagatttataccgagctagggacagatattctgtaaagttgcggatgctcggagatgatccaagcacaagaaatgcatggccacatgagaagaaccagattggtttcaactccaattctctcagcataagaggaggaaattttgtaggcaattatcaaaacaaaaaggtagaggggaaggcacaaggaagctctcatgggctaccaaagaaggatgcgctgagtgggtcagattcgcaaagtttgaatcagtcaactgtctcaatggctagaaagaaacggattcatgctcagttcaatgatttacaagaatgttacctccaaaagcggcgtcagttggcagaccaaccaaatagtaaacaagaaaatgataagagtgtagtacggagggaaggctatagcaacggccttgcagattttcaatctgtgttgactaccttcactcgctacagtcgtctaagagttatagcagaaatccggcatggggatatatttcattcagccaacattgtatcaagcatagagtttgatcgtgatgatgagctgtttgccactgctggtgtttctagatgtataaaggtttttgacttctcttcggttgtaaatgaaccagcagatatgcagtgtccgattgtggagatgtcaactcggtctaaacttagttgcttgagttggaataagcatgaaaaaaatcacatagcaagcagtgattatgaaggaatagtaacagtgtgggatgtaactactaggcagagtcttatggagtatgaagagcacgaaaaacgtgcctggagtgttgacttttcacgaacagaaccatcaatgcttgtatctggtagtgacgactgcaaggttaaagtttggtgcacgaggcaggaagcaagtgtgattaatattgatatgaaagcaaacatatgttgtgtcaagtacaatcctggctcaagcaactacattgcggtcggatcagctgatcatcacatccattattacgatctaagaaacataagccaaccacttcatgtcttcagtggacacaagaaagcagtttcctatgttaaatttttgtccaacaacgagctcgcttctgcgtccacagatagcacactacgcttatgggatgtcaaagacaacttgccagttcgaacattcagaggacatactaacgagaagaactttgtgggtctcacagtgaacagcgagtatctcgcctgtggaagcgagacaaacgaagtatatgtatatcacaaggaaatcacgagacccgtgacatcgcacagatttggatcgccagacatggacgatgcagaggaagaggcaggttcctactttattagtgcggtttgctggaagagtgatagtcccacgatgttgactgcgaatagtcaaggaaccatcaaagttctggtactcgctgcgtgattctagtagacattacaaaagatcttatagcttcgtgaatcaataaaaacaaatttgccgtctatgttctttagtgggagttacatatagagagagaacaatttattaaaagtagggttcatcatttggaaagcaactttgtattattatgcttgccttggaacactcctcaagaagaatttgtatcagtgatgtagatatgtcttacggtttcttagcttctactttatataattaaatgttag

SEQ ID NO: 38628 - protein, 689 aa, Arabidopsis thaliana
  peptide (1)..(689): Ceres Seq. ID no. 12562128
  misc_feature (66)..(103): Pfam Name: Zinc finger, C3HC4 type (RING finger) Pfam Description: Zinc finger, C3HC4 type (RING finger)
  misc_feature (286)..(687): Homolog of NCBI NO: 26024211 NR Description: constitutive photomorphogenic protein 1 [Mus
  misc_feature (15)..(478): Homolog of NCBI NO: 8574407 NR Description: COP1 regulatory protein [Pisum sativum]
  misc_feature (116)..(689): Homolog of NCBI NO: 8574407 NR Description: COP1 regulatory protein [Pisum sativum]
  misc_feature (22)..(688): Homolog of NCBI NO: 7592844 NR Description: COP1 [Oryza sativa (japonica cultivar-group)]
  misc_feature (22)..(688): Homolog of NCBI NO: 16151847 NR Description: copI [Oryza sativa]
  misc_feature (12)..(689): Homolog of NCBI NO: 11127996 NR Description: COP1 [Ipomoea nil]
  misc_feature (15)..(689): Homolog of NCBI NO: 15029364 NR Description: photoregulatory zinc-finger protein COP1 [Rosa
  misc_feature (15)..(689): Homolog of NCBI NO: 4090943 NR Description: COP1 homolog [Lycopersicon esculentum]
  misc_feature (15)..(689): Homolog of NCBI NO: 7688063 NR Description: constitutively photomorphogenic 1 protein [Pisum
  misc_feature (15)..(689): Homolog of NCBI NO: 3121867 NR Description: COP1 regulatory protein (Constitutive
QKPKSQSKKSFESKMEEISTDPVVPAVKPDPRTSSVGEGANRHENDDGGSGGSEIGAPDLDKDLLCPICMQIIKDAFLTACGHSFCYMCIITHLRNKSDCPCCSQHLTNNQLYPNFLLDKLLKKTSARHVSKTASPLDQFREALQRGCDVSIKEVDNLLTLLAERKRKMEQEEAERNMQILLDFLHCLRKQKVDELNEVQTDLQYIKEDINAVERHRIDLYRARDRYSVKLRMLGDDPSTRNAWPHEKNQIGFNSNSLSIRGGNFVGNYQNKKVEGKAQGSSHGLPKKDALSGSDSQSLNQSTVSMARKKRIHAQFNDLQECYLQKRRQLADQPNSKQENDKSVVRREGYSNGLADFQSVLTTFTRYSRLRVIAEIRHGDIFHSANIVSSIEFDRDDELFATAGVSRCIKVFDFSSVVNEPADMQCPIVEMSTRSKLSCLSWNKHEKNHIASSDYEGIVTVWDVTTRQSLMEYEEHEKRAWSVDFSRTEPSMLVSGSDDCKVKVWCTRQEASVINIDMKANICCVKYNPGSSNYIAVGSADHHIHYYDLRNISQPLHVFSGHKKAVSYVKFLSNNELASASTDSTLRLWDVKDNLPVRTFRGHTNEKNFVGLTVNSEYLACGSETNEVYVYHKEITRPVTSHRFGSPDMDDAEEEAGSYFISAVCWKSDSPTMLTANSQGTIKVLVLAA

SEQ ID NO: 38629 - protein, 675 aa, Arabidopsis thaliana
  peptide (1)..(675): Ceres Seq. ID no. 12562129
  misc_feature (52)..(89): Pfam Name: Zinc finger, C3HC4 type (RING finger) Pfam Description: Zinc finger, C3HC4 type (RING finger)
  misc_feature (272)..(673): Homolog of NCBI NO: 26024211 NR Description: constitutive photomorphogenic protein 1 [Mus
  misc_feature (1)..(464): Homolog of NCBI NO: 8574407 NR Description: COP1 regulatory protein [Pisum sativum]
  misc_feature (102)..(675): Homolog of NCBI NO: 8574407 NR Description: COP1 regulatory protein [Pisum sativum]
  misc_feature (8)..(674): Homolog of NCBI NO: 7592844 NR Description: COP1 [Oryza sativa (japonica cultivar-group)]
  misc_feature (8)..(674): Homolog of NCBI NO: 16151847 NR Description: copI [Oryza sativa]
  misc_feature (1)..(675): Homolog of NCBI NO: 11127996 NR Description: COP1 [Ipomoea nil]
  misc_feature (1)..(675): Homolog of NCBI NO: 15029364 NR Description: photoregulatory zinc-finger protein COP1 [Rosa
  misc_feature (1)..(675): Homolog of NCBI NO: 4090943 NR Description: COP1 homolog [Lycopersicon esculentum]
  misc_feature (1)..(675): Homolog of NCBI NO: 7688063 NR Description: constitutively photomorphogenic 1 protein [Pisum
  misc_feature (1)..(675): Homolog of NCBI NO: 3121867 NR Description: COP1 regulatory protein (Constitutive
MEEISTDPVVPAVKPDPRTSSVGEGANRHENDDGGSGGSEIGAPDLDKDLLCPICMQIIKDAFLTACGHSFCYMCIITHLRNKSDCPCCSQHLTNNQLYPNFLLDKLLKKTSARHVSKTASPLDQFREALQRGCDVSIKEVDNLLTLLAERKRKMEQEEAERNMQILLDFLHCLRKQKVDELNEVQTDLQYIKEDINAVERHRIDLYRARDRYSVKLRMLGDDPSTRNAWPHEKNQIGFNSNSLSIRGGNFVGNYQNKKVEGKAQGSSHGLPKKDALSGSDSQSLNQSTVSMARKKRIHAQFNDLQECYLQKRRQLADQPNSKQENDKSVVRREGYSNGLADFQSVLTTFTRYSRLRVIAEIRHGDIFHSANIVSSIEFDRDDELFATAGVSRCIKVFDFSSVVNEPADMQCPIVEMSTRSKLSCLSWNKHEKNHIASSDYEGIVTVWDVTTRQSLMEYEEHEKRAWSVDFSRTEPSMLVSGSDDCKVKVWCTRQEASVINIDMKANICCVKYNPGSSNYIAVGSADHHIHYYDLRNISQPLHVFSGHKKAVSYVKFLSNNELASASTDSTLRLWDVKDNLPVRTFRGHTNEKNFVGLTVNSEYLACGSETNEVYVYHKEITRPVTSHRFGSPDMDDAEEEAGSYFISAVCWKSDSPTMLTANSQGTIKVLVLAA

SEQ ID NO: 38630 - protein, 620 aa, Arabidopsis thaliana
  peptide (1)..(620): Ceres Seq. ID no. 12562130
  misc_feature (1)..(34): Pfam Name: Zinc finger, C3HC4 type (RING finger) Pfam Description: Zinc finger, C3HC4 type (RING finger)
  misc_feature (217)..(618): Homolog of NCBI NO: 26024211 NR Description: constitutive photomorphogenic protein 1 [Mus
  misc_feature (1)..(409): Homolog of NCBI NO: 8574407 NR Description: COP1 regulatory protein [Pisum sativum]
  misc_feature (47)..(620): Homolog of NCBI NO: 8574407 NR Description: COP1 regulatory protein [Pisum sativum]
  misc_feature (1)..(619): Homolog of NCBI NO: 7592844 NR Description: COP1 [Oryza sativa (japonica cultivar-group)]
  misc_feature (1)..(619): Homolog of NCBI NO: 16151847 NR Description: copI [Oryza sativa]
  misc_feature (1)..(620): Homolog of NCBI NO: 11127996 NR Description: COP1 [Ipomoea nil]
  misc_feature (1)..(620): Homolog of NCBI NO: 15029364 NR Description: photoregulatory zinc-finger protein COP1 [Rosa
  misc_feature (1)..(620): Homolog of NCBI NO: 4090943 NR Description: COP1 homolog [Lycopersicon esculentum]
  misc_feature (1)..(620): Homolog of NCBI NO: 7688063 NR Description: constitutively photomorphogenic 1 protein [Pisum
  misc_feature (1)..(620): Homolog of NCBI NO: 3121867 NR Description: COP1 regulatory protein (Constitutive
MQIIKDAFLTACGHSFCYMCIITHLRNKSDCPCCSQHLTNNQLYPNFLLDKLLKKTSARHVSKTASPLDQFREALQRGCDVSIKEVDNLLTLLAERKRKMEQEEAERNMQILLDFLHCLRKQKVDELNEVQTDLQYIKEDINAVERHRIDLYRARDRYSVKLRMLGDDPSTRNAWPHEKNQIGFNSNSLSIRGGNFVGNYQNKKVEGKAQGSSHGLPKKDALSGSDSQSLNQSTVSMARKKRIHAQFNDLQECYLQKRRQLADQPNSKQENDKSVVRREGYSNGLADFQSVLTTFTRYSRLRVIAEIRHGDIFHSANIVSSIEFDRDDELFATAGVSRCIKVFDFSSVVNEPADMQCPIVEMSTRSKLSCLSWNKHEKNHIASSDYEGIVTVWDVTTRQSLMEYEEHEKRAWSVDFSRTEPSMLVSGSDDCKVKVWCTRQEASVINIDMKANICCVKYNPGSSNYIAVGSADHHIHYYDLRNISQPLHVFSGHKKAVSYVKFLSNNELASASTDSTLRLWDVKDNLPVRTFRGHTNEKNFVGLTVNSEYLACGSETNEVYVYHKEITRPVTSHRFGSPDMDDAEEEAGSYFISAVCWKSDSPTMLTANSQGTIKVLVLAA

SEQ ID NO: 38631 - DNA, 1016 bp, Arabidopsis thaliana; identical to SEQ ID NO: 20851
  misc_feature (1)..(1016): Ceres Seq. ID no. 12329124
  misc_feature: MA Experiment ID: 108569 Result: Up-regulated in Transcription
  misc_feature: MA Experiment 108569 PARAMETER Experiment Name: At_0.001%_MeJA__cDNA_P Parameter: Timepoint (hr) Value: 6
  misc_feature: MA Experiment 108569 PARAMETER Experiment Name: At_0.001%_MeJA__cDNA_P Parameter: Tissue Value: Aerial
  misc_feature: MA Experiment 108569 PARAMETER Experiment Name: At_0.001%_MeJA__cDNA_P Parameter: Treatment Value: 0.001% MeJA vs. No Treatment
  misc_feature: MA Experiment ID: 108579 Result: Down-regulated in Transcription
  misc_feature: MA Experiment 108579 PARAMETER Experiment Name: At_4deg_Cold_cDNA_P Parameter: Temperature (deg C) Value: 4 vs. 22
  misc_feature: MA Experiment 108579 PARAMETER Experiment Name: At_4deg_Cold_cDNA_P Parameter: Timepoint (hr) Value: 6
  misc_feature: MA Experiment 108579 PARAMETER Experiment Name: At_4deg_Cold_cDNA_P Parameter: Tissue Value: Aerial
  misc_feature: MA Experiment ID: 108595 Result: Down-regulated in Transcription
  misc_feature: MA Experiment 108595 PARAMETER Experiment Name: At_Ler-pi_Ovule_cDNA_P Parameter: Plant Line Value: null
  misc_feature: MA Experiment ID: 108607 Result: Down-regulated in Transcription
  misc_feature: MA Experiment 108607 PARAMETER Experiment Name: At_100uM_ABA_cDNA_P Parameter: Timepoint (hr) Value: 4
  misc_feature: MA Experiment 108607 PARAMETER Experiment Name: At_100uM_ABA_cDNA_P Parameter: Tissue Value: Aerial
  misc_feature: MA Experiment 108607 PARAMETER Experiment Name: At_100uM_ABA_cDNA_P Parameter: Treatment Value: 100uM ABA vs. No Treatment
  misc_feature: MA Experiment ID: 20000069 Result: Down-regulated in Transcription
  misc_feature: MA Experiment 20000069 PARAMETER Experiment Name: At_100uM_ABA_Mutants_cDNA_P Parameter: Plant Line Value: CS23
  misc_feature: MA Experiment 20000069 PARAMETER Experiment Name: At_100uM_ABA_Mutants_cDNA_P Parameter: Timepoint (hr) Value: 6
  misc_feature: MA Experiment 20000069 PARAMETER Experiment Name: At_100uM_ABA_Mutants_cDNA_P Parameter: Tissue Value: Aerial
  misc_feature: MA Experiment 20000069 PARAMETER Experiment Name: At_100uM_ABA_Mutants_cDNA_P Parameter: Treatment Value: 100uM ABA vs. No Treatment
  misc_feature: MA Experiment ID: 20000070 Result: Down-regulated in Transcription
  misc_feature: MA Experiment 20000070 PARAMETER Experiment Name: At_100uM_ABA_Mutants_cDNA_P Parameter: Plant Line Value: CS24
  misc_feature: MA Experiment 20000070 PARAMETER Experiment Name: At_100uM_ABA_Mutants_cDNA_P Parameter: Timepoint (hr) Value: 6
  misc_feature: MA Experiment 20000070 PARAMETER Experiment Name: At_100uM_ABA_Mutants_cDNA_P Parameter: Tissue Value: Aerial
  misc_feature: MA Experiment 20000070 PARAMETER Experiment Name: At_100uM_ABA_Mutants_cDNA_P Parameter: Treatment Value: 100uM ABA vs. No Treatment
  misc_feature: MA Experiment ID: 20000072 Result: Down-regulated in Transcription
  misc_feature: MA Experiment 20000072 PARAMETER Experiment Name: At_100uM_ABA_Mutants_cDNA_P Parameter: Plant Line Value: CS8105
  misc_feature: MA Experiment 20000072 PARAMETER Experiment Name: At_100uM_ABA_Mutants_cDNA_P Parameter: Timepoint (hr) Value: 6
  misc_feature: MA Experiment 20000072 PARAMETER Experiment Name: At_100uM_ABA_Mutants_cDNA_P Parameter: Tissue Value: Aerial
  misc_feature: MA Experiment 20000072 PARAMETER Experiment Name: At_100uM_ABA_Mutants_cDNA_P Parameter: Treatment Value: 100uM ABA vs. No Treatment
  misc_feature: MA Experiment ID: 20000086 Result: Down-regulated in Transcription
  misc_feature: MA Experiment 20000086 PARAMETER Experiment Name: At_100uM_ABA_Mutants_cDNA_P Parameter: Plant Line Value: CS22
  misc_feature: MA Experiment 20000086 PARAMETER Experiment Name: At_100uM_ABA_Mutants_cDNA_P Parameter: Timepoint (hr) Value: 6
  misc_feature: MA Experiment 20000086 PARAMETER Experiment Name: At_100uM_ABA_Mutants_cDNA_P Parameter: Tissue Value: Aerial
  misc_feature: MA Experiment 20000086 PARAMETER Experiment Name: At_100uM_ABA_Mutants_cDNA_P Parameter: Treatment Value: 100uM ABA vs. No Treatment
  misc_feature: MA Experiment ID: 20000087 Result: Down-regulated in Transcription
  misc_feature: MA Experiment 20000087 PARAMETER Experiment Name: At_100uM_ABA_Mutants_cDNA_P Parameter: Plant Line Value: WS
  misc_feature: MA Experiment 20000087 PARAMETER Experiment Name: At_100uM_ABA_Mutants_cDNA_P Parameter: Timepoint (hr) Value: 6
  misc_feature: MA Experiment 20000087 PARAMETER Experiment Name: At_100uM_ABA_Mutants_cDNA_P Parameter: Tissue Value: Aerial
  misc_feature: MA Experiment 20000087 PARAMETER Experiment Name: At_100uM_ABA_Mutants_cDNA_P Parameter: Treatment Value: 100uM ABA vs. No Treatment
  misc_feature: MA Experiment ID: 20000088 Result: Down-regulated in Transcription
  misc_feature: MA Experiment 20000088 PARAMETER Experiment Name: At_100uM_ABA_Mutants_cDNA_P Parameter: Plant Line Value: Landsberg
  misc_feature: MA Experiment 20000088 PARAMETER Experiment Name: At_100uM_ABA_Mutants_cDNA_P Parameter: Timepoint (hr) Value: 6
  misc_feature: MA Experiment 20000088 PARAMETER Experiment Name: At_100uM_ABA_Mutants_cDNA_P Parameter: Tissue Value: Aerial
  misc_feature: MA Experiment 20000088 PARAMETER Experiment Name: At_100uM_ABA_Mutants_cDNA_P Parameter: Treatment Value: 100uM ABA vs. No Treatment
  misc_feature: MA Experiment ID: 20000144 Result: Down-regulated in Transcription
  misc_feature: MA Experiment 20000144 PARAMETER Experiment Name: At_42deg_Heat_cDNA_P Parameter: Temperature (deg C) Value: 42 vs. 22
  misc_feature: MA Experiment 20000144 PARAMETER Experiment Name: At_42deg_Heat_cDNA_P Parameter: Timepoint (hr) Value: 1
  misc_feature: MA Experiment 20000144 PARAMETER Experiment Name: At_42deg_Heat_cDNA_P Parameter: Tissue Value: Aerial
  misc_feature: MA Experiment ID: 20000166 Result: Down-regulated in Transcription
  misc_feature: MA Experiment 20000166 PARAMETER Experiment Name: At_100uM_ABA_P Parameter: Age (day) Value: 14
  misc_feature: MA Experiment 20000166 PARAMETER Experiment Name: At_100uM_ABA_P Parameter: Organism Value: A. thaliana
  misc_feature: MA Experiment 20000166 PARAMETER Experiment Name: At_100uM_ABA_P Parameter: Plant Line Value: WS
  misc_feature: MA Experiment 20000166 PARAMETER Experiment Name: At_100uM_ABA_P Parameter: Timepoint (hr) Value: 1
  misc_feature: MA Experiment 20000166 PARAMETER Experiment Name: At_100uM_ABA_P Parameter: Tissue Value: Aerial
  misc_feature: MA Experiment 20000166 PARAMETER Experiment Name: At_100uM_ABA_P Parameter: Treatment Value: 100uM ABA vs. No Treatment
  misc_feature: MA Experiment ID: 20000169 Result: Down-regulated in Transcription
  misc_feature: MA Experiment 20000169 PARAMETER Experiment Name: At_100uM_ABA_P Parameter: Age (day) Value: 14
  misc_feature: MA Experiment 20000169 PARAMETER Experiment Name: At_100uM_ABA_P Parameter: Organism Value: A. thaliana
  misc_feature: MA Experiment 20000169 PARAMETER Experiment Name: At_100uM_ABA_P Parameter: Plant Line Value: WS
  misc_feature: MA Experiment 20000169 PARAMETER Experiment Name: At_100uM_ABA_P Parameter: Timepoint (hr) Value: 6
  misc_feature: MA Experiment 20000169 PARAMETER Experiment Name: At_100uM_ABA_P Parameter: Tissue Value: Aerial
  misc_feature: MA Experiment 20000169 PARAMETER Experiment Name: At_100uM_ABA_P Parameter: Treatment Value: 100uM ABA vs. No Treatment
  misc_feature: MA Experiment ID: 20000171 Result: Down-regulated in Transcription
  misc_feature: MA Experiment 20000171 PARAMETER Experiment Name: At_42deg_Heat_P Parameter: Age (day) Value: 14
  misc_feature: MA Experiment 20000171 PARAMETER Experiment Name: At_42deg_Heat_P Parameter: Organism Value: A. thaliana
  misc_feature: MA Experiment 20000171 PARAMETER Experiment Name: At_42deg_Heat_P Parameter: Plant Line Value: WS
  misc_feature: MA Experiment 20000171 PARAMETER Experiment Name: At_42deg_Heat_P Parameter: Temperature (deg C) Value: 42 vs. 22
  misc_feature: MA Experiment 20000171 PARAMETER Experiment Name: At_42deg_Heat_P Parameter: Timepoint (hr) Value: 1
  misc_feature: MA Experiment 20000171 PARAMETER Experiment Name: At_42deg_Heat_P Parameter: Tissue Value: Aerial
  misc_feature: MA Experiment ID: 20000173 Result: Down-regulated in Transcription
  misc_feature: MA Experiment 20000173 PARAMETER Experiment Name: At_42deg_Heat_P Parameter: Age (day) Value: 14
  misc_feature: MA Experiment 20000173 PARAMETER Experiment Name: At_42deg_Heat_P Parameter: Organism Value: A. thaliana
  misc_feature: MA Experiment 20000173 PARAMETER Experiment Name: At_42deg_Heat_P Parameter: Plant Line Value: WS
  misc_feature: MA Experiment 20000173 PARAMETER Experiment Name: At_42deg_Heat_P Parameter: Temperature (deg C) Value: 42 vs. 22
  misc_feature: MA Experiment 20000173 PARAMETER Experiment Name: At_42deg_Heat_P Parameter: Timepoint (hr) Value: 6
  misc_feature: MA Experiment 20000173 PARAMETER Experiment Name: At_42deg_Heat_P Parameter: Tissue Value: Aerial
  misc_feature: MA Experiment ID: 20000179 Result: Down-regulated in Transcription
  misc_feature: MA Experiment 20000179 PARAMETER Experiment Name: At_Germinating_Seeds_P Parameter: Age (hr) Value: 6 vs. 0
  misc_feature: MA Experiment 20000179 PARAMETER Experiment Name: At_Germinating_Seeds_P Parameter: Tissue Value: Germinating Seeds
  misc_feature: MA Experiment ID: 20000180 Result: Down-regulated in Transcription
  misc_feature: MA Experiment 20000180 PARAMETER Experiment Name: At_Germinating_Seeds_P Parameter: Age (hr) Value: 24 vs. 0
  misc_feature: MA Experiment 20000180 PARAMETER Experiment Name: At_Germinating_Seeds_P Parameter: Tissue Value: Germinating Seeds
  misc_feature: MA Experiment ID: 20000184 Result: Up-regulated in Transcription
  misc_feature: MA Experiment 20000184 PARAMETER Experiment Name: At_Shoots__P Parameter: Age (day) Value: 7
  misc_feature: MA Experiment 20000184 PARAMETER Experiment Name: At_Shoots__P Parameter: Tissue Value: Shoots vs. Whole Plant
  misc_feature: MA Experiment ID: 20000213 Result: Down-regulated in Transcription
  misc_feature: MA Experiment 20000213 PARAMETER Experiment Name: At_4deg_Cold_P Parameter: Timepoint (hr) Value: 2
  misc_feature: MA Experiment ID: 20000234 Result: Up-regulated in Transcription
  misc_feature: MA Experiment 20000234 PARAMETER Experiment Name: At_Siliques_P Parameter: Age (day) Value: 21
  misc_feature: MA Experiment 20000234 PARAMETER Experiment Name: At_Siliques_P Parameter: Organism Value: A. thaliana
  misc_feature: MA Experiment 20000234 PARAMETER Experiment Name: At_Siliques_P Parameter: Plant Line Value: WS
  misc_feature: MA Experiment 20000234 PARAMETER Experiment Name: At_Siliques_P Parameter: Tissue Value: Less Than 5mm Siliques vs. Whole Plant
  misc_feature: MA Experiment ID: 20000264 Result: Up-regulated in Transcription
  misc_feature: MA Experiment 20000264 PARAMETER Experiment Name: At_Open_Flower_P Parameter: Age (day) Value: 21
  misc_feature: MA Experiment 20000264 PARAMETER Experiment Name: At_Open_Flower_P Parameter: Plant Line Value: WS
  misc_feature: MA Experiment 20000264 PARAMETER Experiment Name: At_Open_Flower_P Parameter: Tissue Value: Open Flower vs. Whole Plant
  misc_feature: MA Experiment ID: 20000265 Result: Up-regulated in Transcription
  misc_feature: MA Experiment 20000265 PARAMETER Experiment Name: At_Open_Flower_P Parameter: Age (day) Value: 21
  misc_feature: MA Experiment 20000265 PARAMETER Experiment Name: At_Open_Flower_P Parameter: Plant Line Value: WS
  misc_feature: MA Experiment 20000265 PARAMETER Experiment Name: At_Open_Flower_P Parameter: Tissue Value: Closed Flower vs. Whole Plant
  misc_feature: MA Experiment ID: 20000267 Result: Down-regulated in Transcription
  misc_feature: MA Experiment 20000267 PARAMETER Experiment Name: At_Drought_P Parameter: Age (day) Value: 7
  misc_feature: MA Experiment 20000267 PARAMETER Experiment Name: At_Drought_P Parameter: Organism Value: A. thaliana
  misc_feature: MA Experiment 20000267 PARAMETER Experiment Name: At_Drought_P Parameter: Plant Line Value: WS
  misc_feature: MA Experiment 20000267 PARAMETER Experiment Name: At_Drought_P Parameter: Timepoint (hr) Value: 6
  misc_feature: MA Experiment 20000267 PARAMETER Experiment Name: At_Drought_P Parameter: Tissue Value: Whole Plant
  misc_feature: MA Experiment 20000267 PARAMETER Experiment Name: At_Drought_P Parameter: Treatment Value: Drought vs. No Drought
  misc_feature: MA Experiment ID: 20000286 Result: Up-regulated in Transcription
  misc_feature: MA Experiment 20000286 PARAMETER Experiment Name: At_Open_Flower_P Parameter: Age (day) Value: 21
  misc_feature: MA Experiment 20000286 PARAMETER Experiment Name: At_Open_Flower_P Parameter: Plant Line Value: WS
  misc_feature: MA Experiment 20000286 PARAMETER Experiment Name: At_Open_Flower_P Parameter: Tissue Value: Half Open vs. Whole Plant
  misc_feature: MA Experiment ID: 20000288 Result: Down-regulated in Transcription
  misc_feature: MA Experiment 20000288 PARAMETER Experiment Name: At_Drought_P Parameter: Age (day) Value: 7
  misc_feature: MA Experiment 20000288 PARAMETER Experiment Name: At_Drought_P Parameter: Organism Value: A. thaliana
  misc_feature: MA Experiment 20000288 PARAMETER Experiment Name: At_Drought_P Parameter: Plant Line Value: WS
  misc_feature: MA Experiment 20000288 PARAMETER Experiment Name: At_Drought_P Parameter: Timepoint (hr) Value: 1
  misc_feature: MA Experiment 20000288 PARAMETER Experiment Name: At_Drought_P Parameter: Tissue Value: Whole Plant
  misc_feature: MA Experiment 20000288 PARAMETER Experiment Name: At_Drought_P Parameter: Treatment Value: Drought vs. No Drought
  misc_feature: MA Experiment ID: 20000308 Result: Down-regulated in Transcription
  misc_feature: MA Experiment 20000308 PARAMETER Experiment Name: At_100mM_NaCl__P Parameter: Age (day) Value: 17
  misc_feature: MA Experiment 20000308 PARAMETER Experiment Name: At_100mM_NaCl__P Parameter: Organism Value: A. thaliana
  misc_feature: MA Experiment 20000308 PARAMETER Experiment Name: At_100mM_NaCl__P Parameter: Plant Line Value: WS
  misc_feature: MA Experiment 20000308 PARAMETER Experiment Name: At_100mM_NaCl__P Parameter: Timepoint (hr) Value: 72
  misc_feature: MA Experiment 20000308 PARAMETER Experiment Name: At_100mM_NaCl__P Parameter: Tissue Value: Whole Plant
  misc_feature: MA Experiment 20000308 PARAMETER Experiment Name: At_100mM_NaCl__P Parameter: Treatment Value: 100mM NaCl vs. No Treatment
  misc_feature: MA Experiment ID: 20000436 Result: Down-regulated in Transcription
  misc_feature: MA Experiment 20000436 PARAMETER Experiment Name: At_Drought_P Parameter: Age (day) Value: 7
  misc_feature: MA Experiment 20000436 PARAMETER Experiment Name: At_Drought_P Parameter: Organism Value: A. thaliana
  misc_feature: MA Experiment 20000436 PARAMETER Experiment Name: At_Drought_P Parameter: Plant Line Value: WS
  misc_feature: MA Experiment 20000436 PARAMETER Experiment Name: At_Drought_P Parameter: Timepoint (hr) Value: 12
  misc_feature: MA Experiment 20000436 PARAMETER Experiment Name: At_Drought_P Parameter: Tissue Value: Whole Plant
  misc_feature: MA Experiment 20000436 PARAMETER Experiment Name: At_Drought_P Parameter: Treatment Value: Drought vs. No Drought
  misc_feature: MA Experiment ID: 20000437 Result: Down-regulated in Transcription
  misc_feature: MA Experiment 20000437 PARAMETER Experiment Name: At_Drought_P Parameter: Age (day) Value: 8
  misc_feature: MA Experiment 20000437 PARAMETER Experiment Name: At_Drought_P Parameter: Organism Value: A. thaliana
  misc_feature: MA Experiment 20000437 PARAMETER Experiment Name: At_Drought_P Parameter: Plant Line Value: WS
  misc_feature: MA Experiment 20000437 PARAMETER Experiment Name: At_Drought_P Parameter: Timepoint (hr) Value: 24
  misc_feature: MA Experiment 20000437 PARAMETER Experiment Name: At_Drought_P Parameter: Tissue Value: Whole Plant
  misc_feature: MA Experiment 20000437 PARAMETER Experiment Name: At_Drought_P Parameter: Treatment Value: Drought vs. No Drought
  misc_feature: MA Experiment ID: 20000438 Result: Up-regulated in Transcription
  misc_feature: MA Experiment 20000438 PARAMETER Experiment Name: At_Shoots__P Parameter: Age (day) Value: 14
  misc_feature: MA Experiment 20000438 PARAMETER Experiment Name: At_Shoots__P Parameter: Tissue Value: Shoots vs. Whole Plant
  misc_feature: MA Experiment ID: 20000444 Result: Up-regulated in Transcription
  misc_feature: MA Experiment 20000444 PARAMETER Experiment Name: At_100uM_NAA__P Parameter: Age (day) Value: 14
  misc_feature: MA Experiment 20000444 PARAMETER Experiment Name: At_100uM_NAA__P Parameter: Organism Value: A. thaliana
  misc_feature: MA Experiment 20000444 PARAMETER Experiment Name: At_100uM_NAA__P Parameter: Plant Line Value: WS
  misc_feature: MA Experiment 20000444 PARAMETER Experiment Name: At_100uM_NAA__P Parameter: Timepoint (hr) Value: 1
  misc_feature: MA Experiment 20000444 PARAMETER Experiment Name: At_100uM_NAA__P Parameter: Tissue Value: Aerial
  misc_feature: MA Experiment 20000444 PARAMETER Experiment Name: At_100uM_NAA__P Parameter: Treatment Value: 100uM NAA vs. No Treatment
  misc_feature: MA Experiment ID: 20000451 Result: Up-regulated in Transcription
  misc_feature: MA Experiment 20000451 PARAMETER Experiment Name: At_CS6879_Shoots-Roots_P Parameter: Age (day) Value: 14
  misc_feature: MA Experiment 20000451 PARAMETER Experiment Name: At_CS6879_Shoots-Roots_P Parameter: Organism Value: A. thaliana
  misc_feature: MA Experiment 20000451 PARAMETER Experiment Name: At_CS6879_Shoots-Roots_P Parameter: Plant Line Value: CS6879 vs. WS
  misc_feature: MA Experiment 20000451 PARAMETER Experiment Name: At_CS6879_Shoots-Roots_P Parameter: Tissue Value: Roots
  misc_feature: MA Experiment ID: 20000453 Result: Down-regulated in Transcription
  misc_feature: MA Experiment 20000453 PARAMETER Experiment Name: At_100uM_ABA_P Parameter: Age (day) Value: 15
  misc_feature: MA Experiment 20000453 PARAMETER Experiment Name: At_100uM_ABA_P Parameter: Organism Value: A. thaliana
  misc_feature: MA Experiment 20000453 PARAMETER Experiment Name: At_100uM_ABA_P Parameter: Plant Line Value: WS
  misc_feature: MA Experiment 20000453 PARAMETER Experiment Name: At_100uM_ABA_P Parameter: Timepoint (hr) Value: 24
  misc_feature: MA Experiment 20000453 PARAMETER Experiment Name: At_100uM_ABA_P Parameter: Tissue Value: Aerial
  misc_feature: MA Experiment 20000453 PARAMETER Experiment Name: At_100uM_ABA_P Parameter: Treatment Value: 100uM ABA vs. No Treatment
  misc_feature: MA Experiment ID: 20000455 Result: Down-regulated in Transcription
  misc_feature: MA Experiment 20000455 PARAMETER Experiment Name: At_100uM_ABA_P Parameter: Age (day) Value: 16
  misc_feature: MA Experiment 20000455 PARAMETER Experiment Name: At_100uM_ABA_P Parameter: Organism Value: A. thaliana
  misc_feature: MA Experiment 20000455 PARAMETER Experiment Name: At_100uM_ABA_P Parameter: Plant Line Value: WS
  misc_feature: MA Experiment 20000455 PARAMETER Experiment Name: At_100uM_ABA_P Parameter: Timepoint (hr) Value: 48
  misc_feature: MA Experiment 20000455 PARAMETER Experiment Name: At_100uM_ABA_P Parameter: Tissue Value: Aerial
  misc_feature: MA Experiment 20000455 PARAMETER Experiment Name: At_100uM_ABA_P Parameter: Treatment Value: 100uM ABA vs. No Treatment
  misc_feature: MA Experiment ID: 20000573 Result: Down-regulated in Transcription
  misc_feature: MA Experiment 20000573 PARAMETER Experiment Name: At_100uM_ABA_Mutants__P Parameter: Organism Value: A. thaliana
  misc_feature: MA Experiment 20000573 PARAMETER Experiment Name: At_100uM_ABA_Mutants__P Parameter: Plant Line Value: CS22 vs. Ler wt
  misc_feature: MA Experiment 20000573 PARAMETER Experiment Name: At_100uM_ABA_Mutants__P Parameter: Timepoint (hr) Value: N/A
  misc_feature: MA Experiment 20000573 PARAMETER Experiment Name: At_100uM_ABA_Mutants__P Parameter: Tissue Value: Whole Plant
  misc_feature: MA Experiment 20000573 PARAMETER Experiment Name: At_100uM_ABA_Mutants__P Parameter: Treatment Value: None
  misc_feature: MA Experiment ID: 20000574 Result: Down-regulated in Transcription
  misc_feature: MA Experiment 20000574 PARAMETER Experiment Name: At_100uM_ABA_Mutants__P Parameter: Organism Value: A. thaliana
  misc_feature: MA Experiment 20000574 PARAMETER Experiment Name: At_100uM_ABA_Mutants__P Parameter: Plant Line Value: CS23 vs. Ler wt
  misc_feature: MA Experiment 20000574 PARAMETER Experiment Name: At_100uM_ABA_Mutants__P Parameter: Timepoint (hr) Value: N/A
  misc_feature: MA Experiment 20000574 PARAMETER Experiment Name: At_100uM_ABA_Mutants__P Parameter: Tissue Value: Whole Plant
  misc_feature: MA Experiment 20000574 PARAMETER Experiment Name: At_100uM_ABA_Mutants__P Parameter: Treatment Value: None
  misc_feature: MA Experiment ID: 20000578 Result: Down-regulated in Transcription
  misc_feature: MA Experiment 20000578 PARAMETER Experiment Name: At_CS3726__P Parameter: Organism Value: A. thaliana
  misc_feature: MA Experiment 20000578 PARAMETER Experiment Name: At_CS3726__P Parameter: Plant Line Value: CS3726
  misc_feature: MA Experiment 20000578 PARAMETER Experiment Name: At_CS3726__P Parameter: Tissue Value: Whole Plant
  misc_feature: MA Experiment ID: 20000794 Result: Up-regulated in Transcription
  misc_feature: MA Experiment 20000794 PARAMETER Experiment Name: At_Petals_P Parameter: Age (day) Value: 23-25 days
  misc_feature: MA Experiment 20000794 PARAMETER Experiment Name: At_Petals_P Parameter: Plant Line Value: WS
  misc_feature: MA Experiment 20000794 PARAMETER Experiment Name: At_Petals_P Parameter: Tissue Value: Petals vs. Whole plant
  misc_feature: MA Experiment ID: 20001247 Result: Down-regulated in Transcription
  misc_feature: MA Experiment 20001247 PARAMETER Experiment Name: At_Far-red-induction_P Parameter: Age (day) Value: 7
  misc_feature: MA Experiment 20001247 PARAMETER Experiment Name: At_Far-red-induction_P Parameter: Light Value: Far-red vs. White
  misc_feature: MA Experiment 20001247 PARAMETER Experiment Name: At_Far-red-induction_P Parameter: Organism Value: A. thaliana
  misc_feature: MA Experiment 20001247 PARAMETER Experiment Name: At_Far-red-induction_P Parameter: Plant Line Value: Columbia
  misc_feature: MA Experiment 20001247 PARAMETER Experiment Name: At_Far-red-induction_P Parameter: Timepoint (hr) Value: 1
  misc_feature: MA Experiment 20001247 PARAMETER Experiment Name: At_Far-red-induction_P Parameter: Tissue Value: Whole Plant
  misc_feature: MA Experiment ID: 20001248 Result: Down-regulated in Transcription
  misc_feature: MA Experiment 20001248 PARAMETER Experiment Name: At_Far-red-induction_P Parameter: Age (day) Value: 7
  misc_feature: MA Experiment 20001248 PARAMETER Experiment Name: At_Far-red-induction_P Parameter: Light Value: Far-red vs. White
  misc_feature: MA Experiment 20001248 PARAMETER Experiment Name: At_Far-red-induction_P Parameter: Organism Value: A. thaliana
  misc_feature: MA Experiment 20001248 PARAMETER Experiment Name: At_Far-red-induction_P Parameter: Plant Line Value: Columbia
  misc_feature: MA Experiment 20001248 PARAMETER Experiment Name: At_Far-red-induction_P Parameter: Timepoint (hr) Value: 4
  misc_feature: MA Experiment 20001248 PARAMETER Experiment Name: At_Far-red-induction_P Parameter: Tissue Value: Whole Plant
  misc_feature: MA Experiment ID: 20001451 Result: Down-regulated in Transcription
  misc_feature: MA Experiment 20001451 PARAMETER Experiment Name: At_Far-red-induction_P Parameter: Age (day) Value: 7
  misc_feature: MA Experiment 20001451 PARAMETER Experiment Name: At_Far-red-induction_P Parameter: Light Value: Far-red vs. White
  misc_feature: MA Experiment 20001451 PARAMETER Experiment Name: At_Far-red-induction_P Parameter: Organism Value: A. thaliana
  misc_feature: MA Experiment 20001451 PARAMETER Experiment Name: At_Far-red-induction_P Parameter: Plant Line Value: Columbia
  misc_feature: MA Experiment 20001451 PARAMETER Experiment Name: At_Far-red-induction_P Parameter: Timepoint (hr) Value: 24
  misc_feature: MA Experiment 20001451 PARAMETER Experiment Name: At_Far-red-induction_P Parameter: Tissue Value: Whole Plant
  misc_feature: MA Experiment ID: 20001554 Result: Down-regulated in Transcription
  misc_feature: MA Experiment 20001554 PARAMETER Experiment Name: At_Drought_Soil_Dry_P Parameter: Age (day) Value: 21
  misc_feature: MA Experiment 20001554 PARAMETER Experiment Name: At_Drought_Soil_Dry_P Parameter: Organism Value: A. thaliana
  misc_feature: MA Experiment 20001554 PARAMETER Experiment Name: At_Drought_Soil_Dry_P Parameter: Plant Line Value: WS
  misc_feature: MA Experiment 20001554 PARAMETER Experiment Name: At_Drought_Soil_Dry_P Parameter: Post Timepoint (hr) Value: None
  misc_feature: MA Experiment 20001554 PARAMETER Experiment Name: At_Drought_Soil_Dry_P Parameter: Post-Treatment Value: None
  misc_feature: MA Experiment 20001554 PARAMETER Experiment Name: At_Drought_Soil_Dry_P Parameter: Timepoint (day) Value: 7
  misc_feature: MA Experiment 20001554 PARAMETER Experiment Name: At_Drought_Soil_Dry_P Parameter: Treatment Value: Drought vs. No Drought
  misc_feature: MA Experiment ID: 20001555 Result: Down-regulated in Transcription
  misc_feature: MA Experiment 20001555 PARAMETER Experiment Name: At_Drought_Soil_Dry_P Parameter: Age (day) Value: 24
  misc_feature: MA Experiment 20001555 PARAMETER Experiment Name: At_Drought_Soil_Dry_P Parameter: Organism Value: A. thaliana
  misc_feature: MA Experiment 20001555 PARAMETER Experiment Name: At_Drought_Soil_Dry_P Parameter: Plant Line Value: WS
  misc_feature: MA Experiment 20001555 PARAMETER Experiment Name: At_Drought_Soil_Dry_P Parameter: Post Timepoint (hr) Value: None
  misc_feature: MA Experiment 20001555 PARAMETER Experiment Name: At_Drought_Soil_Dry_P Parameter: Post-Treatment Value: None
  misc_feature: MA Experiment 20001555 PARAMETER Experiment Name: At_Drought_Soil_Dry_P Parameter: Timepoint (day) Value: 10
  misc_feature: MA Experiment 20001555 PARAMETER Experiment Name: At_Drought_Soil_Dry_P Parameter: Treatment Value: Drought vs. No Drought
  misc_feature: MA Experiment ID: 20001556 Result: Down-regulated in Transcription
  misc_feature: MA Experiment 20001556 PARAMETER Experiment Name: At_Drought_Soil_Dry_P Parameter: Age (day) Value: 26
  misc_feature: MA Experiment 20001556 PARAMETER Experiment Name: At_Drought_Soil_Dry_P Parameter: Organism Value: A. thaliana
  misc_feature: MA Experiment 20001556 PARAMETER Experiment Name: At_Drought_Soil_Dry_P Parameter: Plant Line Value: WS
  misc_feature: MA Experiment 20001556 PARAMETER Experiment Name: At_Drought_Soil_Dry_P Parameter: Post Timepoint (hr) Value: None
  misc_feature: MA Experiment 20001556 PARAMETER Experiment Name: At_Drought_Soil_Dry_P Parameter: Post-Treatment Value: None
  misc_feature: MA Experiment 20001556 PARAMETER Experiment Name: At_Drought_Soil_Dry_P Parameter: Timepoint (day) Value: 12
  misc_feature: MA Experiment 20001556 PARAMETER Experiment Name: At_Drought_Soil_Dry_P Parameter: Treatment Value: Drought vs. No Drought
  misc_feature: MA Experiment ID: 20001557 Result: Down-regulated in Transcription
  misc_feature: MA Experiment 20001557 PARAMETER Experiment Name: At_Drought_Soil_Dry_P Parameter: Age (day) Value: 27
  misc_feature: MA Experiment 20001557 PARAMETER Experiment Name: At_Drought_Soil_Dry_P Parameter: Organism Value: A. thaliana
  misc_feature: MA Experiment 20001557 PARAMETER Experiment Name: At_Drought_Soil_Dry_P Parameter: Plant Line Value: WS
  misc_feature: MA Experiment 20001557 PARAMETER Experiment Name: At_Drought_Soil_Dry_P Parameter: Post Timepoint (hr) Value: 3
  misc_feature: MA Experiment 20001557 PARAMETER Experiment Name: At_Drought_Soil_Dry_P Parameter: Post-Treatment Value: Re-Water vs. No Drought
  misc_feature: MA Experiment 20001557 PARAMETER Experiment Name: At_Drought_Soil_Dry_P Parameter: Timepoint (day) Value: 13
  misc_feature: MA Experiment 20001557 PARAMETER Experiment Name: At_Drought_Soil_Dry_P Parameter: Treatment Value: Drought vs. No Drought
  misc_feature: MA Experiment ID: 20001558 Result: Down-regulated in Transcription
  misc_feature: MA Experiment 20001558 PARAMETER Experiment Name: At_Drought_Soil_Dry_P Parameter: Age (day) Value: 27
  misc_feature: MA Experiment 20001558 PARAMETER Experiment Name: At_Drought_Soil_Dry_P Parameter: Organism Value: A. thaliana
  misc_feature: MA Experiment 20001558 PARAMETER Experiment Name: At_Drought_Soil_Dry_P Parameter: Plant Line Value: WS
  misc_feature: MA Experiment 20001558 PARAMETER Experiment Name: At_Drought_Soil_Dry_P Parameter: Post Timepoint (hr) Value: 6
  misc_feature: MA Experiment 20001558 PARAMETER Experiment Name: At_Drought_Soil_Dry_P Parameter: Post-Treatment Value: Re-Water vs. No Drought
  misc_feature: MA Experiment 20001558 PARAMETER Experiment Name: At_Drought_Soil_Dry_P Parameter: Timepoint (day) Value: 13
  misc_feature: MA Experiment 20001558 PARAMETER Experiment Name: At_Drought_Soil_Dry_P Parameter: Treatment Value: Drought vs. No Drought
  misc_feature: MA Experiment ID: 20001559 Result: Down-regulated in Transcription
  misc_feature: MA Experiment 20001559 PARAMETER Experiment Name: At_Drought_Soil_Dry_P Parameter: Age (day) Value: 28
  misc_feature: MA Experiment 20001559 PARAMETER Experiment Name: At_Drought_Soil_Dry_P Parameter: Organism Value: A. thaliana
  misc_feature: MA Experiment 20001559 PARAMETER Experiment Name: At_Drought_Soil_Dry_P Parameter: Plant Line Value: WS
  misc_feature: MA Experiment 20001559 PARAMETER Experiment Name: At_Drought_Soil_Dry_P Parameter: Post Timepoint (hr) Value: 29
  misc_feature: MA Experiment 20001559 PARAMETER Experiment Name: At_Drought_Soil_Dry_P Parameter: Post-Treatment Value: Re-Water vs. No Drought
  misc_feature: MA Experiment 20001559 PARAMETER Experiment Name: At_Drought_Soil_Dry_P Parameter: Timepoint (day) Value: 14
  misc_feature: MA Experiment 20001559 PARAMETER Experiment Name: At_Drought_Soil_Dry_P Parameter: Treatment Value: Drought vs. No Drought
  misc_feature: MA Experiment ID: 20001560 Result: Down-regulated in Transcription
  misc_feature: MA Experiment 20001560 PARAMETER Experiment Name: At_Drought_Soil_Dry_P Parameter: Age (day) Value: 28
  misc_feature: MA Experiment 20001560 PARAMETER Experiment Name: At_Drought_Soil_Dry_P Parameter: Organism Value: A. thaliana
  misc_feature: MA Experiment 20001560 PARAMETER Experiment Name: At_Drought_Soil_Dry_P Parameter: Plant Line Value: WS
  misc_feature: MA Experiment 20001560 PARAMETER Experiment Name: At_Drought_Soil_Dry_P Parameter: Post Timepoint (hr) Value: None
  misc_feature: MA Experiment 20001560 PARAMETER Experiment Name: At_Drought_Soil_Dry_P Parameter: Post-Treatment Value: None
  misc_feature: MA Experiment 20001560 PARAMETER Experiment Name: At_Drought_Soil_Dry_P Parameter: Timepoint (day) Value: 14
  misc_feature: MA Experiment 20001560 PARAMETER Experiment Name: At_Drought_Soil_Dry_P Parameter: Treatment Value: Drought vs. No Drought
  misc_feature: MA Experiment ID: 20001772 Result: Up-regulated in Transcription
  misc_feature: MA Experiment 20001772 PARAMETER Experiment Name: At_Far-red-enriched-adult_P Parameter: Age (day) Value: 29
  misc_feature: MA Experiment 20001772 PARAMETER Experiment Name: At_Far-red-enriched-adult_P Parameter: Light Value: Far-red enriched vs. White
  misc_feature: MA Experiment 20001772 PARAMETER Experiment Name: At_Far-red-enriched-adult_P Parameter: Organism Value: A. thaliana
  misc_feature: MA Experiment 20001772 PARAMETER Experiment Name: At_Far-red-enriched-adult_P Parameter: Plant Line Value: Columbia
  misc_feature: MA Experiment 20001772 PARAMETER Experiment Name: At_Far-red-enriched-adult_P Parameter: Timepoint (hr) Value: 24
  misc_feature: MA Experiment 20001772 PARAMETER Experiment Name: At_Far-red-enriched-adult_P Parameter: Tissue Value: Aerial
  misc_feature: MA Experiment ID: 20001904 Result: Down-regulated in Transcription
  misc_feature: MA Experiment 20001904 PARAMETER Experiment Name: At_Drought_Reproduction_P Parameter: Age (day) Value: 37
  misc_feature: MA Experiment 20001904 PARAMETER Experiment Name: At_Drought_Reproduction_P Parameter: Organism Value: A. thaliana
  misc_feature: MA Experiment 20001904 PARAMETER Experiment Name: At_Drought_Reproduction_P Parameter: Plant Line Value: WS
  misc_feature: MA Experiment 20001904 PARAMETER Experiment Name: At_Drought_Reproduction_P Parameter: Timepoint (day) Value: 7
  misc_feature: MA Experiment 20001904 PARAMETER Experiment Name: At_Drought_Reproduction_P Parameter: Tissue Value: Rosettes
  misc_feature: MA Experiment 20001904 PARAMETER Experiment Name: At_Drought_Reproduction_P Parameter: Treatment Value: Drought vs. No Drought
  misc_feature: MA Experiment ID: 20001906 Result: Down-regulated in Transcription
  misc_feature: MA Experiment 20001906 PARAMETER Experiment Name: At_Drought_Reproduction_P Parameter: Age (day) Value: 35
  misc_feature: MA Experiment 20001906 PARAMETER Experiment Name: At_Drought_Reproduction_P Parameter: Organism Value: A. thaliana
  misc_feature: MA Experiment 20001906 PARAMETER Experiment Name: At_Drought_Reproduction_P Parameter: Plant Line Value: WS
  misc_feature: MA Experiment 20001906 PARAMETER Experiment Name: At_Drought_Reproduction_P Parameter: Timepoint (day) Value: 5
  misc_feature: MA Experiment 20001906 PARAMETER Experiment Name: At_Drought_Reproduction_P Parameter: Tissue Value: Siliques
  misc_feature: MA Experiment 20001906 PARAMETER Experiment Name: At_Drought_Reproduction_P Parameter: Treatment Value: Drought vs. No Drought
  misc_feature: MA Experiment ID: 20001911 Result: Down-regulated in Transcription
  misc_feature: MA Experiment 20001911 PARAMETER Experiment Name: At_Drought_Reproduction_P Parameter: Age (day) Value: 40
  misc_feature: MA Experiment 20001911 PARAMETER Experiment Name: At_Drought_Reproduction_P Parameter: Organism Value: A. thaliana
  misc_feature: MA Experiment 20001911 PARAMETER Experiment Name: At_Drought_Reproduction_P Parameter: Plant Line Value: WS
  misc_feature: MA Experiment 20001911 PARAMETER Experiment Name: At_Drought_Reproduction_P Parameter: Timepoint (day) Value: 10
  misc_feature: MA Experiment 20001911 PARAMETER Experiment Name: At_Drought_Reproduction_P Parameter: Tissue Value: Flowers
  misc_feature: MA Experiment 20001911 PARAMETER Experiment Name: At_Drought_Reproduction_P Parameter: Treatment Value: Drought vs. No Drought

SEQ ID NO: 38632 - protein, 253 aa, Arabidopsis thaliana; identical to SEQ ID NO: 20852
  peptide (1)..(253): Ceres Seq. ID no. 12329125
  misc_feature (161)..(239): Pfam Name: Pollen allergen Pfam Description: Pollen allergen
  misc_feature (161)..(239): Pfam Name: Pollen allergen Pfam Description: Pollen allergen
  misc_feature (4)..(253): Homolog of NCBI NO: 3510538 NR Description: expansin [Prunus armeniaca]
  misc_feature (5)..(253): Homolog of NCBI NO: 29467501 NR Description: expansin [Pyrus communis]
  misc_feature (14)..(253): Homolog of NCBI NO: 38046728 NR Description: alpha-expansin 2 [Populus tremula x Populus
  misc_feature (2)..(253): Homolog of NCBI NO: 29467499 NR Description: expansin [Pyrus communis]
  misc_feature (5)..(253): Homolog of NCBI NO: 11907554 NR Description: expansin [Prunus persica]
  misc_feature (4)..(253): Homolog of NCBI NO: 3510538 NR Description: expansin [Prunus armeniaca]
  misc_feature (14)..(253): Homolog of NCBI NO: 38046728 NR Description: alpha-expansin 2 [Populus tremula x Populus
  misc_feature (5)..(253): Homolog of NCBI NO: 11907554 NR Description: expansin [Prunus persica]
  misc_feature (1)..(253): Homolog of NCBI NO: 15226718 NR Description: expansin, putative
  misc_feature (1)..(253): Homolog of NCBI NO: 29421120 NR Description: expansin [Vitis labrusca x Vitis vinifera]
  misc_feature (10)..(253): Homolog of NCBI NO: 7025493 NR Description: expansin 2 [Zinnia elegans]
  misc_feature (1)..(253): Homolog of NCBI NO: 29421122 NR Description: expansin [Vitis labrusca x Vitis vinifera]
  misc_feature (5)..(253): Homolog of NCBI NO: 11932092 NR Description: expansin [Cicer arietinum]
  misc_feature (2)..(253): Homolog of NCBI NO: 29467499 NR Description: expansin [Pyrus communis]
  misc_feature (5)..(253): Homolog of NCBI NO: 29467501 NR Description: expansin [Pyrus communis]
  misc_feature (5)..(253): Homolog of NCBI NO: 11932092 NR Description: expansin [Cicer arietinum]
  misc_feature (1)..(253): Homolog of NCBI NO: 29421122 NR Description: expansin [Vitis labrusca x Vitis vinifera]
  misc_feature (10)..(253): Homolog of NCBI NO: 7025493 NR Description: expansin 2 [Zinnia elegans]
  misc_feature (1)..(253): Homolog of NCBI NO: 29421120 NR Description: expansin [Vitis labrusca x Vitis vinifera]
  misc_feature (1)..(253): Homolog of NCBI NO: 15226718 NR Description: expansin, putative

SEQ ID NO: 38633 - protein, 207 aa, Arabidopsis thaliana; identical to SEQ ID NO: 20853
  peptide (1)..(207): Ceres Seq. ID no. 12329126
  misc_feature (115)..(193): Pfam Name: Pollen allergen Pfam Description: Pollen allergen
  misc_feature (115)..(193): Pfam Name: Pollen allergen Pfam Description: Pollen allergen
  misc_feature (1)..(207): Homolog of NCBI NO: 3510538 NR Description: expansin [Prunus armeniaca]
  misc_feature (1)..(207): Homolog of NCBI NO: 29467501 NR Description: expansin [Pyrus communis]
  misc_feature (1)..(207): Homolog of NCBI NO: 38046728 NR Description: alpha-expansin 2 [Populus tremula x Populus
  misc_feature (1)..(207): Homolog of NCBI NO: 29467499 NR Description: expansin [Pyrus communis]
  misc_feature (1)..(207): Homolog of NCBI NO: 11907554 NR Description: expansin [Prunus persica]
  misc_feature (1)..(207): Homolog of NCBI NO: 3510538 NR Description: expansin [Prunus armeniaca]
  misc_feature (1)..(207): Homolog of NCBI NO: 38046728 NR Description: alpha-expansin 2 [Populus tremula x Populus
  misc_feature (1)..(207): Homolog of NCBI NO: 11907554 NR Description: expansin [Prunus persica]
  misc_feature (1)..(207): Homolog of NCBI NO: 15226718 NR Description: expansin, putative
  misc_feature (1)..(207): Homolog of NCBI NO: 29421120 NR Description: expansin [Vitis labrusca x Vitis vinifera]
  misc_feature (1)..(207): Homolog of NCBI NO: 7025493 NR Description: expansin 2 [Zinnia elegans]
  misc_feature (1)..(207): Homolog of NCBI NO: 29421122 NR Description: expansin [Vitis labrusca x Vitis vinifera]
  misc_feature (1)..(207): Homolog of NCBI NO: 11932092 NR Description: expansin [Cicer arietinum]
  misc_feature (1)..(207): Homolog of NCBI NO: 29467499 NR Description: expansin [Pyrus communis]
  misc_feature (1)..(207): Homolog of NCBI NO: 29467501 NR Description: expansin [Pyrus communis]
  misc_feature (1)..(207): Homolog of NCBI NO: 11932092 NR Description: expansin [Cicer arietinum]
  misc_feature (1)..(207): Homolog of NCBI NO: 29421122 NR Description: expansin [Vitis labrusca x Vitis vinifera]
  misc_feature (1)..(207): Homolog of NCBI NO: 7025493 NR Description: expansin 2 [Zinnia elegans]
  misc_feature (1)..(207): Homolog of NCBI NO: 29421120 NR Description: expansin [Vitis labrusca x Vitis vinifera]
  misc_feature (1)..(207): Homolog of NCBI NO: 15226718 NR Description: expansin, putative

SEQ ID NO: 38634 - protein, 169 aa, Arabidopsis thaliana; identical to SEQ ID NO: 20854
  peptide (1)..(169): Ceres Seq. ID no. 12329127
  misc_feature (77)..(155): Pfam Name: Pollen allergen Pfam Description: Pollen allergen
  misc_feature (77)..(155): Pfam Name: Pollen allergen Pfam Description: Pollen allergen
  misc_feature (1)..(169): Homolog of NCBI NO: 3510538 NR Description: expansin [Prunus armeniaca]
  misc_feature (1)..(169): Homolog of NCBI NO: 29467501 NR Description: expansin [Pyrus communis]
  misc_feature (1)..(169): Homolog of NCBI NO: 38046728 NR Description: alpha-expansin 2 [Populus tremula x Populus
  misc_feature (1)..(169): Homolog of NCBI NO: 29467499 NR Description: expansin [Pyrus communis]
  misc_feature (1)..(169): Homolog of NCBI NO: 11907554 NR Description: expansin [Prunus persica]
  misc_feature (1)..(169): Homolog of NCBI NO: 3510538 NR Description: expansin [Prunus armeniaca]
  misc_feature (1)..(169): Homolog of NCBI NO: 38046728 NR Description: alpha-expansin 2 [Populus tremula x Populus
  misc_feature (1)..(169): Homolog of NCBI NO: 11907554 NR Description: expansin [Prunus persica]
  misc_feature (1)..(169): Homolog of NCBI NO: 15226718 NR Description: expansin, putative
  misc_feature (1)..(169): Homolog of NCBI NO: 29421120 NR Description: expansin [Vitis labrusca x Vitis vinifera]
  misc_feature (1)..(169): Homolog of NCBI NO: 7025493 NR Description: expansin 2 [Zinnia elegans]
  misc_feature (1)..(169): Homolog of NCBI NO: 29421122 NR Description: expansin [Vitis labrusca x Vitis vinifera]
  misc_feature (1)..(169): Homolog of NCBI NO: 11932092 NR Description: expansin [Cicer arietinum]
  misc_feature (1)..(169): Homolog of NCBI NO: 29467499 NR Description: expansin [Pyrus communis]
  misc_feature (1)..(169): Homolog of NCBI NO: 29467501 NR Description: expansin [Pyrus communis]
  misc_feature (1)..(169): Homolog of NCBI NO: 11932092 NR Description: expansin [Cicer arietinum]
  misc_feature (1)..(169): Homolog of NCBI NO: 29421122 NR Description: expansin [Vitis labrusca x Vitis vinifera]
  misc_feature (1)..(169): Homolog of NCBI NO: 7025493 NR Description: expansin 2 [Zinnia elegans]
  misc_feature (1)..(169): Homolog of NCBI NO: 29421120 NR Description: expansin [Vitis labrusca x Vitis vinifera]
  misc_feature (1)..(169): Homolog of NCBI NO: 15226718 NR Description: expansin, putative

SEQ ID NO: 38635 - DNA, 1793 bp, Arabidopsis thaliana
  misc_feature (1)..(1793): Ceres Seq. ID no. 12328926
  misc_feature: MA Experiment ID: 108488 Result: Down-regulated in Transcription
  misc_feature: MA Experiment ID: 108573 Result: Up-regulated in Transcription
  misc_feature: MA Experiment 108573 PARAMETER Experiment Name: At_Drought_cDNA_P Parameter: Timepoint (hr) Value: 6
  misc_feature: MA Experiment 108573 PARAMETER Experiment Name: At_Drought_cDNA_P Parameter: Tissue Value: Aerial
  misc_feature: MA Experiment 108573 PARAMETER Experiment Name: At_Drought_cDNA_P Parameter: Treatment Value: Drought vs. No Drought
  misc_feature: MA Experiment ID: 108576 Result: Down-regulated in Transcription
  misc_feature: MA Experiment 108576 PARAMETER Experiment Name: At_42deg_Heat_cDNA_P Parameter: Temperature (deg C) Value: 42 vs. 22
  misc_feature: MA Experiment 108576 PARAMETER Experiment Name: At_42deg_Heat_cDNA_P Parameter: Timepoint (hr) Value: 1
  misc_feature: MA Experiment 108576 PARAMETER Experiment Name: At_42deg_Heat_cDNA_P Parameter: Tissue Value: Aerial
  misc_feature: MA Experiment ID: 108595 Result: Down-regulated in Transcription
  misc_feature: MA Experiment 108595 PARAMETER Experiment Name: At_Ler-pi_Ovule_cDNA_P Parameter: Plant Line Value: null
  misc_feature: MA Experiment ID: 20000224 Result: Up-regulated in Transcription
gaaaaggatttttaattttcggagaggaagaagaagagagagatattgaagagcgctgaaggcggaaaagactattttgacctcgtcgtctccgtagatcatttttcttcagctcttcttcttcctctttctccgattctccttcttttgattttatctatccgccatgaacgagaaagccaacgtctctaaggagcttaatgcccgccatagaaagattcttgaagggcttcttaaacatccagagaacagagaatgtgctgactgcaaaacaaaaggtccaagatgggctagtgttaatttaggtatctttatctgcatgcaatgttctgggattcacaggagtctcggggtacacatatcgaaggttcgatctgccactctggacacatggctccccgagcaggttgcatttatacagtcaatgggaaatgataaagcaaatagttactgggaagcagagctacccccaaactatgatagagttggaattgagaattttatacgtgcaaagtatgaagagaagagatgggtttctagaggggaaaaggctagatcacctcctagagtcgagcaggaacggcggaaatctgtggagagaagtgggccgggatatgagcatggacatagtagtagtcctgtaaatttgtttgaggagaggaaaactattccagcatctagaacaagaaataatgttgctgcaacgagaataaatcttcccgtgcctccccaaggacccagtcaggttataaagccacagcagaaaatggagtctgcagctactccagtagagagggagaaacaagcagtaaatgttgcaccagcatcagatcctccaaaggtggattttgctactgatctgtttaacatgctatcaatggatgattcgactacaaatacctcagaggcaactcctggcgatactcctgccgatgataactcatgggctggctttcagtctgctggaagtggtcaaacggcagagaaaattgtcacagccaagcctgctgagagcagttctcctccagcttcatcttctgactttgaggatttgtttaaggacacacctaatttaacaactcaacaagcaccaaaagatgtgaaaggcgatatcatgagcctgtttgagaagacgaatatagtatcgccttttgccatgcatcagcaacaggttgctatgctcgctcagcagcaagccctttacatggctgcagcgaaagctgctggaggcactccaaacggcgtgaatcaacaagctattgctaatgctcttaacgtagcttctgcaaattggtcaaaccccggcggctaccagatccccggaatgactaaccccgtaggtggtcaagctgatctccagaaacttatgcaaaacatgaatatgaacgcaaacatgaacacgagacccgcacaaccgcaagagaacactctacaatacccatcatccagtttctacacaatgggtcaagctaatcaagtgaacggtatgaccccaaactcaaccggtaaacctcagtcatcatccgcaacccaaccaacaagcaccacaccatcttcacaatcaggcaaagactttgatttctcttccttgatggatggaatgttcacaaaacattgatcaagagagagagactttttctgaatttgcctttacatctttgttctaaatttgaagaaccaaaagaatatatatacaatcatctctggacagtttttctctgttaaacatatattttcttttctttggaactgtgttgtagccgagctttgatttatgattttactcgattgtc

SEQ ID NO: 38636 - protein, 483 aa, Arabidopsis thaliana
  peptide (1)..(483): Ceres Seq. ID no. 12328927
  misc_feature (16)..(130): Pfam Name: Putative GTPase activating protein for Arf Pfam Description: Putative GTPase activating protein for Arf
  misc_feature (8)..(239): Homolog of NCBI NO: 10435055 NR Description: unnamed protein product [Homo sapiens]
  misc_feature (8)..(428): Homolog of NCBI NO: 28077013 NR Description: stromal membrane-associated protein [Mus
  misc_feature (8)..(307): Homolog of NCBI NO: 24651922 NR Description: CG8243-PA [Drosophila melanogaster]
  misc_feature (8)..(307): Homolog of NCBI NO: 20152063 NR Description: RE02759p [Drosophila melanogaster]
  misc_feature (1)..(117): Homolog of NCBI NO: 15229090 NR Description: unknown protein; protein id: At3g17660.1
  misc_feature (1)..(213): Homolog of NCBI NO: 9294154 NR Description: emb|CAB07858.1~gene_id:MKP6.22~similar to unknown
  misc_feature (1)..(482): Homolog of NCBI NO: 34898734 NR Description: contains ESTs
  misc_feature (7)..(483): Homolog of NCBI NO: 10441352 NR Description: ARF GAP-like zinc finger-containing protein ZIGA3
  misc_feature (1)..(483): Homolog of NCBI NO: 21618169 NR Description: ARF GAP-like zinc finger-containing protein ZIGA3
  misc_feature (1)..(483): Homolog of NCBI NO: 18423615 NR Description: expressed protein
MNEKANVSKELNARHRKILEGLLKHPENRECADCKTKGPRWASVNLGIFICMQCSGIHRSLGVHISKVRSATLDTWLPEQVAFIQSMGNDKANSYWEAELPPNYDRVGIENFIRAKYEEKRWVSRGEKARSPPRVEQERRKSVERSGPGYEHGHSSSPVNLFEERKTIPASRTRNNVAATRINLPVPPQGPSQVIKPQQKMESAATPVEREKQAVNVAPASDPPKVDFATDLFNMLSMDDSTTNTSEATPGDTPADDNSWAGFQSAGSGQTAEKIVTAKPAESSSPPASSSDFEDLFKDTPNLTTQQAPKDVKGDIMSLFEKTNIVSPFAMHQQQVAMLAQQQALYMAAAKAAGGTPNGVNQQAIANALNVASANWSNPGGYQIPGMTNPVGGQADLQKLMQNMNMNANMNTRPAQPQENTLQYPSSSFYTMGQANQVNGMTPNSTGKPQSSSATQPTSTTPSSQSGKDFDFSSLMDGMFTKH

SEQ ID NO: 38637 - protein, 432 aa, Arabidopsis thaliana
  peptide (1)..(432): Ceres Seq. ID no. 12328928
  misc_feature (1)..(79): Pfam Name: Putative GTPase activating protein for Arf Pfam Description: Putative GTPase activating protein for Arf
  misc_feature (1)..(188): Homolog of NCBI NO: 10435055 NR Description: unnamed protein product [Homo sapiens]
  misc_feature (1)..(377): Homolog of NCBI NO: 28077013 NR Description: stromal membrane-associated protein [Mus
  misc_feature (1)..(256): Homolog of NCBI NO: 24651922 NR Description: CG8243-PA [Drosophila melanogaster]
  misc_feature (1)..(256): Homolog of NCBI NO: 20152063 NR Description: RE02759p [Drosophila melanogaster]
  misc_feature (1)..(66): Homolog of NCBI NO: 15229090 NR Description: unknown protein; protein id: At3g17660.1
  misc_feature (1)..(162): Homolog of NCBI NO: 9294154 NR Description: emb|CAB07858.1~gene_id:MKP6.22~similar to unknown
  misc_feature (1)..(431): Homolog of NCBI NO: 34898734 NR Description: contains ESTs
  misc_feature (1)..(432): Homolog of NCBI NO: 10441352 NR Description: ARF GAP-like zinc finger-containing protein ZIGA3
  misc_feature (1)..(432): Homolog of NCBI NO: 21618169 NR Description: ARF GAP-like zinc finger-containing protein ZIGA3
  misc_feature (1)..(432): Homolog of NCBI NO: 18423615 NR Description: expressed protein
MQCSGIHRSLGVHISKVRSATLDTWLPEQVAFIQSMGNDKANSYWEAELPPNYDRVGIENFIRAKYEEKRWVSRGEKARSPPRVEQERRKSVERSGPGYEHGHSSSPVNLFEERKTIPASRTRNNVAATRINLPVPPQGPSQVIKPQQKMESAATPVEREKQAVNVAPASDPPKVDFATDLFNMLSMDDSTTNTSEATPGDTPADDNSWAGFQSAGSGQTAEKIVTAKPAESSSPPASSSDFEDLFKDTPNLTTQQAPKDVKGDIMSLFEKTNIVSPFAMHQQQVAMLAQQQALYMAAAKAAGGTPNGVNQQAIANALNVASANWSNPGGYQIPGMTNPVGGQADLQKLMQNMNMNANMNTRPAQPQENTLQYPSSSFYTMGQANQVNGMTPNSTGKPQSSSATQPTSTTPSSQSGKDFDFSSLMDGMFTKH

SEQ ID NO: 38638 - protein, 397 aa, Arabidopsis thaliana
  peptide (1)..(397): Ceres Seq. ID no. 12328929
  misc_feature (1)..(153): Homolog of NCBI NO: 10435055 NR Description: unnamed protein product [Homo sapiens]
  misc_feature (1)..(342): Homolog of NCBI NO: 28077013 NR Description: stromal membrane-associated protein [Mus
  misc_feature (1)..(221): Homolog of NCBI NO: 24651922 NR Description: CG8243-PA [Drosophila melanogaster]
  misc_feature (1)..(221): Homolog of NCBI NO: 20152063 NR Description: RE02759p [Drosophila melanogaster]
  misc_feature (1)..(31): Homolog of NCBI NO: 15229090 NR Description: unknown protein; protein id: At3g17660.1
  misc_feature (1)..(127): Homolog of NCBI NO: 9294154 NR Description: emb|CAB07858.1~gene_id:MKP6.22~similar to unknown
  misc_feature (1)..(396): Homolog of NCBI NO: 34898734 NR Description: contains ESTs
  misc_feature (1)..(397): Homolog of NCBI NO: 10441352 NR Description: ARF GAP-like zinc finger-containing protein ZIGA3
  misc_feature (1)..(397): Homolog of NCBI NO: 21618169 NR Description: ARF GAP-like zinc finger-containing protein ZIGA3
  misc_feature (1)..(397): Homolog of NCBI NO: 18423615 NR Description: expressed protein
MGNDKANSYWEAELPPNYDRVGIENFIRAKYEEKRWVSRGEKARSPPRVEQERRKSVERSGPGYEHGHSSSPVNLFEERKTIPASRTRNNVAATRINLPVPPQGPSQVIKPQQKMESAATPVEREKQAVNVAPASDPPKVDFATDLFNMLSMDDSTTNTSEATPGDTPADDNSWAGFQSAGSGQTAEKIVTAKPAESSSPPASSSDFEDLFKDTPNLTTQQAPKDVKGDIMSLFEKTNIVSPFAMHQQQVAMLAQQQALYMAAAKAAGGTPNGVNQQAIANALNVASANWSNPGGYQIPGMTNPVGGQADLQKLMQNMNMNANMNTRPAQPQENTLQYPSSSFYTMGQANQVNGMTPNSTGKPQSSSATQPTSTTPSSQSGKDFDFSSLMDGMFTKH

SEQ ID NO: 38639 - DNA, 1258 bp, Arabidopsis thaliana
  misc_feature (1)..(1258): Ceres Seq. ID no. 12323144
  misc_feature: MA Experiment ID: 108595 Result: Up-regulated in Transcription
  misc_feature: MA Experiment 108595 PARAMETER Experiment Name: At_Ler-pi_Ovule_cDNA_P Parameter: Plant Line Value: null
  misc_feature: MA Experiment ID: 20001905 Result: Up-regulated in Transcription
  misc_feature: MA Experiment 20001905 PARAMETER Experiment Name: At_Drought_Reproduction_P Parameter: Age (day) Value: 40
  misc_feature: MA Experiment 20001905 PARAMETER Experiment Name: At_Drought_Reproduction_P Parameter: Organism Value: A. thaliana
  misc_feature: MA Experiment 20001905 PARAMETER Experiment Name: At_Drought_Reproduction_P Parameter: Plant Line Value: WS
  misc_feature: MA Experiment 20001905 PARAMETER Experiment Name: At_Drought_Reproduction_P Parameter: Timepoint (day) Value: 10
  misc_feature: MA Experiment 20001905 PARAMETER Experiment Name: At_Drought_Reproduction_P Parameter: Tissue Value: Rosettes
  misc_feature: MA Experiment 20001905 PARAMETER Experiment Name: At_Drought_Reproduction_P Parameter: Treatment Value: Drought vs. No Drought
acggagattgtaacaaggaaaccgccgtcgccggatctgatagtgcatatccatgaagtagaagacgaagaaacttactttctgatcttagaacggagtatatgtacagaagattcgcgtccctcaatttttgatctcaagggtcgggtttacctttttttccttcttatttttggtggctttgcgttttctcattcgacgatttctggatttggggatttcaaaaccatgaggaagaagctcgatactcggttcccagctgctcgtattaaaaagattatgcaagctgatgaggatgttggcaagatagctttggcagtgcctgtcttagtctcaaaatctttggagttgttcttgcaagacctttgtgatcgtacatatgaaattacccttgaaagaggtgccaagactgtgagctcattgcacctaaaacattgtgtggaaagatataacgtgtttgattttctgagggaagttgtgagtaaggtgcctgactatggccattcccaagggcaaggacatggtgatgttaccatggatgatcgcagcatctccaagagaaggaagcccatcagcgatgaagtgaatgacagtgacgaggaatataagaaaagcaaaacgcaagagatagggagtgctaagaccagtggcaggggtggtagaggaagagggcgaggaagaggtcgtggtggacgagctgcaaaagcagccgaaagagagggtctcaaccgcgagatggaagtagaagccgccaattctggacagccaccaccagaagacaatgtcaagatgcatgcgtcagagtcatcaccacaagaggatgagaagaaaggcatcgacggcacagcagcatcgaacgaagacaccaagcaacaccttcaaagtcccaaagaaggcattgactttgatctcaacgctgaatccctcgacctaaacgagaccaaactggcaccagccacaggcacaaccacaaccacaactgcagcaacagactctgaggagtattcgggctggcctatgatggacataagcaaaatggatccagcacagcttgctagtctgggtaagaggatagacgaggatgaggaagattatgacgaagaaggctaagtcataacagcactataggatatatagagtagcagcgtttagcagtttgtctagaaaatgcttcttctgtcatcaaaatcttctcctgtttccatttattgtatgaaccaaagattgcatgcactctatgaaacttaatttattctcg

SEQ ID NO: 38640 - protein, 369 aa, Arabidopsis thaliana
  peptide (1)..(369): Ceres Seq. ID no. 12323145
  misc_feature (83)..(147): Pfam Name: Histone-like transcription factor (CBF/NF-Y) and Pfam Description: Histone-like transcription factor (CBF/NF-Y)
  misc_feature (78)..(196): Homolog of NCBI NO: 28279647 NR Description: Similar to Dr1 associated protein 1 (negative
  misc_feature (78)..(190): Homolog of NCBI NO: 18426973 NR Description: DR1-associated protein 1
  misc_feature (78)..(190): Homolog of NCBI NO: 27661225 NR Description: similar to RIKEN cDNA 2310074H19
  misc_feature (78)..(337): Homolog of NCBI NO: 10242351 NR Description: NC2alpha [Drosophila melanogaster]
  misc_feature (78)..(337): Homolog of NCBI NO: 24657218 NR Description: CG10318-PA [Drosophila melanogaster]
  misc_feature (105)..(316): Homolog of NCBI NO: 15239766 NR Description: putative protein; protein id: At5g19490.1
  misc_feature (77)..(275): Homolog of NCBI NO: 18481626 NR Description: repressor protein [Zea mays]
  misc_feature (77)..(271): Homolog of NCBI NO: 18481624 NR Description: repressor protein [Oryza sativa]
  misc_feature (88)..(369): Homolog of NCBI NO: 12321975 NR Description: unknown protein; 69004-67516 [Arabidopsis
  misc_feature (77)..(369): Homolog of NCBI NO: 30682195 NR Description: transcription factor Hap5a, putative [Arabidopsis
TEIVTRKPPSPDLIVHIHEVEDEETYFLILERSICTEDSRPSIFDLKGRVYLFFLLIFGGFAFSHSTISGFGDFKTMRKKLDTRFPAARIKKIMQADEDVGKIALAVPVLVSKSLELFLQDLCDRTYEITLERGAKTVSSLHLKHCVERYNVFDFLREVVSKVPDYGHSQGQGHGDVTMDDRSISKRRKPISDEVNDSDEEYKKSKTQEIGSAKTSGRGGRGRGRGRGRGGRAAKAAEREGLNREMEVEAANSGQPPPEDNVKMHASESSPQEDEKKGIDGTAASNEDTKQHLQSPKEGIDFDLNAESLDLNETKLAPATGTTTTTTAATDSEEYSGWPMMDISKMDPAQLASLGKRIDEDEEDYDEEG

SEQ ID NO: 38641 - protein, 293 aa, Arabidopsis thaliana
  peptide (1)..(293): Ceres Seq. ID no. 12323146
  misc_feature (7)..(71): Pfam Name: Histone-like transcription factor (CBF/NF-Y) and Pfam Description: Histone-like transcription factor (CBF/NF-Y)
  misc_feature (2)..(120): Homolog of NCBI NO: 28279647 NR Description: Similar to Dr1 associated protein 1 (negative
  misc_feature (2)..(114): Homolog of NCBI NO: 18426973 NR Description: DR1-associated protein 1
  misc_feature (2)..(114): Homolog of NCBI NO: 27661225 NR Description: similar to RIKEN cDNA 2310074H19
  misc_feature (2)..(261): Homolog of NCBI NO: 10242351 NR Description: NC2alpha [Drosophila melanogaster]
  misc_feature (2)..(261): Homolog of NCBI NO: 24657218 NR Description: CG10318-PA [Drosophila melanogaster]
  misc_feature (29)..(240): Homolog of NCBI NO: 15239766 NR Description: putative protein; protein id: At5g19490.1
  misc_feature (1)..(199): Homolog of NCBI NO: 18481626 NR Description: repressor protein [Zea mays]
  misc_feature (1)..(195): Homolog of NCBI NO: 18481624 NR Description: repressor protein [Oryza sativa]
  misc_feature (12)..(293): Homolog of NCBI NO: 12321975 NR Description: unknown protein; 69004-67516 [Arabidopsis
  misc_feature (1)..(293): Homolog of NCBI NO: 30682195 NR Description: transcription factor Hap5a, putative [Arabidopsis
MRKKLDTRFPAARIKKIMQADEDVGKIALAVPVLVSKSLELFLQDLCDRTYEITLERGAKTVSSLHLKHCVERYNVFDFLREVVSKVPDYGHSQGQGHGDVTMDDRSISKRRKPISDEVNDSDEEYKKSKTQEIGSAKTSGRGGRGRGRGRGRGGRAAKAAEREGLNREMEVEAANSGQPPPEDNVKMHASESSPQEDEKKGIDGTAASNEDTKQHLQSPKEGIDFDLNAESLDLNETKLAPATGTTTTTTAATDSEEYSGWPMMDISKMDPAQLASLGKRIDEDEEDYDEEG

SEQ ID NO: 38642 - protein, 276 aa, Arabidopsis thaliana
  peptide (1)..(276): Ceres Seq. ID no. 12323147
  misc_feature (1)..(54): Pfam Name: Histone-like transcription factor (CBF/NF-Y) and Pfam Description: Histone-like transcription factor (CBF/NF-Y)
  misc_feature (1)..(103): Homolog of NCBI NO: 28279647 NR Description: Similar to Dr1 associated protein 1 (negative
  misc_feature (1)..(97): Homolog of NCBI NO: 18426973 NR Description: DR1-associated protein 1
  misc_feature (1)..(97): Homolog of NCBI NO: 27661225 NR Description: similar to RIKEN cDNA 2310074H19
  misc_feature (1)..(244): Homolog of NCBI NO: 10242351 NR Description: NC2alpha [Drosophila melanogaster]
  misc_feature (1)..(244): Homolog of NCBI NO: 24657218 NR Description: CG10318-PA [Drosophila melanogaster]
  misc_feature (12)..(223): Homolog of NCBI NO: 15239766 NR Description: putative protein; protein id: At5g19490.1
  misc_feature (1)..(182): Homolog of NCBI NO: 18481626 NR Description: repressor protein [Zea mays]
  misc_feature (1)..(178): Homolog of NCBI NO: 18481624 NR Description: repressor protein [Oryza sativa]
  misc_feature (1)..(276): Homolog of NCBI NO: 12321975 NR Description: unknown protein; 69004-67516 [Arabidopsis
  misc_feature (1)..(276): Homolog of NCBI NO: 30682195 NR Description: transcription factor Hap5a, putative [Arabidopsis
MQADEDVGKIALAVPVLVSKSLELFLQDLCDRTYEITLERGAKTVSSLHLKHCVERYNVFDFLREVVSKVPDYGHSQGQGHGDVTMDDRSISKRRKPISDEVNDSDEEYKKSKTQEIGSAKTSGRGGRGRGRGRGRGGRAAKAAEREGLNREMEVEAANSGQPPPEDNVKMHASESSPQEDEKKGIDGTAASNEDTKQHLQSPKEGIDFDLNAESLDLNETKLAPATGTTTTTTAATDSEEYSGWPMMDISKMDPAQLASLGKRIDEDEEDYDEEG

SEQ ID NO: 38643 - DNA, 1348 bp, Arabidopsis thaliana
  misc_feature (1)..(1348): Ceres Seq. ID no. 13489207
  misc_feature: MA Experiment ID: 108434 Result: Down-regulated in Transcription
  misc_feature: MA Experiment 108434 PARAMETER Experiment Name: At_Root_Tips_cDNA_P Parameter: Tissue Value: Root Tips
  misc_feature: MA Experiment ID: 108462 Result: Down-regulated in Transcription
  misc_feature: MA Experiment 108462 PARAMETER Experiment Name: At_Germinating_Seeds_cDNA_P Parameter: Age (day) Value: 2 vs. 0
  misc_feature: MA Experiment 108462 PARAMETER Experiment Name: At_Germinating_Seeds_cDNA_P Parameter: Tissue Value: Germinating Seeds
  misc_feature: MA Experiment ID: 108463 Result: Down-regulated in Transcription
  misc_feature: MA Experiment 108463 PARAMETER Experiment Name: At_Germinating_Seeds_cDNA_P Parameter: Age (day) Value: 3 vs. 0
  misc_feature: MA Experiment 108463 PARAMETER Experiment Name: At_Germinating_Seeds_cDNA_P Parameter: Tissue Value: Germinating Seeds
  misc_feature: MA Experiment ID: 108464 Result: Down-regulated in Transcription
  misc_feature: MA Experiment 108464 PARAMETER Experiment Name: At_Germinating_Seeds_cDNA_P Parameter: Age (day) Value: 4 vs. 0
  misc_feature: MA Experiment 108464 PARAMETER Experiment Name: At_Germinating_Seeds_cDNA_P Parameter: Tissue Value: Germinating Seeds
  misc_feature: MA Experiment ID: 108561 Result: Down-regulated in Transcription
  misc_feature: MA Experiment 108561 PARAMETER Experiment Name: At_100uM_ABA_cDNA_P Parameter: Timepoint (hr) Value: 6
  misc_feature: MA Experiment 108561 PARAMETER Experiment Name: At_100uM_ABA_cDNA_P Parameter: Tissue Value: Aerial
  misc_feature: MA Experiment 108561 PARAMETER Experiment Name: At_100uM_ABA_cDNA_P Parameter: Treatment Value: 100uM ABA vs. No Treatment
  misc_feature: MA Experiment ID: 108574 Result: Up-regulated in Transcription
  misc_feature: MA Experiment 108574 PARAMETER Experiment Name: At_Wounding__cDNA_P Parameter: Timepoint (hr) Value: 1
  misc_feature: MA Experiment 108574 PARAMETER Experiment Name: At_Wounding__cDNA_P Parameter: Tissue Value: Aerial
  misc_feature: MA Experiment 108574 PARAMETER Experiment Name: At_Wounding__cDNA_P Parameter: Treatment Value: Wounding vs. No Wounding
  misc_feature: MA Experiment ID: 108577 Result: Down-regulated in Transcription
  misc_feature: MA Experiment 108577 PARAMETER Experiment Name: At_42deg_Heat_cDNA_P Parameter: Temperature (deg C) Value: 42 vs. 22
  misc_feature: MA Experiment 108577 PARAMETER Experiment Name: At_42deg_Heat_cDNA_P Parameter: Timepoint (hr) Value: 6
  misc_feature: MA Experiment 108577 PARAMETER Experiment Name: At_42deg_Heat_cDNA_P Parameter: Tissue Value: Aerial
  misc_feature: MA Experiment ID: 108579 Result: Up-regulated in Transcription
  misc_feature: MA Experiment 108579 PARAMETER Experiment Name: At_4deg_Cold_cDNA_P Parameter: Temperature (deg C) Value: 4 vs. 22
  misc_feature: MA Experiment 108579 PARAMETER Experiment Name: At_4deg_Cold_cDNA_P Parameter: Timepoint (hr) Value: 6
  misc_feature: MA Experiment 108579 PARAMETER Experiment Name: At_4deg_Cold_cDNA_P Parameter: Tissue Value: Aerial
  misc_feature: MA Experiment ID: 20000111 Result: Down-regulated in Transcription
  misc_feature: MA Experiment 20000111 PARAMETER Experiment Name: At_42deg_Heat_cDNA_P Parameter: Temperature (deg C) Value: 42 vs. 22
  misc_feature: MA Experiment 20000111 PARAMETER Experiment Name: At_42deg_Heat_cDNA_P Parameter: Timepoint (hr) Value: 6
  misc_feature: MA Experiment 20000111 PARAMETER Experiment Name: At_42deg_Heat_cDNA_P Parameter: Tissue Value: Aerial
  misc_feature: MA Experiment ID: 20000113 Result: Down-regulated in Transcription
  misc_feature: MA Experiment 20000113 PARAMETER Experiment Name: At_42deg_Heat_cDNA_P Parameter: Temperature (deg C) Value: 42 vs. 22
  misc_feature: MA Experiment 20000113 PARAMETER Experiment Name: At_42deg_Heat_cDNA_P Parameter: Timepoint (hr) Value: 8
  misc_feature: MA Experiment 20000113 PARAMETER Experiment Name: At_42deg_Heat_cDNA_P Parameter: Tissue Value: Aerial
  misc_feature: MA Experiment ID: 20000171 Result: Down-regulated in Transcription
  misc_feature: MA Experiment 20000171 PARAMETER Experiment Name: At_42deg_Heat_P Parameter: Age (day) Value: 14
  misc_feature: MA Experiment 20000171 PARAMETER Experiment Name: At_42deg_Heat_P Parameter: Organism Value: A. thaliana
  misc_feature: MA Experiment 20000171 PARAMETER Experiment Name: At_42deg_Heat_P Parameter: Plant Line Value: WS
  misc_feature: MA Experiment 20000171 PARAMETER Experiment Name: At_42deg_Heat_P Parameter: Temperature (deg C) Value: 42 vs. 22
  misc_feature: MA Experiment 20000171 PARAMETER Experiment Name: At_42deg_Heat_P Parameter: Timepoint (hr) Value: 1
  misc_feature: MA Experiment 20000171 PARAMETER Experiment Name: At_42deg_Heat_P Parameter: Tissue Value: Aerial
  misc_feature: MA Experiment ID: 20000173 Result: Down-regulated in Transcription
  misc_feature: MA Experiment 20000173 PARAMETER Experiment Name: At_42deg_Heat_P Parameter: Age (day) Value: 14
  misc_feature: MA Experiment 20000173 PARAMETER Experiment Name: At_42deg_Heat_P Parameter: Organism Value: A. thaliana
  misc_feature: MA Experiment 20000173 PARAMETER Experiment Name: At_42deg_Heat_P Parameter: Plant Line Value: WS
  misc_feature: MA Experiment 20000173 PARAMETER Experiment Name: At_42deg_Heat_P Parameter: Temperature (deg C) Value: 42 vs. 22
  misc_feature: MA Experiment 20000173 PARAMETER Experiment Name: At_42deg_Heat_P Parameter: Timepoint (hr) Value: 6
  misc_feature: MA Experiment 20000173 PARAMETER Experiment Name: At_42deg_Heat_P Parameter: Tissue Value: Aerial
  misc_feature: MA Experiment ID: 20000180 Result: Down-regulated in Transcription
  misc_feature: MA Experiment 20000180 PARAMETER Experiment Name: At_Germinating_Seeds_P Parameter: Age (hr) Value: 24 vs. 0
  misc_feature: MA Experiment 20000180 PARAMETER Experiment Name: At_Germinating_Seeds_P Parameter: Tissue Value: Germinating Seeds
  misc_feature: MA Experiment ID: 20000184 Result: Down-regulated in Transcription
  misc_feature: MA Experiment 20000184 PARAMETER Experiment Name: At_Shoots__P Parameter: Age (day) Value: 7
  misc_feature: MA Experiment 20000184 PARAMETER Experiment Name: At_Shoots__P Parameter: Tissue Value: Shoots vs. Whole Plant
  misc_feature: MA Experiment ID: 20000211 Result: Up-regulated in Transcription
  misc_feature: MA Experiment 20000211 PARAMETER Experiment Name: At_0.001percent_MeJA__P Parameter: Age (day) Value: 14
  misc_feature: MA Experiment 20000211 PARAMETER Experiment Name: At_0.001percent_MeJA__P Parameter: Organism Value: A. thaliana
  misc_feature: MA Experiment 20000211 PARAMETER Experiment Name: At_0.001percent_MeJA__P Parameter: Plant Line Value: WS
  misc_feature: MA Experiment 20000211 PARAMETER Experiment Name: At_0.001percent_MeJA__P Parameter: Timepoint (hr) Value: 1
  misc_feature: MA Experiment 20000211 PARAMETER Experiment Name: At_0.001percent_MeJA__P Parameter: Tissue Value: Aerial
  misc_feature: MA Experiment 20000211 PARAMETER Experiment Name: At_0.001percent_MeJA__P Parameter: Treatment Value: 0.001percent MeJA vs. No Treatment
  misc_feature: MA Experiment ID: 20000213 Result: Up-regulated in Transcription
  misc_feature: MA Experiment 20000213 PARAMETER Experiment Name: At_4deg_Cold_P Parameter: Timepoint (hr) Value: 2
  misc_feature: MA Experiment ID: 20000234 Result: Down-regulated in Transcription
  misc_feature: MA Experiment 20000234 PARAMETER Experiment Name: At_Siliques_P Parameter: Age (day) Value: 21
  misc_feature: MA Experiment 20000234 PARAMETER Experiment Name: At_Siliques_P Parameter: Organism Value: A. thaliana
  misc_feature: MA Experiment 20000234 PARAMETER Experiment Name: At_Siliques_P Parameter: Plant Line Value: WS
  misc_feature: MA Experiment 20000234 PARAMETER Experiment Name: At_Siliques_P Parameter: Tissue Value: Less Than 5mm Siliques vs. Whole Plant
  misc_feature: MA Experiment ID: 20000235 Result: Down-regulated in Transcription
  misc_feature: MA Experiment 20000235 PARAMETER Experiment Name: At_Siliques_P Parameter: Age (day) Value: 21
  misc_feature: MA Experiment 20000235 PARAMETER Experiment Name: At_Siliques_P Parameter: Organism Value: A. thaliana
  misc_feature: MA Experiment 20000235 PARAMETER Experiment Name: At_Siliques_P Parameter: Plant Line Value: WS
  misc_feature: MA Experiment 20000235 PARAMETER Experiment Name: At_Siliques_P Parameter: Tissue Value: 5-10mm Siliques vs. Whole Plant
  misc_feature: MA Experiment ID: 20000264 Result: Down-regulated in Transcription
  misc_feature: MA Experiment 20000264 PARAMETER Experiment Name: At_Open_Flower_P Parameter: Age (day) Value: 21
  misc_feature: MA Experiment 20000264 PARAMETER Experiment Name: At_Open_Flower_P Parameter: Plant Line Value: WS
  misc_feature: MA Experiment 20000264 PARAMETER Experiment Name: At_Open_Flower_P Parameter: Tissue Value: Open Flower vs. Whole Plant
  misc_feature: MA Experiment ID: 20000265 Result: Down-regulated in Transcription
  misc_feature: MA Experiment 20000265 PARAMETER Experiment Name: At_Open_Flower_P Parameter: Age (day) Value: 21
  misc_feature: MA Experiment 20000265 PARAMETER Experiment Name: At_Open_Flower_P Parameter: Plant Line Value: WS
  misc_feature: MA Experiment 20000265 PARAMETER Experiment Name: At_Open_Flower_P Parameter: Tissue Value: Closed Flower vs. Whole Plant
  misc_feature: MA Experiment ID: 20000286 Result: Down-regulated in Transcription
  misc_feature: MA Experiment 20000286 PARAMETER Experiment Name: At_Open_Flower_P Parameter: Age (day) Value: 21
  misc_feature: MA Experiment 20000286 PARAMETER Experiment Name: At_Open_Flower_P Parameter: Plant Line Value: WS
  misc_feature: MA Experiment 20000286 PARAMETER Experiment Name: At_Open_Flower_P Parameter: Tissue Value: Half Open vs. Whole Plant
  misc_feature: MA Experiment ID: 20000438 Result: Down-regulated in Transcription
  misc_feature: MA Experiment 20000438 PARAMETER Experiment Name: At_Shoots__P Parameter: Age (day) Value: 14
  misc_feature: MA Experiment 20000438 PARAMETER Experiment Name: At_Shoots__P Parameter: Tissue Value: Shoots vs. Whole Plant
  misc_feature: MA Experiment ID: 20000460 Result: Up-regulated in Transcription
  misc_feature: MA Experiment 20000460 PARAMETER Experiment Name: At_10percent_PEG_P Parameter: Age (day) Value: 12
  misc_feature: MA Experiment 20000460 PARAMETER Experiment Name: At_10percent_PEG_P Parameter: Organism Value: A. thaliana
  misc_feature: MA Experiment 20000460 PARAMETER Experiment Name: At_10percent_PEG_P Parameter: Plant Line Value: WS
  misc_feature: MA Experiment 20000460 PARAMETER Experiment Name: At_10percent_PEG_P Parameter: Timepoint (day) Value: 12
  misc_feature: MA Experiment 20000460 PARAMETER Experiment Name: At_10percent_PEG_P Parameter: Tissue Value: Whole Plant
  misc_feature: MA Experiment 20000460 PARAMETER Experiment Name: At_10percent_PEG_P Parameter: Treatment Value: 10percent PEG vs. No Treatment
  misc_feature: MA Experiment ID: 20000495 Result: Down-regulated in Transcription
  misc_feature: MA Experiment 20000495 PARAMETER Experiment Name: At_Guard_Cells_P Parameter: Harvest Date Value: 8/2/2002
  misc_feature: MA Experiment 20000495 PARAMETER Experiment Name: At_Guard_Cells_P Parameter: Organism Value: A. thaliana
  misc_feature: MA Experiment 20000495 PARAMETER Experiment Name: At_Guard_Cells_P Parameter: Tissue Value: Guard Cells vs. Leaves
  misc_feature: MA Experiment ID: 20000574 Result: Down-regulated in Transcription
  misc_feature: MA Experiment 20000574 PARAMETER Experiment Name: At_100uM_ABA_Mutants__P Parameter: Organism Value: A. thaliana
  misc_feature: MA Experiment 20000574 PARAMETER Experiment Name: At_100uM_ABA_Mutants__P Parameter: Plant Line Value: CS23 vs. Ler wt
  misc_feature: MA Experiment 20000574 PARAMETER Experiment Name: At_100uM_ABA_Mutants__P Parameter: Timepoint (hr) Value: N/A
  misc_feature: MA Experiment 20000574 PARAMETER Experiment Name: At_100uM_ABA_Mutants__P Parameter: Tissue Value: Whole Plant
  misc_feature: MA Experiment 20000574 PARAMETER Experiment Name: At_100uM_ABA_Mutants__P Parameter: Treatment Value: None
  misc_feature: MA Experiment ID: 20000606 Result: Up-regulated in Transcription
  misc_feature: MA Experiment 20000606 PARAMETER Experiment Name: At_CS8548_Mutant_P Parameter: Age (day) Value: 14
  misc_feature: MA Experiment 20000606 PARAMETER Experiment Name: At_CS8548_Mutant_P Parameter: Plant Line Value: CS8548 vs. wt
  misc_feature: MA Experiment 20000606 PARAMETER Experiment Name: At_CS8548_Mutant_P Parameter: Tissue Value: Whole Plant
  misc_feature: MA Experiment ID: 20000794 Result: Down-regulated in Transcription
  misc_feature: MA Experiment 20000794 PARAMETER Experiment Name: At_Petals_P Parameter: Age (day) Value: 23-25 days
  misc_feature: MA Experiment 20000794 PARAMETER Experiment Name: At_Petals_P Parameter: Plant Line Value: WS
  misc_feature: MA Experiment 20000794 PARAMETER Experiment Name: At_Petals_P Parameter: Tissue Value: Petals vs. Whole plant
  misc_feature: MA Experiment ID: 20001247 Result: Up-regulated in Transcription
  misc_feature: MA Experiment 20001247 PARAMETER Experiment Name: At_Far-red-induction_P Parameter: Age (day) Value: 7
  misc_feature: MA Experiment 20001247 PARAMETER Experiment Name: At_Far-red-induction_P Parameter: Light Value: Far-red vs. White
  misc_feature: MA Experiment 20001247 PARAMETER Experiment Name: At_Far-red-induction_P Parameter: Organism Value: A. thaliana
  misc_feature: MA Experiment 20001247 PARAMETER Experiment Name: At_Far-red-induction_P Parameter: Plant Line Value: Columbia
  misc_feature: MA Experiment 20001247 PARAMETER Experiment Name: At_Far-red-induction_P Parameter: Timepoint (hr) Value: 1
  misc_feature: MA Experiment 20001247 PARAMETER Experiment Name: At_Far-red-induction_P Parameter: Tissue Value: Whole Plant
  misc_feature: MA Experiment ID: 20001451 Result: Down-regulated in Transcription
  misc_feature: MA Experiment 20001451 PARAMETER Experiment Name: At_Far-red-induction_P Parameter: Age (day) Value: 7
  misc_feature: MA Experiment 20001451 PARAMETER Experiment Name: At_Far-red-induction_P Parameter: Light Value: Far-red vs. White
  misc_feature: MA Experiment 20001451 PARAMETER Experiment Name: At_Far-red-induction_P Parameter: Organism Value: A. thaliana
  misc_feature: MA Experiment 20001451 PARAMETER Experiment Name: At_Far-red-induction_P Parameter: Plant Line Value: Columbia
  misc_feature: MA Experiment 20001451 PARAMETER Experiment Name: At_Far-red-induction_P Parameter: Timepoint (hr) Value: 24
  misc_feature: MA Experiment 20001451 PARAMETER Experiment Name: At_Far-red-induction_P Parameter: Tissue Value: Whole Plant
  misc_feature: MA Experiment ID: 20001557 Result: Up-regulated in Transcription
  misc_feature: MA Experiment 20001557 PARAMETER Experiment Name: At_Drought_Soil_Dry_P Parameter: Age (day) Value: 27
  misc_feature: MA Experiment 20001557 PARAMETER Experiment Name: At_Drought_Soil_Dry_P Parameter: Organism Value: A. thaliana
  misc_feature: MA Experiment 20001557 PARAMETER Experiment Name: At_Drought_Soil_Dry_P Parameter: Plant Line Value: WS
  misc_feature: MA Experiment 20001557 PARAMETER Experiment Name: At_Drought_Soil_Dry_P Parameter: Post Timepoint (hr) Value: 3
  misc_feature: MA Experiment 20001557 PARAMETER Experiment Name: At_Drought_Soil_Dry_P Parameter: Post-Treatment Value: Re-Water vs. No Drought
  misc_feature: MA Experiment 20001557 PARAMETER Experiment Name: At_Drought_Soil_Dry_P Parameter: Timepoint (day) Value: 13
  misc_feature: MA Experiment 20001557 PARAMETER Experiment Name: At_Drought_Soil_Dry_P Parameter: Treatment Value: Drought vs. No Drought
  misc_feature: MA Experiment ID: 20001558 Result: Up-regulated in Transcription
  misc_feature: MA Experiment 20001558 PARAMETER Experiment Name: At_Drought_Soil_Dry_P Parameter: Age (day) Value: 27
  misc_feature: MA Experiment 20001558 PARAMETER Experiment Name: At_Drought_Soil_Dry_P Parameter: Organism Value: A. thaliana
  misc_feature: MA Experiment 20001558 PARAMETER Experiment Name: At_Drought_Soil_Dry_P Parameter: Plant Line Value: WS
  misc_feature: MA Experiment 20001558 PARAMETER Experiment Name: At_Drought_Soil_Dry_P Parameter: Post Timepoint (hr) Value: 6
  misc_feature: MA Experiment 20001558 PARAMETER Experiment Name: At_Drought_Soil_Dry_P Parameter: Post-Treatment Value: Re-Water vs. No Drought
  misc_feature: MA Experiment 20001558 PARAMETER Experiment Name: At_Drought_Soil_Dry_P Parameter: Timepoint (day) Value: 13
  misc_feature: MA Experiment 20001558 PARAMETER Experiment Name: At_Drought_Soil_Dry_P Parameter: Treatment Value: Drought vs. No Drought
  misc_feature: MA Experiment ID: 20001560 Result: Up-regulated in Transcription
  misc_feature: MA Experiment 20001560 PARAMETER Experiment Name: At_Drought_Soil_Dry_P Parameter: Age (day) Value: 28
  misc_feature: MA Experiment 20001560 PARAMETER Experiment Name: At_Drought_Soil_Dry_P Parameter: Organism Value: A. thaliana
  misc_feature: MA Experiment 20001560 PARAMETER Experiment Name: At_Drought_Soil_Dry_P Parameter: Plant Line Value: WS
  misc_feature: MA Experiment 20001560 PARAMETER Experiment Name: At_Drought_Soil_Dry_P Parameter: Post Timepoint (hr) Value: None
  misc_feature: MA Experiment 20001560 PARAMETER Experiment Name: At_Drought_Soil_Dry_P Parameter: Post-Treatment Value: None
  misc_feature: MA Experiment 20001560 PARAMETER Experiment Name: At_Drought_Soil_Dry_P Parameter: Timepoint (day) Value: 14
  misc_feature: MA Experiment 20001560 PARAMETER Experiment Name: At_Drought_Soil_Dry_P Parameter: Treatment Value: Drought vs. No Drought
  misc_feature: MA Experiment ID: 20001904 Result: Down-regulated in Transcription
  misc_feature: MA Experiment 20001904 PARAMETER Experiment Name: At_Drought_Reproduction_P Parameter: Age (day) Value: 37
  misc_feature: MA Experiment 20001904 PARAMETER Experiment Name: At_Drought_Reproduction_P Parameter: Organism Value: A. thaliana
  misc_feature: MA Experiment 20001904 PARAMETER Experiment Name: At_Drought_Reproduction_P Parameter: Plant Line Value: WS
  misc_feature: MA Experiment 20001904 PARAMETER Experiment Name: At_Drought_Reproduction_P Parameter: Timepoint (day) Value: 7
  misc_feature: MA Experiment 20001904 PARAMETER Experiment Name: At_Drought_Reproduction_P Parameter: Tissue Value: Rosettes
  misc_feature: MA Experiment 20001904 PARAMETER Experiment Name: At_Drought_Reproduction_P Parameter: Treatment Value: Drought vs. No Drought
  misc_feature: MA Experiment ID: 20001910 Result: Down-regulated in Transcription
  misc_feature: MA Experiment 20001910 PARAMETER Experiment Name: At_Drought_Reproduction_P Parameter: Age (day) Value: 37
  misc_feature: MA Experiment 20001910 PARAMETER Experiment Name: At_Drought_Reproduction_P Parameter: Organism Value: A. thaliana
  misc_feature: MA Experiment 20001910 PARAMETER Experiment Name: At_Drought_Reproduction_P Parameter: Plant Line Value: WS
  misc_feature: MA Experiment 20001910 PARAMETER Experiment Name: At_Drought_Reproduction_P Parameter: Timepoint (day) Value: 7
  misc_feature: MA Experiment 20001910 PARAMETER Experiment Name: At_Drought_Reproduction_P Parameter: Tissue Value: Flowers
  misc_feature: MA Experiment 20001910 PARAMETER Experiment Name: At_Drought_Reproduction_P Parameter: Treatment Value: Drought vs. No Drought
atttcataaatcatagagagagagagagagagagagagagagtttggaaacattccaaaaccagaactcgatattatttcaccaaagaatgatagaaacaagaactatctttttataaaactctttacaccccaaaagaaaatgtctcactcgttttgccttataatatttctttcaacaacaacccaaatctacaaaaaatcccaataaaaaaaaacttcagtctgtttgacattttgtcgaacacttggacggcatcacaaaaagctctaaactttctgactaccaatggcggattcgtcttccgacaaggagaagaaggaaaataataagcagcccgtgtatcgtggagtccgtatgaggagctggggaaaatgggtatcggagattcgcgaaccgaggaagaaatcgagaatctggctcgggacttttccgacggcggagatggctatgcgtgctcacgacgtggcggctatgagtatcaaaggaacttcagccattctcaatttccctgagctctctaaacttcttccccgacccgtttcgctcagccctcgtgacgtcagagctgcggcgaccaaagctgctctcatggacttcgatacgacggcgtttcgttcggatactgagactagcgaaacgacgacgtcgaataaaatgtcagagagtagtgagagtaacgaaacggtgtcgttctcatcgtcgtcttggtcctctgttacgagcattgaggaaagtacagtctccgacgatcttgacgagatcgtaaagttaccgagtctaggaacgagcctaaacgagtcgaacgagttcgtgatatttgactcgttggaggatttggtgtacatgcctcggtggttaagcggtacggaagaagaagtttttacgtataataacaatgattcttcgttgaattactcatcagttttcgaatcttggaaacattttccctgagaaaagaaagaagccatattttctctctctttttcgccatttttggttttaagttttttgatgggattctctctgtttttgctatgcgtgagatatctctctttgtggaatagataacttttctgttgaaaatctcctaagtctgtgaaatgaacgacgatggaaatgtaagtgtgtatattagcccgaaataatgactgtatacattcttttttgcaagatcattagaaaaaaataaataggaaatgtggtttgtattagagtatagaattgattaagatcggtttagatcatcaatatcggtttaatgtctgtgaaccagaaccctctcattgtataagaggcttcaatgtaatatttcctaagcaagataatgagaatgatcgtttgtttt

SEQ ID NO: 38644 - protein, 221 aa, Arabidopsis thaliana
  peptide (1)..(221): Ceres Seq. ID no. 13489208
  misc_feature (16)..(80): Pfam Name: AP2 domain Pfam Description: AP2 domain
  misc_feature (3)..(175): Homolog of NCBI NO: 9279711 NR Description: transcription factor TINY-like protein
  misc_feature (8)..(177): Homolog of NCBI NO: 21592664 NR Description: putative AP2 domain transcription factor
  misc_feature (8)..(177): Homolog of NCBI NO: 15225381 NR Description: AP2 domain transcription factor TINY, putative
  misc_feature (19)..(219): Homolog of NCBI NO: 25992102 NR Description: dehydration responsive element binding protein
  misc_feature (3)..(204): Homolog of NCBI NO: 15232340 NR Description: AP2 domain transcription factor TINY, putative
  misc_feature (3)..(193): Homolog of NCBI NO: 15239501 NR Description: AP2 domain transcription factor TINY [Arabidopsis
  misc_feature (3)..(216): Homolog of NCBI NO: 15223860 NR Description: AP2 domain transcription factor TINY, putative
  misc_feature (2)..(196): Homolog of NCBI NO: 15239113 NR Description: AP2 domain transcription factor TINY, putative
  misc_feature (6)..(219): Homolog of NCBI NO: 25352180 NR Description: TINY-like AP2 domain transcription factor
  misc_feature (1)..(221): Homolog of NCBI NO: 15233928 NR Description: AP2 domain transcription factor TINY, putative
MADSSSDKEKKENNKQPVYRGVRMRSWGKWVSEIREPRKKSRIWLGTFPTAEMAMRAHDVAAMSIKGTSAILNFPELSKLLPRPVSLSPRDVRAAATKAALMDFDTTAFRSDTETSETTTSNKMSESSESNETVSFSSSSWSSVTSIEESTVSDDLDEIVKLPSLGTSLNESNEFVIFDSLEDLVYMPRWLSGTEEEVFTYNNNDSSLNYSSVFESWKHFP

SEQ ID NO: 38645 - protein, 198 aa, Arabidopsis thaliana
  peptide (1)..(198): Ceres Seq. ID no. 13489209
  misc_feature (1)..(57): Pfam Name: AP2 domain Pfam Description: AP2 domain
  misc_feature (1)..(152): Homolog of NCBI NO: 9279711 NR Description: transcription factor TINY-like protein
  misc_feature (1)..(154): Homolog of NCBI NO: 21592664 NR Description: putative AP2 domain transcription factor
  misc_feature (1)..(154): Homolog of NCBI NO: 15225381 NR Description: AP2 domain transcription factor TINY, putative
  misc_feature (1)..(196): Homolog of NCBI NO: 25992102 NR Description: dehydration responsive element binding protein
  misc_feature (1)..(181): Homolog of NCBI NO: 15232340 NR Description: AP2 domain transcription factor TINY, putative
  misc_feature (1)..(170): Homolog of NCBI NO: 15239501 NR Description: AP2 domain transcription factor TINY [Arabidopsis
  misc_feature (1)..(193): Homolog of NCBI NO: 15223860 NR Description: AP2 domain transcription factor TINY, putative
  misc_feature (1)..(173): Homolog of NCBI NO: 15239113 NR Description: AP2 domain transcription factor TINY, putative
  misc_feature (1)..(196): Homolog of NCBI NO: 25352180 NR Description: TINY-like AP2 domain transcription factor
  misc_feature (1)..(198): Homolog of NCBI NO: 15233928 NR Description: AP2 domain transcription factor TINY, putative
MRSWGKWVSEIREPRKKSRIWLGTFPTAEMAMRAHDVAAMSIKGTSAILNFPELSKLLPRPVSLSPRDVRAAATKAALMDFDTTAFRSDTETSETTTSNKMSESSESNETVSFSSSSWSSVTSIEESTVSDDLDEIVKLPSLGTSLNESNEFVIFDSLEDLVYMPRWLSGTEEEVFTYNNNDSSLNYSSVFESWKHFP

SEQ ID NO: 38646 - protein, 169 aa, Arabidopsis thaliana
  peptide (1)..(169): Ceres Seq. ID no. 13489210
  misc_feature (1)..(123): Homolog of NCBI NO: 9279711 NR Description: transcription factor TINY-like protein
  misc_feature (1)..(125): Homolog of NCBI NO: 21592664 NR Description: putative AP2 domain transcription factor
  misc_feature (1)..(125): Homolog of NCBI NO: 15225381 NR Description: AP2 domain transcription factor TINY, putative
  misc_feature (1)..(167): Homolog of NCBI NO: 25992102 NR Description: dehydration responsive element binding protein
  misc_feature (1)..(152): Homolog of NCBI NO: 15232340 NR Description: AP2 domain transcription factor TINY, putative
  misc_feature (1)..(141): Homolog of NCBI NO: 15239501 NR Description: AP2 domain transcription factor TINY [Arabidopsis
  misc_feature (1)..(164): Homolog of NCBI NO: 15223860 NR Description: AP2 domain transcription factor TINY, putative
  misc_feature (1)..(144): Homolog of NCBI NO: 15239113 NR Description: AP2 domain transcription factor TINY, putative
  misc_feature (1)..(167): Homolog of NCBI NO: 25352180 NR Description: TINY-like AP2 domain transcription factor
  misc_feature (1)..(169): Homolog of NCBI NO: 15233928 NR Description: AP2 domain transcription factor TINY, putative
MAMRAHDVAAMSIKGTSAILNFPELSKLLPRPVSLSPRDVRAAATKAALMDFDTTAFRSDTETSETTTSNKMSESSESNETVSFSSSSWSSVTSIEESTVSDDLDEIVKLPSLGTSLNESNEFVIFDSLEDLVYMPRWLSGTEEEVFTYNNNDSSLNYSSVFESWKHFP

SEQ ID NO: 38647 - DNA, 1509 bp, Arabidopsis thaliana
  misc_feature (1)..(1509): Ceres Seq. ID no. 12422481
  misc_feature: MA Experiment ID: 108434 Result: Up-regulated in Transcription
  misc_feature: MA Experiment 108434 PARAMETER Experiment Name: At_Root_Tips_cDNA_P Parameter: Tissue Value: Root Tips
  misc_feature: MA Experiment ID: 108462 Result: Down-regulated in Transcription
  misc_feature: MA Experiment 108462 PARAMETER Experiment Name: At_Germinating_Seeds_cDNA_P Parameter: Age (day) Value: 2 vs. 0
  misc_feature: MA Experiment 108462 PARAMETER Experiment Name: At_Germinating_Seeds_cDNA_P Parameter: Tissue Value: Germinating Seeds
  misc_feature: MA Experiment ID: 108464 Result: Down-regulated in Transcription
  misc_feature: MA Experiment 108464 PARAMETER Experiment Name: At_Germinating_Seeds_cDNA_P Parameter: Age (day) Value: 4 vs. 0
  misc_feature: MA Experiment 108464 PARAMETER Experiment Name: At_Germinating_Seeds_cDNA_P Parameter: Tissue Value: Germinating Seeds
  misc_feature: MA Experiment ID: 108573 Result: Up-regulated in Transcription
  misc_feature: MA Experiment 108573 PARAMETER Experiment Name: At_Drought_cDNA_P Parameter: Timepoint (hr) Value: 6
  misc_feature: MA Experiment 108573 PARAMETER Experiment Name: At_Drought_cDNA_P Parameter: Tissue Value: Aerial
  misc_feature: MA Experiment 108573 PARAMETER Experiment Name: At_Drought_cDNA_P Parameter: Treatment Value: Drought vs. No Drought
  misc_feature: MA Experiment ID: 108595 Result: Down-regulated in Transcription
  misc_feature: MA Experiment 108595 PARAMETER Experiment Name: At_Ler-pi_Ovule_cDNA_P Parameter: Plant Line Value: null
  misc_feature: MA Experiment ID: 20000179 Result: Down-regulated in Transcription
  misc_feature: MA Experiment 20000179 PARAMETER Experiment Name: At_Germinating_Seeds_P Parameter: Age (hr) Value: 6 vs. 0
  misc_feature: MA Experiment 20000179 PARAMETER Experiment Name: At_Germinating_Seeds_P Parameter: Tissue Value: Germinating Seeds
  misc_feature: MA Experiment ID: 20000180 Result: Down-regulated in Transcription
  misc_feature: MA Experiment 20000180 PARAMETER Experiment Name: At_Germinating_Seeds_P Parameter: Age (hr) Value: 24 vs. 0
  misc_feature: MA Experiment 20000180 PARAMETER Experiment Name: At_Germinating_Seeds_P Parameter: Tissue Value: Germinating Seeds
  misc_feature: MA Experiment ID: 20000224 Result: Down-regulated in Transcription
  misc_feature: MA Experiment ID: 20000306 Result: Down-regulated in Transcription
  misc_feature: MA Experiment 20000306 PARAMETER Experiment Name: At_Germinating_Seeds_Sub_P Parameter: Age (hr) Value: 6 vs. 0
  misc_feature: MA Experiment 20000306 PARAMETER Experiment Name: At_Germinating_Seeds_Sub_P Parameter: Organism Value: A. thaliana
  misc_feature: MA Experiment 20000306 PARAMETER Experiment Name: At_Germinating_Seeds_Sub_P Parameter: Plant Line Value: WS
  misc_feature: MA Experiment 20000306 PARAMETER Experiment Name: At_Germinating_Seeds_Sub_P Parameter: Tissue Value: Germinating Seeds
  misc_feature: MA Experiment ID: 20000307 Result: Down-regulated in Transcription
  misc_feature: MA Experiment 20000307 PARAMETER Experiment Name: At_Germinating_Seeds_Sub_P Parameter: Age (hr) Value: 24 vs. 0
  misc_feature: MA Experiment 20000307 PARAMETER Experiment Name: At_Germinating_Seeds_Sub_P Parameter: Organism Value: A. thaliana
  misc_feature: MA Experiment 20000307 PARAMETER Experiment Name: At_Germinating_Seeds_Sub_P Parameter: Plant Line Value: WS
  misc_feature: MA Experiment 20000307 PARAMETER Experiment Name: At_Germinating_Seeds_Sub_P Parameter: Tissue Value: Germinating Seeds
  misc_feature: MA Experiment ID: 20000329 Result: Up-regulated in Transcription
  misc_feature: MA Experiment 20000329 PARAMETER Experiment Name: At_4deg_Cold_Sub_P Parameter: Age (day) Value: 14
  misc_feature: MA Experiment 20000329 PARAMETER Experiment Name: At_4deg_Cold_Sub_P Parameter: Organism Value: A. thaliana
  misc_feature: MA Experiment 20000329 PARAMETER Experiment Name: At_4deg_Cold_Sub_P Parameter: Plant Line Value: WS
  misc_feature: MA Experiment 20000329 PARAMETER Experiment Name: At_4deg_Cold_Sub_P Parameter: Temperature (deg C) Value: 4 vs. 22
  misc_feature: MA Experiment 20000329 PARAMETER Experiment Name: At_4deg_Cold_Sub_P Parameter: Timepoint (hr) Value: 6
  misc_feature: MA Experiment 20000329 PARAMETER Experiment Name: At_4deg_Cold_Sub_P Parameter: Tissue Value: Aerial
  misc_feature: MA Experiment ID: 20000355 Result: Up-regulated in Transcription
  misc_feature: MA Experiment 20000355 PARAMETER Experiment Name: At_Siliques_Sub_P Parameter: Age (day) Value: 21
  misc_feature: MA Experiment 20000355 PARAMETER Experiment Name: At_Siliques_Sub_P Parameter: Organism Value: A. thaliana
  misc_feature: MA Experiment 20000355 PARAMETER Experiment Name: At_Siliques_Sub_P Parameter: Plant Line Value: WS
  misc_feature: MA Experiment 20000355 PARAMETER Experiment Name: At_Siliques_Sub_P Parameter: Tissue Value: Less Than 5mm Siliques vs. Whole Plant
  misc_feature: MA Experiment ID: 20000440 Result: Up-regulated in Transcription
  misc_feature: MA Experiment 20000440 PARAMETER Experiment Name: At_Closed-Flower__Sub_P Parameter: Tissue Value: Closed Flower vs. Whole Plant
  misc_feature: MA Experiment ID: 20001905 Result: Up-regulated in Transcription
  misc_feature: MA Experiment 20001905 PARAMETER Experiment Name: At_Drought_Reproduction_P Parameter: Age (day) Value: 40
  misc_feature: MA Experiment 20001905 PARAMETER Experiment Name: At_Drought_Reproduction_P Parameter: Organism Value: A. thaliana
  misc_feature: MA Experiment 20001905 PARAMETER Experiment Name: At_Drought_Reproduction_P Parameter: Plant Line Value: WS
  misc_feature: MA Experiment 20001905 PARAMETER Experiment Name: At_Drought_Reproduction_P Parameter: Timepoint (day) Value: 10
  misc_feature: MA Experiment 20001905 PARAMETER Experiment Name: At_Drought_Reproduction_P Parameter: Tissue Value: Rosettes
  misc_feature: MA Experiment 20001905 PARAMETER Experiment Name: At_Drought_Reproduction_P Parameter: Treatment Value: Drought vs. No Drought
gtacgccaaatatctaacaaggagctctttagattgagactagtggaagagagacgagcaaggaattagcaatggcggcggatttgccggaggcgacagtacagaacattctggaccaagagtctcttaaatgggttttcgtcggaggtaaaggaggtgttgggaagacgacatgcagttcaattctcgcaatttgtctcgccattgttcgatcctccgttctcatcatctccaccgatcctgctcacaatcttagtgatgcctttcagcaacgcttcactaaatctcccactttggttcaaggtttctctaatctctttgccatggaggtagatcctaccgttgaaactgatgacatggctggtacagacgggatggatggtttattctctgatttggcaaatgcgattcctggaatcgatgaggctatgagttttgctgagatgttgaagttggtgcaaacaatggattatgctactattgtgtttgacactgctcctactggacatactctccgcctgttacagtttccggccacactagaaaagggactttcgaagttgatgtcattgaagagtagatttggtggcttgatgactcggatgagccgtatgtttggcatggaggatgagttcggagaggatgctctgctgggaagacttgagggcttgaaagatgtgattgagcaagtaaatcggcaattcaaagacccggatatgactacgttcgtttgtgtctgcatccccgagttcttgtctctctatgaaacagagagacttgttcaggaactcgccaagtttgagattgacacgcataacattatcatcaaccaagtactatacgacgacgaagatgtggagtccaagttgctcagagcaaggatgcggatgcaacagaagtatcttgatcagttttatatgctatacgatgactttaatatcacaaagcttcctctgcttccggaagaggtgacaggggttgaagccttaaaggcgttttcacataagttcttgacgccgtaccatcctaccactagcaggagcaatgtagaggagctggagaggaaagtacacacattgcgtttgcagttaaaaacagctgaagaagaactcgaacgggtcaagagtggctaaagataaggctctgttcttccctttaattgtggaaaattaaaactgaatctttttctctctagttcttcatctagcaacaactctttataggacaggaaacaagatcaagcagaatcttcttttgcgttgttttattgttatgcattggatttgtttttatatttgtaataatcatgactacatagactcatatctaccaagaaatcgttgttttacgacttaatcagctttttatatattaagttgaagggtatctcacaagcgaatgctatgatctcttgtaacagctttttatatactgtagactggtcttgcaacagagaagcaaaattcatgtaaaaaaattatagtaaataagagatgttttgatttattg

SEQ ID NO: 38648 - protein, 353 aa, Arabidopsis thaliana
  peptide (1)..(353): Ceres Seq. ID no. 12422482
  misc_feature (19)..(315): Pfam Name: Anion-transporting ATPase Pfam Description: Anion-transporting ATPase
  misc_feature (7)..(257): Homolog of NCBI NO: 23489654 NR Description: arsenite transport subunit A [Plasmodium yoelii
  misc_feature (7)..(323): Homolog of NCBI NO: 4757796 NR Description: arsA arsenite transporter, ATP-binding, homolog 1
  misc_feature (1)..(323): Homolog of NCBI NO: 2905657 NR Description: arsenite translocating ATPase [Homo sapiens]
  misc_feature (1)..(323): Homolog of NCBI NO: 12025542 NR Description: arsA (bacterial) arsenite transporter,
  misc_feature (1)..(323): Homolog of NCBI NO: 6647417 NR Description: Arsenical pump-driving ATPase ATPase) (Arsenical resistance ATPase) (Arsenite-transporting
  misc_feature (1)..(319): Homolog of NCBI NO: 17945070 NR Description: RE07422p [Drosophila melanogaster]
  misc_feature (1)..(319): Homolog of NCBI NO: 24586297 NR Description: CG1598-PA [Drosophila melanogaster]
  misc_feature (1)..(321): Homolog of NCBI NO: 19717679 NR Description: arsenite transport subunit A [Dictyostelium
  misc_feature (1)..(353): Homolog of NCBI NO: 25290846 NR Description: hypothetical protein F22M8.4 [imported] -
  misc_feature (1)..(353): Homolog of NCBI NO: 18378897 NR Description: arsA homolog (hASNA-I), putative
MAADLPEATVQNILDQESLKWVFVGGKGGVGKTTCSSILAICLAIVRSSVLIISTDPAHNLSDAFQQRFTKSPTLVQGFSNLFAMEVDPTVETDDMAGTDGMDGLFSDLANAIPGIDEAMSFAEMLKLVQTMDYATIVFDTAPTGHTLRLLQFPATLEKGLSKLMSLKSRFGGLMTRMSRMFGMEDEFGEDALLGRLEGLKDVIEQVNRQFKDPDMTTFVCVCIPEFLSLYETERLVQELAKFEIDTHNIIINQVLYDDEDVESKLLRARMRMQQKYLDQFYMLYDDFNITKLPLLPEEVTGVEALKAFSHKFLTPYHPTTSRSNVEELERKVHTLRLQLKTAEEELERVKSG

SEQ ID NO: 38649 - protein, 269 aa, Arabidopsis thaliana
  peptide (1)..(269): Ceres Seq. ID no. 12422483
  misc_feature (1)..(231): Pfam Name: Anion-transporting ATPase Pfam Description: Anion-transporting ATPase
  misc_feature (1)..(173): Homolog of NCBI NO: 23489654 NR Description: arsenite transport subunit A [Plasmodium yoelii
  misc_feature (1)..(239): Homolog of NCBI NO: 4757796 NR Description: arsA arsenite transporter, ATP-binding, homolog 1
  misc_feature (1)..(239): Homolog of NCBI NO: 2905657 NR Description: arsenite translocating ATPase [Homo sapiens]
  misc_feature (1)..(239): Homolog of NCBI NO: 12025542 NR Description: arsA (bacterial) arsenite transporter,
  misc_feature (1)..(239): Homolog of NCBI NO: 6647417 NR Description: Arsenical pump-driving ATPase ATPase) (Arsenical resistance ATPase) (Arsenite-transporting
  misc_feature (1)..(235): Homolog of NCBI NO: 17945070 NR Description: RE07422p [Drosophila melanogaster]
  misc_feature (1)..(235): Homolog of NCBI NO: 24586297 NR Description: CG1598-PA [Drosophila melanogaster]
  misc_feature (1)..(237): Homolog of NCBI NO: 19717679 NR Description: arsenite transport subunit A [Dictyostelium
  misc_feature (1)..(269): Homolog of NCBI NO: 25290846 NR Description: hypothetical protein F22M8.4 [imported] -
  misc_feature (1)..(269): Homolog of NCBI NO: 18378897 NR Description: arsA homolog (hASNA-I), putative
MEVDPTVETDDMAGTDGMDGLFSDLANAIPGIDEAMSFAEMLKLVQTMDYATIVFDTAPTGHTLRLLQFPATLEKGLSKLMSLKSRFGGLMTRMSRMFGMEDEFGEDALLGRLEGLKDVIEQVNRQFKDPDMTTFVCVCIPEFLSLYETERLVQELAKFEIDTHNIIINQVLYDDEDVESKLLRARMRMQQKYLDQFYMLYDDFNITKLPLLPEEVTGVEALKAFSHKFLTPYHPTTSRSNVEELERKVHTLRLQLKTAEEELERVKSG

SEQ ID NO: 38650 - protein, 258 aa, Arabidopsis thaliana
  peptide (1)..(258): Ceres Seq. ID no. 12422484
  misc_feature (1)..(220): Pfam Name: Anion-transporting ATPase Pfam Description: Anion-transporting ATPase
  misc_feature (1)..(162): Homolog of NCBI NO: 23489654 NR Description: arsenite transport subunit A [Plasmodium yoelii
  misc_feature (1)..(228): Homolog of NCBI NO: 4757796 NR Description: arsA arsenite transporter, ATP-binding, homolog 1
  misc_feature (1)..(228): Homolog of NCBI NO: 2905657 NR Description: arsenite translocating ATPase [Homo sapiens]
  misc_feature (1)..(228): Homolog of NCBI NO: 12025542 NR Description: arsA (bacterial) arsenite transporter,
  misc_feature (1)..(228): Homolog of NCBI NO: 6647417 NR Description: Arsenical pump-driving ATPase ATPase) (Arsenical resistance ATPase) (Arsenite-transporting
  misc_feature (1)..(224): Homolog of NCBI NO: 17945070 NR Description: RE07422p [Drosophila melanogaster]
  misc_feature (1)..(224): Homolog of NCBI NO: 24586297 NR Description: CG1598-PA [Drosophila melanogaster]
  misc_feature (1)..(226): Homolog of NCBI NO: 19717679 NR Description: arsenite transport subunit A [Dictyostelium
  misc_feature (1)..(258): Homolog of NCBI NO: 25290846 NR Description: hypothetical protein F22M8.4 [imported] -
  misc_feature (1)..(258): Homolog of NCBI NO: 18378897 NR Description: arsA homolog (hASNA-I), putative
MAGTDGMDGLFSDLANAIPGIDEAMSFAEMLKLVQTMDYATIVFDTAPTGHTLRLLQFPATLEKGLSKLMSLKSRFGGLMTRMSRMFGMEDEFGEDALLGRLEGLKDVIEQVNRQFKDPDMTTFVCVCIPEFLSLYETERLVQELAKFEIDTHNIIINQVLYDDEDVESKLLRARMRMQQKYLDQFYMLYDDFNITKLPLLPEEVTGVEALKAFSHKFLTPYHPTTSRSNVEELERKVHTLRLQLKTAEEELERVKSG

SEQ ID NO: 38651 - DNA, 765 bp, Arabidopsis thaliana
  misc_feature (1)..(765): Ceres Seq. ID no. 12337978
  misc_feature: MA Experiment ID: 108488 Result: Down-regulated in Transcription
  misc_feature: MA Experiment ID: 108577 Result: Down-regulated in Transcription
  misc_feature: MA Experiment 108577 PARAMETER Experiment Name: At_42deg_Heat_cDNA_P Parameter: Temperature (deg C) Value: 42 vs. 22
  misc_feature: MA Experiment 108577 PARAMETER Experiment Name: At_42deg_Heat_cDNA_P Parameter: Timepoint (hr) Value: 6
  misc_feature: MA Experiment 108577 PARAMETER Experiment Name: At_42deg_Heat_cDNA_P Parameter: Tissue Value: Aerial
  misc_feature: MA Experiment ID: 20000089 Result: Up-regulated in Transcription
  misc_feature: MA Experiment ID: 20000234 Result: Down-regulated in Transcription
  misc_feature: MA Experiment 20000234 PARAMETER Experiment Name: At_Siliques_P Parameter: Age (day) Value: 21
  misc_feature: MA Experiment 20000234 PARAMETER Experiment Name: At_Siliques_P Parameter: Organism Value: A. thaliana
  misc_feature: MA Experiment 20000234 PARAMETER Experiment Name: At_Siliques_P Parameter: Plant Line Value: WS
  misc_feature: MA Experiment 20000234 PARAMETER Experiment Name: At_Siliques_P Parameter: Tissue Value: Less Than 5mm Siliques vs. Whole Plant
  misc_feature: MA Experiment ID: 20001558 Result: Down-regulated in Transcription
  misc_feature: MA Experiment 20001558 PARAMETER Experiment Name: At_Drought_Soil_Dry_P Parameter: Age (day) Value: 27
  misc_feature: MA Experiment 20001558 PARAMETER Experiment Name: At_Drought_Soil_Dry_P Parameter: Organism Value: A. thaliana
  misc_feature: MA Experiment 20001558 PARAMETER Experiment Name: At_Drought_Soil_Dry_P Parameter: Plant Line Value: WS
  misc_feature: MA Experiment 20001558 PARAMETER Experiment Name: At_Drought_Soil_Dry_P Parameter: Post Timepoint (hr) Value: 6
  misc_feature: MA Experiment 20001558 PARAMETER Experiment Name: At_Drought_Soil_Dry_P Parameter: Post-Treatment Value: Re-Water vs. No Drought
  misc_feature: MA Experiment 20001558 PARAMETER Experiment Name: At_Drought_Soil_Dry_P Parameter: Timepoint (day) Value: 13
  misc_feature: MA Experiment 20001558 PARAMETER Experiment Name: At_Drought_Soil_Dry_P Parameter: Treatment Value: Drought vs. No Drought
  misc_feature: Phenotype: INFLORESCENCE Height-Tall
  misc_feature: Phenotype: SENESCENCE TIME Senescence Time-Late Senescence
  misc_feature: Phenotype: INFLORESCENCE Flowering Time-Late Flowering
  misc_feature: Phenotype: SENESCENCE TIME Senescence Time-Late Senescence
  misc_feature: Phenotype: INFLORESCENCE Flowering Time-Late Flowering
  misc_feature: Phenotype: SENESCENCE TIME Senescence Time-Late Senescence
gacaaaaaaagaaacagtgaagaagaaaaaaaaaaaaggtcattttcattttctccatttgatttttgccgaccggagaaaatatcttcttgccgtcttcttcttcatttcaccaggaacttttatttgaaatcggtttgatttagccatggcaaacgcggcatcgggaatggctgtgcatgatgattgcaagctgaaatttatggaactgaaggcgaaaagaacattccgtaccatagtctacaagattgaggataagcaagtgattgtagagaaactcggtgaacctgaacaatcatatgatgactttgcagctagtcttccagctgatgattgccgatattgcatttacgatttcgactttgtcactgcggagaactgccagaagagcaagatcttcttgcatggtctccggacactgccaaagtgagagacaagatgatttacgcgagctctaaagataggttcaagagagaactagatggaattcaagtggaacttcaagctactgatccaacagaaatgggtcttgatgttttcaaaagccgcaccaactaagtaaaacaaaaccctgtaagggcatttgaataagtttggtttctggagtgaatatgtttcctctgactgttatgaaaactttttaacaccttcaacttcattctacttggtattattgtatgtctttgatgtgttatgtgtgccttgtgatggttttcaattagttttacatgtacaatacttgaaatcagattgttgctaagcttc

SEQ ID NO: 38652 - protein, 93 aa, Arabidopsis thaliana
  peptide (1)..(93): Ceres Seq. ID no. 12337979
  misc_feature (12)..(84): Pfam Name: Cofilin/tropomyosin-type actin-binding protein Pfam Description: Cofilin/tropomyosin-type actin-binding protein
  misc_feature (1)..(84): Homolog of NCBI NO: 18402587 NR Description: actin depolymerizing factor 6
  misc_feature (1)..(84): Homolog of NCBI NO: 22857914 NR Description: pollen specific actin-depolymerizing factor 2
  misc_feature (1)..(84): Homolog of NCBI NO: 30697295 NR Description: actin depolymerizing factor 3 - like protein
  misc_feature (1)..(84): Homolog of NCBI NO: 17366768 NR Description: Actin-depolymerizing factor 1 (ADF 1)
  misc_feature (1)..(84): Homolog of NCBI NO: 4185511 NR Description: actin depolymerizing factor 4 [Arabidopsis
  misc_feature (1)..(84): Homolog of NCBI NO: 17366765 NR Description: Actin-depolymerizing factor 2 (ADF 2)
  misc_feature (1)..(84): Homolog of NCBI NO: 15231309 NR Description: actin depolymerizing factor 1 (ADF1)
  misc_feature (1)..(84): Homolog of NCBI NO: 30697300 NR Description: actin depolymerizing factor 4 - like protein
  misc_feature (8)..(84): Homolog of NCBI NO: 11276987 NR Description: actin depolymerizing factor 2 - Arabidopsis
  misc_feature (1)..(84): Homolog of NCBI NO: 18408116 NR Description: actin depolymerizing factor 2 (ADF2)
MANAASGMAVHDDCKLKFMELKAKRTFRTIVYKIEDKQVIVEKLGEPEQSYDDFAASLPADDCRYCIYDFDFVTAENCQKSKIFLHGLRTLPK

SEQ ID NO: 38653 - protein, 86 aa, Arabidopsis thaliana
  peptide (1)..(86): Ceres Seq. ID no. 12337980
  misc_feature (5)..(77): Pfam Name: Cofilin/tropomyosin-type actin-binding protein Pfam Description: Cofilin/tropomyosin-type actin-binding protein
  misc_feature (1)..(77): Homolog of NCBI NO: 18402587 NR Description: actin depolymerizing factor 6
  misc_feature (1)..(77): Homolog of NCBI NO: 22857914 NR Description: pollen specific actin-depolymerizing factor 2
  misc_feature (1)..(77): Homolog of NCBI NO: 30697295 NR Description: actin depolymerizing factor 3 - like protein
  misc_feature (1)..(77): Homolog of NCBI NO: 17366768 NR Description: Actin-depolymerizing factor 1 (ADF 1)
  misc_feature (1)..(77): Homolog of NCBI NO: 4185511 NR Description: actin depolymerizing factor 4 [Arabidopsis
  misc_feature (1)..(77): Homolog of NCBI NO: 17366765 NR Description: Actin-depolymerizing factor 2 (ADF 2)
  misc_feature (1)..(77): Homolog of NCBI NO: 15231309 NR Description: actin depolymerizing factor 1 (ADF1)
  misc_feature (1)..(77): Homolog of NCBI NO: 30697300 NR Description: actin depolymerizing factor 4 - like protein
  misc_feature (1)..(77): Homolog of NCBI NO: 11276987 NR Description: actin depolymerizing factor 2 - Arabidopsis
  misc_feature (1)..(77): Homolog of NCBI NO: 18408116 NR Description: actin depolymerizing factor 2 (ADF2)
MAVHDDCKLKFMELKAKRTFRTIVYKIEDKQVIVEKLGEPEQSYDDFAASLPADDCRYCIYDFDFVTAENCQKSKIFLHGLRTLPK

SEQ ID NO: 38654 - protein, 75 aa, Arabidopsis thaliana
  peptide (1)..(75): Ceres Seq. ID no. 12337981
  misc_feature (1)..(66): Pfam Name: Cofilin/tropomyosin-type actin-binding protein Pfam Description: Cofilin/tropomyosin-type actin-binding protein
  misc_feature (1)..(66): Homolog of NCBI NO: 18402587 NR Description: actin depolymerizing factor 6
  misc_feature (1)..(66): Homolog of NCBI NO: 22857914 NR Description: pollen specific actin-depolymerizing factor 2
  misc_feature (1)..(66): Homolog of NCBI NO: 30697295 NR Description: actin depolymerizing factor 3 - like protein
  misc_feature (1)..(66): Homolog of NCBI NO: 17366768 NR Description: Actin-depolymerizing factor 1 (ADF 1)
  misc_feature (1)..(66): Homolog of NCBI NO: 4185511 NR Description: actin depolymerizing factor 4 [Arabidopsis
  misc_feature (1)..(66): Homolog of NCBI NO: 17366765 NR Description: Actin-depolymerizing factor 2 (ADF 2)
  misc_feature (1)..(66): Homolog of NCBI NO: 15231309 NR Description: actin depolymerizing factor 1 (ADF1)
  misc_feature (1)..(66): Homolog of NCBI NO: 30697300 NR Description: actin depolymerizing factor 4 - like protein
  misc_feature (1)..(66): Homolog of NCBI NO: 11276987 NR Description: actin depolymerizing factor 2 - Arabidopsis
  misc_feature (1)..(66): Homolog of NCBI NO: 18408116 NR Description: actin depolymerizing factor 2 (ADF2)
MELKAKRTFRTIVYKIEDKQVIVEKLGEPEQSYDDFAASLPADDCRYCIYDFDFVTAENCQKSKIFLHGLRTLPK

SEQ ID NO: 38655 - DNA, 1607 bp, Arabidopsis thaliana
  misc_feature (1)..(1607): Ceres Seq. ID no. 12330922
  misc_feature: MA Experiment ID: 20001905 Result: Down-regulated in Transcription
  misc_feature: MA Experiment 20001905 PARAMETER Experiment Name: At_Drought_Reproduction_P Parameter: Age (day) Value: 40
  misc_feature: MA Experiment 20001905 PARAMETER Experiment Name: At_Drought_Reproduction_P Parameter: Organism Value: A. thaliana
  misc_feature: MA Experiment 20001905 PARAMETER Experiment Name: At_Drought_Reproduction_P Parameter: Plant Line Value: WS
  misc_feature: MA Experiment 20001905 PARAMETER Experiment Name: At_Drought_Reproduction_P Parameter: Timepoint (day) Value: 10
  misc_feature: MA Experiment 20001905 PARAMETER Experiment Name: At_Drought_Reproduction_P Parameter: Tissue Value: Rosettes
  misc_feature: MA Experiment 20001905 PARAMETER Experiment Name: At_Drought_Reproduction_P Parameter: Treatment Value: Drought vs. No Drought
agacaaacagagagtgatgcgatggaacaagaagaacgttatcagtctcgtctcaaagtctcatcatcttccggcgccgattacgccaccgttacctgagatttaccgaatacctaatcctccaccaaagcttccggagatctcaattcctccgacacttacgctctctccatctcccaaacactccaatttcgtcaatttcctcgagaacaatctccctcaccatcaaacactaacgccacaaactcttcttggattcctccgttccaagatccgtcaccatccgctctacgctcattatgacttcgccgtctttaattgggcagctacactcgacactttccgtcatgatcacgattctttcctctggatgtcgagatcactcgccgccacgcaccggtttgacgatctttatcgtcttctctcttttgtagctgcgaatccatgtccttgttcctcaggtatattctcttgtccagagcttgaacctatttttccgatccgccattgatgcgtattgtagagctaggaaaatggattatgctttgttagcgtttgatactatgaagagattgatcgatggtaaaccaaatgttggagtttataacactgttgtgaatggatatgtgaaatctggagatatggataaggctttaaggttttaccagaggatgggaaaggaaagagcaaagccagatgtatgcacgtttaacattctcatcaatggttattgtagaagctctaagtttgatttggcattggatttgttcagggagatgaaggagaaaggttgtgaaccgaatgtggttagcttcaacactcttattagagggtttttgagcagtggtaaaatcgaggaaggtgttaaaatggcttatgagatgattgagctaggttgtagattctcagaagctacttgtgagattcttgttgatgggttgtgtagagaaggtcgggttgacgatgcttgtggattggtgctcgatcttttgaacaagagggttttacctagtgagtttgattatggtagtttggttgagaaactctgcggagaaaacaaggcggttagagcaatggagatgatggaggagctgtggaagaaaggccaaaccccatgtttcattgcttgtactacactcgtcgaagggttgaggaaatcaggaagaacagagaaagcgtcagggtttatggagaagatgatgaatgcaggaattcttcccgatagtgtgacatttaacttgcttcttcgggatctctgcagttctgatcattctactgatgcaaacagattgagacttttggcatcaagcaaaggatatgaacccgatgagacaacgtaccatgttttggtttcggggttcacgaaagaagggagaagaaaggaaggagaagttctagtgaacgagatgttggataaagatatgttgcctgatatctttacatataatagattgatggatggcttgtcctgcactggaaaattctcaaggaaacaagtccggatgttgtaacctgtgtttgatctgtgtaaactagacccaagctatatctatgtatcaacaaattttattttgaacatatgaaatggaaaccaagttggttctttg

SEQ ID NO: 38656 - protein, 325 aa, Arabidopsis thaliana
  peptide (1)..(325): Ceres Seq. ID no. 12330923
  misc_feature (162)..(196): Pfam Name: PPR repeat Pfam Description: PPR repeat
  misc_feature (1)..(325): Homolog of NCBI NO: 15231863 NR Description: putative protein
  misc_feature (1)..(319): Homolog of NCBI NO: 34015356 NR Description: putative fertility restorer
  misc_feature (1)..(310): Homolog of NCBI NO: 34902570 NR Description: Putative indole-3-acetate
  misc_feature (1)..(319): Homolog of NCBI NO: 25402738 NR Description: protein T12C24.22 [imported] - Arabidopsis
  misc_feature (1)..(319): Homolog of NCBI NO: 22329519 NR Description: hypothetical protein; protein id: At1g12700.1
  misc_feature (1)..(310): Homolog of NCBI NO: 15218241 NR Description: hypothetical protein; protein id: At1g09680.1
  misc_feature (1)..(319): Homolog of NCBI NO: 34896698 NR Description: putative pentatricopeptide repeat protein
  misc_feature (1)..(316): Homolog of NCBI NO: 15218325 NR Description: hypothetical protein; protein id: At1g09900.1
  misc_feature (1)..(311): Homolog of NCBI NO: 20804895 NR Description: P0497A05.20 [Oryza sativa (japonica
  misc_feature (1)..(325): Homolog of NCBI NO: 15227609 NR Description: putative salt-inducible protein; protein id:
MDYALLAFDTMKRLIDGKPNVGVYNTVVNGYVKSGDMDKALRFYQRMGKERAKPDVCTFNILINGYCRSSKFDLALDLFREMKEKGCEPNVVSFNTLIRGFLSSGKIEEGVKMAYEMIELGCRFSEATCEILVDGLCREGRVDDACGLVLDLLNKRVLPSEFDYGSLVEKLCGENKAVRAMEMMEELWKKGQTPCFIACTTLVEGLRKSGRTEKASGFMEKMMNAGILPDSVTFNLLLRDLCSSDHSTDANRLRLLASSKGYEPDETTYHVLVSGFTKEGRRKEGEVLVNEMLDKDMLPDIFTYNRLMDGLSCTGKFSRKQVRML

SEQ ID NO: 38657 - protein, 315 aa, Arabidopsis thaliana
  peptide (1)..(315): Ceres Seq. ID no. 12330924
  misc_feature (152)..(186): Pfam Name: PPR repeat Pfam Description: PPR repeat
  misc_feature (1)..(315): Homolog of NCBI NO: 15231863 NR Description: putative protein
  misc_feature (1)..(309): Homolog of NCBI NO: 34015356 NR Description: putative fertility restorer
  misc_feature (1)..(300): Homolog of NCBI NO: 34902570 NR Description: Putative indole-3-acetate
  misc_feature (1)..(309): Homolog of NCBI NO: 25402738 NR Description: protein T12C24.22 [imported] - Arabidopsis
  misc_feature (1)..(309): Homolog of NCBI NO: 22329519 NR Description: hypothetical protein; protein id: At1g12700.1
  misc_feature (1)..(300): Homolog of NCBI NO: 15218241 NR Description: hypothetical protein; protein id: At1g09680.1
  misc_feature (1)..(309): Homolog of NCBI NO: 34896698 NR Description: putative pentatricopeptide repeat protein
  misc_feature (1)..(306): Homolog of NCBI NO: 15218325 NR Description: hypothetical protein; protein id: At1g09900.1
  misc_feature (1)..(301): Homolog of NCBI NO: 20804895 NR Description: P0497A05.20 [Oryza sativa (japonica
  misc_feature (1)..(315): Homolog of NCBI NO: 15227609 NR Description: putative salt-inducible protein; protein id:
MKRLIDGKPNVGVYNTVVNGYVKSGDMDKALRFYQRMGKERAKPDVCTFNILINGYCRSSKFDLALDLFREMKEKGCEPNVVSFNTLIRGFLSSGKIEEGVKMAYEMIELGCRFSEATCEILVDGLCREGRVDDACGLVLDLLNKRVLPSEFDYGSLVEKLCGENKAVRAMEMMEELWKKGQTPCFIACTTLVEGLRKSGRTEKASGFMEKMMNAGILPDSVTFNLLLRDLCSSDHSTDANRLRLLASSKGYEPDETTYHVLVSGFTKEGRRKEGEVLVNEMLDKDMLPDIFTYNRLMDGLSCTGKFSRKQVRML

SEQ ID NO: 38658 - protein, 289 aa, Arabidopsis thaliana
  peptide (1)..(289): Ceres Seq. ID no. 12330925
  misc_feature (126)..(160): Pfam Name: PPR repeat Pfam Description: PPR repeat
  misc_feature (1)..(289): Homolog of NCBI NO: 15231863 NR Description: putative protein
  misc_feature (1)..(283): Homolog of NCBI NO: 34015356 NR Description: putative fertility restorer
  misc_feature (1)..(274): Homolog of NCBI NO: 34902570 NR Description: Putative indole-3-acetate
  misc_feature (1)..(283): Homolog of NCBI NO: 25402738 NR Description: protein T12C24.22 [imported] - Arabidopsis
  misc_feature (1)..(283): Homolog of NCBI NO: 22329519 NR Description: hypothetical protein; protein id: At1g12700.1
  misc_feature (1)..(274): Homolog of NCBI NO: 15218241 NR Description: hypothetical protein; protein id: At1g09680.1
  misc_feature (1)..(283): Homolog of NCBI NO: 34896698 NR Description: putative pentatricopeptide repeat protein
  misc_feature (1)..(280): Homolog of NCBI NO: 15218325 NR Description: hypothetical protein; protein id: At1g09900.1
  misc_feature (1)..(275): Homolog of NCBI NO: 20804895 NR Description: P0497A05.20 [Oryza sativa (japonica
  misc_feature (1)..(289): Homolog of NCBI NO: 15227609 NR Description: putative salt-inducible protein; protein id:
MDKALRFYQRMGKERAKPDVCTFNILINGYCRSSKFDLALDLFREMKEKGCEPNVVSFNTLIRGFLSSGKIEEGVKMAYEMIELGCRFSEATCEILVDGLCREGRVDDACGLVLDLLNKRVLPSEFDYGSLVEKLCGENKAVRAMEMMEELWKKGQTPCFIACTTLVEGLRKSGRTEKASGFMEKMMNAGILPDSVTFNLLLRDLCSSDHSTDANRLRLLASSKGYEPDETTYHVLVSGFTKEGRRKEGEVLVNEMLDKDMLPDIFTYNRLMDGLSCTGKFSRKQVRML

SEQ ID NO: 38659 - DNA, 1292 bp, Arabidopsis thaliana
  misc_feature (1)..(1292): Ceres Seq. ID no. 12371013
  misc_feature: MA Experiment ID: 108434 Result: Down-regulated in Transcription
  misc_feature: MA Experiment 108434 PARAMETER Experiment Name: At_Root_Tips_cDNA_P Parameter: Tissue Value: Root Tips
  misc_feature: MA Experiment ID: 108488 Result: Down-regulated in Transcription
  misc_feature: MA Experiment ID: 108489 Result: Up-regulated in Transcription
  misc_feature: MA Experiment ID: 20000794 Result: Up-regulated in Transcription
  misc_feature: MA Experiment 20000794 PARAMETER Experiment Name: At_Petals_P Parameter: Age (day) Value: 23-25 days
  misc_feature: MA Experiment 20000794 PARAMETER Experiment Name: At_Petals_P Parameter: Plant Line Value: WS
  misc_feature: MA Experiment 20000794 PARAMETER Experiment Name: At_Petals_P Parameter: Tissue Value: Petals vs. Whole plant
  misc_feature: MA Experiment ID: 20001905 Result: Up-regulated in Transcription
  misc_feature: MA Experiment 20001905 PARAMETER Experiment Name: At_Drought_Reproduction_P Parameter: Age (day) Value: 40
  misc_feature: MA Experiment 20001905 PARAMETER Experiment Name: At_Drought_Reproduction_P Parameter: Organism Value: A. thaliana
  misc_feature: MA Experiment 20001905 PARAMETER Experiment Name: At_Drought_Reproduction_P Parameter: Plant Line Value: WS
  misc_feature: MA Experiment 20001905 PARAMETER Experiment Name: At_Drought_Reproduction_P Parameter: Timepoint (day) Value: 10
  misc_feature: MA Experiment 20001905 PARAMETER Experiment Name: At_Drought_Reproduction_P Parameter: Tissue Value: Rosettes
  misc_feature: MA Experiment 20001905 PARAMETER Experiment Name: At_Drought_Reproduction_P Parameter: Treatment Value: Drought vs. No Drought
atttccagttggaactttaattaattagatatgaactaaagcgttacgccacggaagaatttaggatctgttcgcagcatccgtttcaacgctaaatccaaacaacaaaagaagattagcaaaatcggattatcttctttgtttcttttcccttgacaagtcttcgtttttgaattagggtttttggacaattcttctcttcttcggctgcaaaaggttttcgcaagatatggctggctctgttggtgaggaaactgagccagaatgtattaagagagtgaaattagagggagctgttccatgtcttaagccagacgacaactgcaaaaatggttggacgacgccatctcctgacacatttatggttagaggaccaaagtatttctctgacaaagttaagatacctgctggtgatttccttctaaagcctctgggttttgattggattaaaggtcctaaaaagctttctgagatcctgagttatccaagcagccgaatcaggaaagttatcgatgaggagtttcaaaaagatggaactaagccttttgtctgggcattcaatctccagcttcctcacaaagacaattacagtgctgtggcttactttgttaccacagagcctatccttgaaggctccctgatggatcggtttttgaaaggagatgatgggttcaagaaatcgaggcttaaactgattgcaaacattgtcaaaggcccttggattgttagaaaagctgttggagagcaagcgatctgtgtgattggacgtgcactctcttgcaaatatgtttcaggggaaaactttgtggagattgatgtcgatattggttcttcaatggtcgctagtgccattgttcatctcgcatttggctacgttactacattgacagttgatcttgcgttcctcattgagagtcagaccgaagcagagcttccagaaaagctactaggagctgtgagattctctgagctgcagaccgagtcagccacatctatcgaactgtcctcaagcaccagtaatgaccagtgggatcaaactacctcagagcggtcgagctggtggaaatcgattggaaatggattctctaatctgcttaatcaagatacggccaacatgaacaatacttctcatggggacatccagaaggatgaacatgtacagaagcagtaagtgttttgggagttattaacttcacaattctttgaatttgttcgatttcattaccaaaaaacagaaacaaaaacttgtcaattctttaaaaaaaccacagatgtatagattggtttttact

SEQ ID NO: 38660 - protein, 313 aa, Arabidopsis thaliana
  peptide (1)..(313): Ceres Seq. ID no. 12371014
  misc_feature (26)..(257): Homolog of NCBI NO: 37535414 NR Description: unknown protein [Oryza sativa (japonica
  misc_feature (29)..(257): Homolog of NCBI NO: 18421431 NR Description: putative protein
  misc_feature (29)..(258): Homolog of NCBI NO: 8978350 NR Description: emb|CAB77600.1~gene_id:K3D20.2~similar to unknown
  misc_feature (9)..(257): Homolog of NCBI NO: 15238672 NR Description: putative protein
  misc_feature (21)..(257): Homolog of NCBI NO: 21592409 NR Description: unknown [Arabidopsis thaliana]
  misc_feature (4)..(257): Homolog of NCBI NO: 22655107 NR Description: putative protein [Arabidopsis thaliana]
  misc_feature (4)..(257): Homolog of NCBI NO: 15238248 NR Description: putative protein
  misc_feature (1)..(313): Homolog of NCBI NO: 18390605 NR Description: expressed protein
  misc_feature (1)..(313): Homolog of NCBI NO: 21618178 NR Description: unknown [Arabidopsis thaliana]
  misc_feature (1)..(313): Homolog of NCBI NO: 25406892 NR Description: hypothetical protein [imported] - Arabidopsis
MAGSVGEETEPECIKRVKLEGAVPCLKPDDNCKNGWTTPSPDTFMVRGPKYFSDKVKIPAGDFLLKPLGFDWIKGPKKLSEILSYPSSRIRKVIDEEFQKDGTKPFVWAFNLQLPHKDNYSAVAYFVTTEPILEGSLMDRFLKGDDGFKKSRLKLIANIVKGPWIVRKAVGEQAICVIGRALSCKYVSGENFVEIDVDIGSSMVASAIVHLAFGYVTTLTVDLAFLIESQTEAELPEKLLGAVRFSELQTESATSIELSSSTSNDQWDQTTSERSSWWKSIGNGFSNLLNQDTANMNNTSHGDIQKDEHVQKQ

SEQ ID NO: 38661 - protein, 269 aa, Arabidopsis thaliana
  peptide (1)..(269): Ceres Seq. ID no. 12371015
  misc_feature (1)..(213): Homolog of NCBI NO: 37535414 NR Description: unknown protein [Oryza sativa (japonica
  misc_feature (1)..(213): Homolog of NCBI NO: 18421431 NR Description: putative protein
  misc_feature (1)..(214): Homolog of NCBI NO: 8978350 NR Description: emb|CAB77600.1~gene_id:K3D20.2~similar to unknown
  misc_feature (1)..(213): Homolog of NCBI NO: 15238672 NR Description: putative protein
  misc_feature (1)..(213): Homolog of NCBI NO: 21592409 NR Description: unknown [Arabidopsis thaliana]
  misc_feature (1)..(213): Homolog of NCBI NO: 22655107 NR Description: putative protein [Arabidopsis thaliana]
  misc_feature (1)..(213): Homolog of NCBI NO: 15238248 NR Description: putative protein
  misc_feature (1)..(269): Homolog of NCBI NO: 18390605 NR Description: expressed protein
  misc_feature (1)..(269): Homolog of NCBI NO: 21618178 NR Description: unknown [Arabidopsis thaliana]
  misc_feature (1)..(269): Homolog of NCBI NO: 25406892 NR Description: hypothetical protein [imported] - Arabidopsis
MVRGPKYFSDKVKIPAGDFLLKPLGFDWIKGPKKLSEILSYPSSRIRKVIDEEFQKDGTKPFVWAFNLQLPHKDNYSAVAYFVTTEPILEGSLMDRFLKGDDGFKKSRLKLIANIVKGPWIVRKAVGEQAICVIGRALSCKYVSGENFVEIDVDIGSSMVASAIVHLAFGYVTTLTVDLAFLIESQTEAELPEKLLGAVRFSELQTESATSIELSSSTSNDQWDQTTSERSSWWKSIGNGFSNLLNQDTANMNNTSHGDIQKDEHVQKQ

SEQ ID NO: 38662 - protein, 176 aa, Arabidopsis thaliana
  peptide (1)..(176): Ceres Seq. ID no. 12371016
  misc_feature (1)..(120): Homolog of NCBI NO: 37535414 NR Description: unknown protein [Oryza sativa (japonica
  misc_feature (1)..(120): Homolog of NCBI NO: 18421431 NR Description: putative protein
  misc_feature (1)..(121): Homolog of NCBI NO: 8978350 NR Description: emb|CAB77600.1~gene_id:K3D20.2~similar to unknown
  misc_feature (1)..(120): Homolog of NCBI NO: 15238672 NR Description: putative protein
  misc_feature (1)..(120): Homolog of NCBI NO: 21592409 NR Description: unknown [Arabidopsis thaliana]
  misc_feature (1)..(120): Homolog of NCBI NO: 22655107 NR Description: putative protein [Arabidopsis thaliana]
  misc_feature (1)..(120): Homolog of NCBI NO: 15238248 NR Description: putative protein
  misc_feature (1)..(176): Homolog of NCBI NO: 18390605 NR Description: expressed protein
  misc_feature (1)..(176): Homolog of NCBI NO: 21618178 NR Description: unknown [Arabidopsis thaliana]
  misc_feature (1)..(176): Homolog of NCBI NO: 25406892 NR Description: hypothetical protein [imported] - Arabidopsis
MDRFLKGDDGFKKSRLKLIANIVKGPWIVRKAVGEQAICVIGRALSCKYVSGENFVEIDVDIGSSMVASAIVHLAFGYVTTLTVDLAFLIESQTEAELPEKLLGAVRFSELQTESATSIELSSSTSNDQWDQTTSERSSWWKSIGNGFSNLLNQDTANMNNTSHGDIQKDEHVQKQ

SEQ ID NO: 38663 - DNA, 1998 bp, Arabidopsis thaliana
  misc_feature (1)..(1998): Ceres Seq. ID no. 12329724
  misc_feature: MA Experiment ID: 20000235 Result: Down-regulated in Transcription
  misc_feature: MA Experiment 20000235 PARAMETER Experiment Name: At_Siliques_P Parameter: Age (day) Value: 21
  misc_feature: MA Experiment 20000235 PARAMETER Experiment Name: At_Siliques_P Parameter: Organism Value: A. thaliana
  misc_feature: MA Experiment 20000235 PARAMETER Experiment Name: At_Siliques_P Parameter: Plant Line Value: WS
  misc_feature: MA Experiment 20000235 PARAMETER Experiment Name: At_Siliques_P Parameter: Tissue Value: 5-10mm Siliques vs. Whole Plant
  misc_feature: MA Experiment ID: 20001559 Result: Up-regulated in Transcription
  misc_feature: MA Experiment 20001559 PARAMETER Experiment Name: At_Drought_Soil_Dry_P Parameter: Age (day) Value: 28
  misc_feature: MA Experiment 20001559 PARAMETER Experiment Name: At_Drought_Soil_Dry_P Parameter: Organism Value: A. thaliana
  misc_feature: MA Experiment 20001559 PARAMETER Experiment Name: At_Drought_Soil_Dry_P Parameter: Plant Line Value: WS
  misc_feature: MA Experiment 20001559 PARAMETER Experiment Name: At_Drought_Soil_Dry_P Parameter: Post Timepoint (hr) Value: 29
  misc_feature: MA Experiment 20001559 PARAMETER Experiment Name: At_Drought_Soil_Dry_P Parameter: Post-Treatment Value: Re-Water vs. No Drought
  misc_feature: MA Experiment 20001559 PARAMETER Experiment Name: At_Drought_Soil_Dry_P Parameter: Timepoint (day) Value: 14
  misc_feature: MA Experiment 20001559 PARAMETER Experiment Name: At_Drought_Soil_Dry_P Parameter: Treatment Value: Drought vs. No Drought
agggatcactgttctccggctccggcgaaaaaatccctcgaaatcgatcctaacctcaattgattgaaggaagttatgtattcgctttcgaggattctccaaaggagtcaaagatataactttgcaccttcttcgtttggtgcggtcagtaaattagaagtatcaagtggtggtgataaagaacgggtctttaaatcatttggattgatttatagcaaacctcaaggtttagtcagactttattccgcaagagatgtgttttcacggttctttggcatccacaagctttcttctatagctgatgctaaagataaaggagatgaggtagttagggaagaggagctgtctgaatcagaggaggcggttcctgtttctggggatgtaccagagggagttgttgatgatgattctttgttcgagcctgaacttggtagtgacaatgatgatcttgaaattgaagtgaagcattcgaaagatggtgggaaaccaactaagaaaagaggtcaatctgagctgtacgaatccattgttgcttataaatcagtgaaacatgttcttgaaaaatgggtcaaagaaggaaaagatttgagtcaagctgaggttactcttgctatacacaatctgcgtaaacgcaaatcctatgctatgtgtttgcagttgtgggagtggttgggagctaatacgcagtttgagttcacagaggcaaattatgcttctcagttggatttggtggccaaggtacatagtttacaaaaagctgaaatctttttgaaagatattccagaatcttctaggggagaagtagtatacagaaccctgctggcaaattgtgtacttaagcatcatgtaaataaagctgaagacattttcaacaaaatgaaagagctaaaatttccaacaagtgtgtttgcttgcaaccagctgcttctcctctacagtatgcatgatagaaagaagataagtgatgttttgttgctaatggagagagaaaacatcaagccgagtcgtgctacctatcattttttaatcaatagtaaaggtttagccggagacataactggaatggagaagatcgtggagacaatgaaggaagaaggcatcgaactagatcctgaactgcagtctattctggctaagtactacataagagcggggcttaaagaaagagcacaagaccttatgaaggagatagaagggaaaggtttgcaacaaacaccatgggtgtgccggtcattactcccactttatgcagacataggagacagtgacaatgtgagaagactgagtaggtttgttgatcaaaatccgagatacgataattgcatttctgccattaaagcatggggaaagctgaaggaagtcgaagaagcagaggcagtgtttgagagacttgtggagaaatacaaaattttccctatgatgccatattttgccctcatggagatatacacagagaacaagatgctagcaaaaggcagagatctggttaaaagaatgggaaatgcagggattgcgattgggccgtcgacatggcacgcgcttgtgaagctatacatcaaagcaggagaagttggaaaagctgagttgatattgaacagagctacaaaggataataagatgagacctatgttcactacttacatggcgattcttgaagaatatgcaaaaagaggcgatgttcataacacagagaaggtattcatgaaaatgaaaagggcaagctatgcagctcagcttatgcagtatgaaaccgtgctcctggcttatatcaacgccaaaactcctgcttacgggatgattgagaggatgaaggcagacaatgtgttcccgaacaagagtctagctgcgaaactggctcaggttaatccgtttaaaaagtgtccagtgtctgttttacttgacatataacgataatcatcttatgtattgagctgttaagtgtttgttctggttgcctccaagctaggaaataataaaaagaggattcgtttttcttcc

SEQ ID NO: 38664 - protein, 610 aa, Arabidopsis thaliana
  peptide (1)..(610): Ceres Seq. ID no. 12329725
  misc_feature (243)..(277): Pfam Name: PPR repeat Pfam Description: PPR repeat
  misc_feature (115)..(583): Homolog of NCBI NO: 17064738 NR Description: Unknown protein [Arabidopsis thaliana]
  misc_feature (115)..(583): Homolog of NCBI NO: 15235508 NR Description: hypothetical protein
  misc_feature (129)..(597): Homolog of NCBI NO: 15219808 NR Description: hypothetical protein; protein id: At1g60770.1
  misc_feature (144)..(600): Homolog of NCBI NO: 34905294 NR Description: putative DNA-binding protein
  misc_feature (240)..(593): Homolog of NCBI NO: 34394024 NR Description: putative DNA-binding protein
  misc_feature (99)..(593): Homolog of NCBI NO: 34900334 NR Description: P0592C06.16 [Oryza sativa (japonica
  misc_feature (75)..(609): Homolog of NCBI NO: 6958202 NR Description: DNA-binding protein [Triticum aestivum]
  misc_feature (75)..(609): Homolog of NCBI NO: 34903362 NR Description: unnamed protein product [Oryza sativa (japonica
  misc_feature (25)..(609): Homolog of NCBI NO: 15218196 NR Description: hypothetical protein; protein id: At1g15480.1
  misc_feature (1)..(609): Homolog of NCBI NO: 15220095 NR Description: hypothetical protein
MYSLSRILQRSQRYNFAPSSFGAVSKLEVSSGGDKERVFKSFGLIYSKPQGLVRLYSARDVFSRFFGIHKLSSIADAKDKGDEVVREEELSESEEAVPVSGDVPEGVVDDDSLFEPELGSDNDDLEIEVKHSKDGGKPTKKRGQSELYESIVAYKSVKHVLEKWVKEGKDLSQAEVTLAIHNLRKRKSYAMCLQLWEWLGANTQFEFTEANYASQLDLVAKVHSLQKAEIFLKDIPESSRGEVVYRTLLANCVLKHHVNKAEDIFNKMKELKFPTSVFACNQLLLLYSMHDRKKISDVLLLMERENIKPSRATYHFLINSKGLAGDITGMEKIVETMKEEGIELDPELQSILAKYYIRAGLKERAQDLMKEIEGKGLQQTPWVCRSLLPLYADIGDSDNVRRLSRFVDQNPRYDNCISAIKAWGKLKEVEEAEAVFERLVEKYKIFPMMPYFALMEIYTENKMLAKGRDLVKRMGNAGIAIGPSTWHALVKLYIKAGEVGKAELILNRATKDNKMRPMFTTYMAILEEYAKRGDVHNTEKVFMKMKRASYAAQLMQYETVLLAYINAKTPAYGMIERMKADNVFPNKSLAAKLAQVNPFKKCPVSVLLDI

SEQ ID NO: 38665 - protein, 420 aa, Arabidopsis thaliana
  peptide (1)..(420): Ceres Seq. ID no. 12329726
  misc_feature (53)..(87): Pfam Name: PPR repeat Pfam Description: PPR repeat
  misc_feature (1)..(393): Homolog of NCBI NO: 17064738 NR Description: Unknown protein [Arabidopsis thaliana]
  misc_feature (1)..(393): Homolog of NCBI NO: 15235508 NR Description: hypothetical protein
  misc_feature (1)..(407): Homolog of NCBI NO: 15219808 NR Description: hypothetical protein; protein id: At1g60770.1
  misc_feature (1)..(410): Homolog of NCBI NO: 34905294 NR Description: putative DNA-binding protein
  misc_feature (50)..(403): Homolog of NCBI NO: 34394024 NR Description: putative DNA-binding protein
  misc_feature (1)..(403): Homolog of NCBI NO: 34900334 NR Description: P0592C06.16 [Oryza sativa (japonica
  misc_feature (1)..(419): Homolog of NCBI NO: 6958202 NR Description: DNA-binding protein [Triticum aestivum]
  misc_feature (1)..(419): Homolog of NCBI NO: 34903362 NR Description: unnamed protein product [Oryza sativa (japonica
  misc_feature (1)..(419): Homolog of NCBI NO: 15218196 NR Description: hypothetical protein; protein id: At1g15480.1
  misc_feature (1)..(419): Homolog of NCBI NO: 15220095 NR Description: hypothetical protein
MCLQLWEWLGANTQFEFTEANYASQLDLVAKVHSLQKAEIFLKDIPESSRGEVVYRTLLANCVLKHHVNKAEDIFNKMKELKFPTSVFACNQLLLLYSMHDRKKISDVLLLMERENIKPSRATYHFLINSKGLAGDITGMEKIVETMKEEGIELDPELQSILAKYYIRAGLKERAQDLMKEIEGKGLQQTPWVCRSLLPLYADIGDSDNVRRLSRFVDQNPRYDNCISAIKAWGKLKEVEEAEAVFERLVEKYKIFPMMPYFALMEIYTENKMLAKGRDLVKRMGNAGIAIGPSTWHALVKLYIKAGEVGKAELILNRATKDNKMRPMFTTYMAILEEYAKRGDVHNTEKVFMKMKRASYAAQLMQYETVLLAYINAKTPAYGMIERMKADNVFPNKSLAAKLAQVNPFKKCPVSVLLDI

SEQ ID NO: 38666 - protein, 343 aa, Arabidopsis thaliana
  peptide (1)..(343): Ceres Seq. ID no. 12329727
  misc_feature (1)..(316): Homolog of NCBI NO: 17064738 NR Description: Unknown protein [Arabidopsis thaliana]
  misc_feature (1)..(316): Homolog of NCBI NO: 15235508 NR Description: hypothetical protein
  misc_feature (1)..(330): Homolog of NCBI NO: 15219808 NR Description: hypothetical protein; protein id: At1g60770.1
  misc_feature (1)..(333): Homolog of NCBI NO: 34905294 NR Description: putative DNA-binding protein
  misc_feature (1)..(326): Homolog of NCBI NO: 34394024 NR Description: putative DNA-binding protein
  misc_feature (1)..(326): Homolog of NCBI NO: 34900334 NR Description: P0592C06.16 [Oryza sativa (japonica
  misc_feature (1)..(342): Homolog of NCBI NO: 6958202 NR Description: DNA-binding protein [Triticum aestivum]
  misc_feature (1)..(342): Homolog of NCBI NO: 34903362 NR Description: unnamed protein product [Oryza sativa (japonica
  misc_feature (1)..(342): Homolog of NCBI NO: 15218196 NR Description: hypothetical protein; protein id: At1g15480.1
  misc_feature (1)..(342): Homolog of NCBI NO: 15220095 NR Description: hypothetical protein
MKELKFPTSVFACNQLLLLYSMHDRKKISDVLLLMERENIKPSRATYHFLINSKGLAGDITGMEKIVETMKEEGIELDPELQSILAKYYIRAGLKERAQDLMKEIEGKGLQQTPWVCRSLLPLYADIGDSDNVRRLSRFVDQNPRYDNCISAIKAWGKLKEVEEAEAVFERLVEKYKIFPMMPYFALMEIYTENKMLAKGRDLVKRMGNAGIAIGPSTWHALVKLYIKAGEVGKAELILNRATKDNKMRPMFTTYMAILEEYAKRGDVHNTEKVFMKMKRASYAAQLMQYETVLLAYINAKTPAYGMIERMKADNVFPNKSLAAKLAQVNPFKKCPVSVLLDI

SEQ ID NO: 38667 - DNA, 1371 bp, Arabidopsis thaliana
  misc_feature (1)..(1371): Ceres Seq. ID no. 12328756
  misc_feature: MA Experiment ID: 20000264 Result: Up-regulated in Transcription
  misc_feature: MA Experiment 20000264 PARAMETER Experiment Name: At_Open_Flower_P Parameter: Age (day) Value: 21
  misc_feature: MA Experiment 20000264 PARAMETER Experiment Name: At_Open_Flower_P Parameter: Plant Line Value: WS
  misc_feature: MA Experiment 20000264 PARAMETER Experiment Name: At_Open_Flower_P Parameter: Tissue Value: Open Flower vs. Whole Plant
  misc_feature: MA Experiment ID: 20000286 Result: Up-regulated in Transcription
  misc_feature: MA Experiment 20000286 PARAMETER Experiment Name: At_Open_Flower_P Parameter: Age (day) Value: 21
  misc_feature: MA Experiment 20000286 PARAMETER Experiment Name: At_Open_Flower_P Parameter: Plant Line Value: WS
  misc_feature: MA Experiment 20000286 PARAMETER Experiment Name: At_Open_Flower_P Parameter: Tissue Value: Half Open vs. Whole Plant
  misc_feature: MA Experiment ID: 20000441 Result: Down-regulated in Transcription
  misc_feature: MA Experiment 20000441 PARAMETER Experiment Name: At_1uM_BR-BRZ__P Parameter: Tissue Value: Shoot Apices
  misc_feature: MA Experiment 20000441 PARAMETER Experiment Name: At_1uM_BR-BRZ__P Parameter: Treatment Value: 1uM BR vs. No Treatment
  misc_feature: MA Experiment ID: 20000443 Result: Down-regulated in Transcription
  misc_feature: MA Experiment 20000443 PARAMETER Experiment Name: At_1uM_BR-BRZ__P Parameter: Tissue Value: Shoot Apices
  misc_feature: MA Experiment 20000443 PARAMETER Experiment Name: At_1uM_BR-BRZ__P Parameter: Treatment Value: 1uM BRZ vs. No Treatment
  misc_feature: MA Experiment ID: 20000794 Result: Up-regulated in Transcription
  misc_feature: MA Experiment 20000794 PARAMETER Experiment Name: At_Petals_P Parameter: Age (day) Value: 23-25 days
  misc_feature: MA Experiment 20000794 PARAMETER Experiment Name: At_Petals_P Parameter: Plant Line Value: WS
  misc_feature: MA Experiment 20000794 PARAMETER Experiment Name: At_Petals_P Parameter: Tissue Value: Petals vs. Whole plant
  misc_feature: MA Experiment ID: 20001911 Result: Down-regulated in Transcription
  misc_feature: MA Experiment 20001911 PARAMETER Experiment Name: At_Drought_Reproduction_P Parameter: Age (day) Value: 40
  misc_feature: MA Experiment 20001911 PARAMETER Experiment Name: At_Drought_Reproduction_P Parameter: Organism Value: A. thaliana
  misc_feature: MA Experiment 20001911 PARAMETER Experiment Name: At_Drought_Reproduction_P Parameter: Plant Line Value: WS
  misc_feature: MA Experiment 20001911 PARAMETER Experiment Name: At_Drought_Reproduction_P Parameter: Timepoint (day) Value: 10
  misc_feature: MA Experiment 20001911 PARAMETER Experiment Name: At_Drought_Reproduction_P Parameter: Tissue Value: Flowers
  misc_feature: MA Experiment 20001911 PARAMETER Experiment Name: At_Drought_Reproduction_P Parameter: Treatment Value: Drought vs. No Drought
  misc_feature: Phenotype: SILIQUES Length-Short
  misc_feature: Phenotype: FERTILITY Fertility-Reduced
  misc_feature: Phenotype: WHOLE PLANT Size-Small
  misc_feature: Phenotype: FERTILITY Fertility-Sterile
  misc_feature: Phenotype: INFLORESCENCE Height-Tall
  misc_feature: Phenotype: SILIQUES Length-Short
  misc_feature: Phenotype: FERTILITY Fertility-Reduced
ataaaatggcgcaaagtgtgaaagttgaaacatatcctcatatttagcatcactcctctaatattattttttcaaacaagaacaatggcaaaccatctccaagtccccttaaccaaaccggatcgagttaaagaagaacaagaggttgaagaagaggcaagattgctagcgagaaggctcgcgaatgcagccgcattacctatggttctcaaagccgccttggagctcggcgtgatcgacaccatcaccacagtaggaggtggcgatttgtggctctcaccttctgaaatagcactaagactcccaaccaaaccatgcaacctggaagctccggttttgctagaccgtatgcttcgatttctcgtcagccattcggtcttaaaatgccgtactgtaatagaagagaacggtcaaaccggaaaagttgagagggtatatgcagctgaaccggtctgcaaatatctcttgaacaaaagtgacgacgtctcgggttcttttgcatcgctctttatgcttgacctcagcgacgtatttatcaagacatggacacatctcaaagatgtgatattagcaggaagagatgcatttagttctgcccatgggatgaaactattcgaatacatccaagccgatgagcgatttggtaaagtgtttaaccgggctatgttggaatcttccaccatggttacggagaaggttcttaaattttatgaaggattcaaagatgtgaagactttggtggatgtagggggaggacttggcaacacactaggtctcatcacttccaagtatcctcatcttattggtatcaatttcgatttagctccggtgttagccaatgctcattcttatcccggtgtgaaccatgtggctggtgatatgttcatcaagattccaaagggggatgccattttcatgaagtggatactacatgattggacggacgaacaatgcgtagcaattcttaaaaactgttggaaaagtctcgaagaaaatggaaaactgataatagtggaaatggttacaccggtggaagcaaagagcggagatatatgttctaacattgtgtttggtatggacatgacaatgttaacacaatgttcaggtggtaaagagagatctctctatgagtttgaaaatttagcatatgcatcgggtttttctcgttgtgcaatcgtatgcgctgtttatccattttccgtcatcgaaatctacaaatagattcattcaacatatgccattttacgatatttacacaacccgtttcttcttctatttgggatgtaatgtttgtgattatcatttgtgtgtggtcgatcttttgtaatgttttcgtgtgatgttcttaccgttgtaatgatatatgtgtct

SEQ ID NO: 38668 - protein, 378 aa, Arabidopsis thaliana
  peptide (1)..(378): Ceres Seq. ID no. 12328757
  misc_feature (111)..(355): Pfam Name: O-methyltransferase Pfam Description: O-methyltransferase
  misc_feature (22)..(378): Homolog of NCBI NO: 15218138 NR Description: O-methyltransferase 1, putative
  misc_feature (22)..(378): Homolog of NCBI NO: 15218133 NR Description: O-methyltransferase 1, putative
  misc_feature (22)..(378): Homolog of NCBI NO: 21618219 NR Description: O-methyltransferase, putative [Arabidopsis
  misc_feature (1)..(378): Homolog of NCBI NO: 25315953 NR Description: hypothetical protein F16M19.12 [imported] -
  misc_feature (40)..(378): Homolog of NCBI NO: 21593350 NR Description: putative caffeic acid 3-O-methyltransferase
  misc_feature (1)..(378): Homolog of NCBI NO: 15223976 NR Description: O-methyltransferase, family 2 family
  misc_feature (1)..(378): Homolog of NCBI NO: 27808586 NR Description: At1g77520 [Arabidopsis thaliana]
  misc_feature (1)..(378): Homolog of NCBI NO: 15223977 NR Description: O-methyltransferase, family 2 family; protein id:
  misc_feature (1)..(378): Homolog of NCBI NO: 15238847 NR Description: O-methyltransferase 1, putative
  misc_feature (1)..(378): Homolog of NCBI NO: 21618183 NR Description: caffeic acid 3-O-methyltransferase-like protein
MANHLQVPLTKPDRVKEEQEVEEEARLLARRLANAAALPMVLKAALELGVIDTITTVGGGDLWLSPSEIALRLPTKPCNLEAPVLLDRMLRFLVSHSVLKCRTVIEENGQTGKVERVYAAEPVCKYLLNKSDDVSGSFASLFMLDLSDVFIKTWTHLKDVILAGRDAFSSAHGMKLFEYIQADERFGKVFNRAMLESSTMVTEKVLKFYEGFKDVKTLVDVGGGLGNTLGLITSKYPHLIGINFDLAPVLANAHSYPGVNHVAGDMFIKIPKGDAIFMKWILHDWTDEQCVAILKNCWKSLEENGKLIIVEMVTPVEAKSGDICSNIVFGMDMTMLTQCSGGKERSLYEFENLAYASGFSRCAIVCAVYPFSVIEIYK

SEQ ID NO: 38669 - protein, 339 aa, Arabidopsis thaliana
  peptide (1)..(339): Ceres Seq. ID no. 12328758
  misc_feature (72)..(316): Pfam Name: O-methyltransferase Pfam Description: O-methyltransferase
  misc_feature (1)..(339): Homolog of NCBI NO: 15218138 NR Description: O-methyltransferase 1, putative
  misc_feature (1)..(339): Homolog of NCBI NO: 15218133 NR Description: O-methyltransferase 1, putative
  misc_feature (1)..(339): Homolog of NCBI NO: 21618219 NR Description: O-methyltransferase, putative [Arabidopsis
  misc_feature (1)..(339): Homolog of NCBI NO: 25315953 NR Description: hypothetical protein F16M19.12 [imported] -
  misc_feature (1)..(339): Homolog of NCBI NO: 21593350 NR Description: putative caffeic acid 3-O-methyltransferase
  misc_feature (1)..(339): Homolog of NCBI NO: 15223976 NR Description: O-methyltransferase, family 2 family
  misc_feature (1)..(339): Homolog of NCBI NO: 27808586 NR Description: At1g77520 [Arabidopsis thaliana]
  misc_feature (1)..(339): Homolog of NCBI NO: 15223977 NR Description: O-methyltransferase, family 2 family; protein id:
  misc_feature (1)..(339): Homolog of NCBI NO: 15238847 NR Description: O-methyltransferase 1, putative
  misc_feature (1)..(339): Homolog of NCBI NO: 21618183 NR Description: caffeic acid 3-O-methyltransferase-like protein
MVLKAALELGVIDTITTVGGGDLWLSPSEIALRLPTKPCNLEAPVLLDRMLRFLVSHSVLKCRTVIEENGQTGKVERVYAAEPVCKYLLNKSDDVSGSFASLFMLDLSDVFIKTWTHLKDVILAGRDAFSSAHGMKLFEYIQADERFGKVFNRAMLESSTMVTEKVLKFYEGFKDVKTLVDVGGGLGNTLGLITSKYPHLIGINFDLAPVLANAHSYPGVNHVAGDMFIKIPKGDAIFMKWILHDWTDEQCVAILKNCWKSLEENGKLIIVEMVTPVEAKSGDICSNIVFGMDMTMLTQCSGGKERSLYEFENLAYASGFSRCAIVCAVYPFSVIEIYK

SEQ ID NO: 38670 - protein, 290 aa, Arabidopsis thaliana
  peptide (1)..(290): Ceres Seq. ID no. 12328759
  misc_feature (23)..(267): Pfam Name: O-methyltransferase Pfam Description: O-methyltransferase
  misc_feature (1)..(290): Homolog of NCBI NO: 15218138 NR Description: O-methyltransferase 1, putative
  misc_feature (1)..(290): Homolog of NCBI NO: 15218133 NR Description: O-methyltransferase 1, putative
  misc_feature (1)..(290): Homolog of NCBI NO: 21618219 NR Description: O-methyltransferase, putative [Arabidopsis
  misc_feature (1)..(290): Homolog of NCBI NO: 25315953 NR Description: hypothetical protein F16M19.12 [imported] -
  misc_feature (1)..(290): Homolog of NCBI NO: 21593350 NR Description: putative caffeic acid 3-O-methyltransferase
  misc_feature (1)..(290): Homolog of NCBI NO: 15223976 NR Description: O-methyltransferase, family 2 family
  misc_feature (1)..(290): Homolog of NCBI NO: 27808586 NR Description: At1g77520 [Arabidopsis thaliana]
  misc_feature (1)..(290): Homolog of NCBI NO: 15223977 NR Description: O-methyltransferase, family 2 family; protein id:
  misc_feature (1)..(290): Homolog of NCBI NO: 15238847 NR Description: O-methyltransferase 1, putative
  misc_feature (1)..(290): Homolog of NCBI NO: 21618183 NR Description: caffeic acid 3-O-methyltransferase-like protein
MLRFLVSHSVLKCRTVIEENGQTGKVERVYAAEPVCKYLLNKSDDVSGSFASLFMLDLSDVFIKTWTHLKDVILAGRDAFSSAHGMKLFEYIQADERFGKVFNRAMLESSTMVTEKVLKFYEGFKDVKTLVDVGGGLGNTLGLITSKYPHLIGINFDLAPVLANAHSYPGVNHVAGDMFIKIPKGDAIFMKWILHDWTDEQCVAILKNCWKSLEENGKLIIVEMVTPVEAKSGDICSNIVFGMDMTMLTQCSGGKERSLYEFENLAYASGFSRCAIVCAVYPFSVIEIYK

SEQ ID NO: 38671 - DNA, 1524 bp, Arabidopsis thaliana
  misc_feature (1)..(1524): Ceres Seq. ID no. 12331033
  misc_feature: MA Experiment ID: 108463 Result: Up-regulated in Transcription
  misc_feature: MA Experiment 108463 PARAMETER Experiment Name: At_Germinating_Seeds_cDNA_P Parameter: Age (day) Value: 3 vs. 0
  misc_feature: MA Experiment 108463 PARAMETER Experiment Name: At_Germinating_Seeds_cDNA_P Parameter: Tissue Value: Germinating Seeds
  misc_feature: MA Experiment ID: 108572 Result: Up-regulated in Transcription
  misc_feature: MA Experiment 108572 PARAMETER Experiment Name: At_Drought_cDNA_P Parameter: Timepoint (hr) Value: 1
  misc_feature: MA Experiment 108572 PARAMETER Experiment Name: At_Drought_cDNA_P Parameter: Tissue Value: Aerial
  misc_feature: MA Experiment 108572 PARAMETER Experiment Name: At_Drought_cDNA_P Parameter: Treatment Value: Drought vs. No Drought
  misc_feature: MA Experiment ID: 108573 Result: Up-regulated in Transcription
  misc_feature: MA Experiment 108573 PARAMETER Experiment Name: At_Drought_cDNA_P Parameter: Timepoint (hr) Value: 6
  misc_feature: MA Experiment 108573 PARAMETER Experiment Name: At_Drought_cDNA_P Parameter: Tissue Value: Aerial
  misc_feature: MA Experiment 108573 PARAMETER Experiment Name: At_Drought_cDNA_P Parameter: Treatment Value: Drought vs. No Drought
  misc_feature: MA Experiment ID: 108577 Result: Down-regulated in Transcription
  misc_feature: MA Experiment 108577 PARAMETER Experiment Name: At_42deg_Heat_cDNA_P Parameter: Temperature (deg C) Value: 42 vs. 22
  misc_feature: MA Experiment 108577 PARAMETER Experiment Name: At_42deg_Heat_cDNA_P Parameter: Timepoint (hr) Value: 6
  misc_feature: MA Experiment 108577 PARAMETER Experiment Name: At_42deg_Heat_cDNA_P Parameter: Tissue Value: Aerial
  misc_feature: MA Experiment ID: 108595 Result: Down-regulated in Transcription
  misc_feature: MA Experiment 108595 PARAMETER Experiment Name: At_Ler-pi_Ovule_cDNA_P Parameter: Plant Line Value: null
  misc_feature: MA Experiment ID: 108605 Result: Up-regulated in Transcription
  misc_feature: MA Experiment 108605 PARAMETER Experiment Name: At_100uM_ABA_cDNA_P Parameter: Timepoint (hr) Value: 6
  misc_feature: MA Experiment 108605 PARAMETER Experiment Name: At_100uM_ABA_cDNA_P Parameter: Tissue Value: Aerial
  misc_feature: MA Experiment 108605 PARAMETER Experiment Name: At_100uM_ABA_cDNA_P Parameter: Treatment Value: 100uM ABA vs. No Treatment
  misc_feature: MA Experiment ID: 20000072 Result: Up-regulated in Transcription
  misc_feature: MA Experiment 20000072 PARAMETER Experiment Name: At_100uM_ABA_Mutants_cDNA_P Parameter: Plant Line Value: CS8105
  misc_feature: MA Experiment 20000072 PARAMETER Experiment Name: At_100uM_ABA_Mutants_cDNA_P Parameter: Timepoint (hr) Value: 6
  misc_feature: MA Experiment 20000072 PARAMETER Experiment Name: At_100uM_ABA_Mutants_cDNA_P Parameter: Tissue Value: Aerial
  misc_feature: MA Experiment 20000072 PARAMETER Experiment Name: At_100uM_ABA_Mutants_cDNA_P Parameter: Treatment Value: 100uM ABA vs. No Treatment
  misc_feature: MA Experiment ID: 20000111 Result: Down-regulated in Transcription
  misc_feature: MA Experiment 20000111 PARAMETER Experiment Name: At_42deg_Heat_cDNA_P Parameter: Temperature (deg C) Value: 42 vs. 22
  misc_feature: MA Experiment 20000111 PARAMETER Experiment Name: At_42deg_Heat_cDNA_P Parameter: Timepoint (hr) Value: 6
  misc_feature: MA Experiment 20000111 PARAMETER Experiment Name: At_42deg_Heat_cDNA_P Parameter: Tissue Value: Aerial
  misc_feature: MA Experiment ID: 20000112 Result: Down-regulated in Transcription
  misc_feature: MA Experiment 20000112 PARAMETER Experiment Name: At_42deg_Heat_cDNA_P Parameter: Temperature (deg C) Value: 42 vs. 22
  misc_feature: MA Experiment 20000112 PARAMETER Experiment Name: At_42deg_Heat_cDNA_P Parameter: Timepoint (hr) Value: 2
  misc_feature: MA Experiment 20000112 PARAMETER Experiment Name: At_42deg_Heat_cDNA_P Parameter: Tissue Value: Aerial
  misc_feature: MA Experiment ID: 20000113 Result: Down-regulated in Transcription
  misc_feature: MA Experiment 20000113 PARAMETER Experiment Name: At_42deg_Heat_cDNA_P Parameter: Temperature (deg C) Value: 42 vs. 22
  misc_feature: MA Experiment 20000113 PARAMETER Experiment Name: At_42deg_Heat_cDNA_P Parameter: Timepoint (hr) Value: 8
  misc_feature: MA Experiment 20000113 PARAMETER Experiment Name: At_42deg_Heat_cDNA_P Parameter: Tissue Value: Aerial
  misc_feature: MA Experiment ID: 20000144 Result: Down-regulated in Transcription
  misc_feature: MA Experiment 20000144 PARAMETER Experiment Name: At_42deg_Heat_cDNA_P Parameter: Temperature (deg C) Value: 42 vs. 22
  misc_feature: MA Experiment 20000144 PARAMETER Experiment Name: At_42deg_Heat_cDNA_P Parameter: Timepoint (hr) Value: 1
  misc_feature: MA Experiment 20000144 PARAMETER Experiment Name: At_42deg_Heat_cDNA_P Parameter: Tissue Value: Aerial
  misc_feature: MA Experiment ID: 20000171 Result: Down-regulated in Transcription
  misc_feature: MA Experiment 20000171 PARAMETER Experiment Name: At_42deg_Heat_P Parameter: Age (day) Value: 14
  misc_feature: MA Experiment 20000171 PARAMETER Experiment Name: At_42deg_Heat_P Parameter: Organism Value: A. thaliana
  misc_feature: MA Experiment 20000171 PARAMETER Experiment Name: At_42deg_Heat_P Parameter: Plant Line Value: WS
  misc_feature: MA Experiment 20000171 PARAMETER Experiment Name: At_42deg_Heat_P Parameter: Temperature (deg C) Value: 42 vs. 22
  misc_feature: MA Experiment 20000171 PARAMETER Experiment Name: At_42deg_Heat_P Parameter: Timepoint (hr) Value: 1
  misc_feature: MA Experiment 20000171 PARAMETER Experiment Name: At_42deg_Heat_P Parameter: Tissue Value: Aerial
  misc_feature: MA Experiment ID: 20000173 Result: Down-regulated in Transcription
  misc_feature: MA Experiment 20000173 PARAMETER Experiment Name: At_42deg_Heat_P Parameter: Age (day) Value: 14
  misc_feature: MA Experiment 20000173 PARAMETER Experiment Name: At_42deg_Heat_P Parameter: Organism Value: A. thaliana
  misc_feature: MA Experiment 20000173 PARAMETER Experiment Name: At_42deg_Heat_P Parameter: Plant Line Value: WS
  misc_feature: MA Experiment 20000173 PARAMETER Experiment Name: At_42deg_Heat_P Parameter: Temperature (deg C) Value: 42 vs. 22
  misc_feature: MA Experiment 20000173 PARAMETER Experiment Name: At_42deg_Heat_P Parameter: Timepoint (hr) Value: 6
  misc_feature: MA Experiment 20000173 PARAMETER Experiment Name: At_42deg_Heat_P Parameter: Tissue Value: Aerial
  misc_feature: MA Experiment ID: 20000185 Result: Down-regulated in Transcription
  misc_feature: MA Experiment 20000185 PARAMETER Experiment Name: At_Roots__P Parameter: Age (day) Value: 7 vs. 21
  misc_feature: MA Experiment 20000185 PARAMETER Experiment Name: At_Roots__P Parameter: Organism Value: A. thaliana
  misc_feature: MA Experiment 20000185 PARAMETER Experiment Name: At_Roots__P Parameter: Tissue Value: Roots vs. Whole Plant
  misc_feature: MA Experiment ID: 20000234 Result: Up-regulated in Transcription
  misc_feature: MA Experiment 20000234 PARAMETER Experiment Name: At_Siliques_P Parameter: Age (day) Value: 21
  misc_feature: MA Experiment 20000234 PARAMETER Experiment Name: At_Siliques_P Parameter: Organism Value: A. thaliana
  misc_feature: MA Experiment 20000234 PARAMETER Experiment Name: At_Siliques_P Parameter: Plant Line Value: WS
  misc_feature: MA Experiment 20000234 PARAMETER Experiment Name: At_Siliques_P Parameter: Tissue Value: Less Than 5mm Siliques vs. Whole Plant
  misc_feature: MA Experiment ID: 20000286 Result: Up-regulated in Transcription
  misc_feature: MA Experiment 20000286 PARAMETER Experiment Name: At_Open_Flower_P Parameter: Age (day) Value: 21
  misc_feature: MA Experiment 20000286 PARAMETER Experiment Name: At_Open_Flower_P Parameter: Plant Line Value: WS
  misc_feature: MA Experiment 20000286 PARAMETER Experiment Name: At_Open_Flower_P Parameter: Tissue Value: Half Open vs. Whole Plant
  misc_feature: MA Experiment ID: 20000439 Result: Down-regulated in Transcription
  misc_feature: MA Experiment 20000439 PARAMETER Experiment Name: At_Roots__P Parameter: Age (day) Value: 14 vs. 21
  misc_feature: MA Experiment 20000439 PARAMETER Experiment Name: At_Roots__P Parameter: Organism Value: A. thaliana
  misc_feature: MA Experiment 20000439 PARAMETER Experiment Name: At_Roots__P Parameter: Tissue Value: Roots vs. Whole Plant
  misc_feature: MA Experiment ID: 20001451 Result: Down-regulated in Transcription
  misc_feature: MA Experiment 20001451 PARAMETER Experiment Name: At_Far-red-induction_P Parameter: Age (day) Value: 7
  misc_feature: MA Experiment 20001451 PARAMETER Experiment Name: At_Far-red-induction_P Parameter: Light Value: Far-red vs. White
  misc_feature: MA Experiment 20001451 PARAMETER Experiment Name: At_Far-red-induction_P Parameter: Organism Value: A. thaliana
  misc_feature: MA Experiment 20001451 PARAMETER Experiment Name: At_Far-red-induction_P Parameter: Plant Line Value: Columbia
  misc_feature: MA Experiment 20001451 PARAMETER Experiment Name: At_Far-red-induction_P Parameter: Timepoint (hr) Value: 24
  misc_feature: MA Experiment 20001451 PARAMETER Experiment Name: At_Far-red-induction_P Parameter: Tissue Value: Whole Plant
  misc_feature: MA Experiment ID: 20001557 Result: Up-regulated in Transcription
  misc_feature: MA Experiment 20001557 PARAMETER Experiment Name: At_Drought_Soil_Dry_P Parameter: Age (day) Value: 27
  misc_feature: MA Experiment 20001557 PARAMETER Experiment Name: At_Drought_Soil_Dry_P Parameter: Organism Value: A. thaliana
  misc_feature: MA Experiment 20001557 PARAMETER Experiment Name: At_Drought_Soil_Dry_P Parameter: Plant Line Value: WS
  misc_feature: MA Experiment 20001557 PARAMETER Experiment Name: At_Drought_Soil_Dry_P Parameter: Post Timepoint (hr) Value: 3
  misc_feature: MA Experiment 20001557 PARAMETER Experiment Name: At_Drought_Soil_Dry_P Parameter: Post-Treatment Value: Re-Water vs. No Drought
  misc_feature: MA Experiment 20001557 PARAMETER Experiment Name: At_Drought_Soil_Dry_P Parameter: Timepoint (day) Value: 13
  misc_feature: MA Experiment 20001557 PARAMETER Experiment Name: At_Drought_Soil_Dry_P Parameter: Treatment Value: Drought vs. No Drought
  misc_feature: MA Experiment ID: 20001558 Result: Up-regulated in Transcription
  misc_feature: MA Experiment 20001558 PARAMETER Experiment Name: At_Drought_Soil_Dry_P Parameter: Age (day) Value: 27
  misc_feature: MA Experiment 20001558 PARAMETER Experiment Name: At_Drought_Soil_Dry_P Parameter: Organism Value: A. thaliana
  misc_feature: MA Experiment 20001558 PARAMETER Experiment Name: At_Drought_Soil_Dry_P Parameter: Plant Line Value: WS
  misc_feature: MA Experiment 20001558 PARAMETER Experiment Name: At_Drought_Soil_Dry_P Parameter: Post Timepoint (hr) Value: 6
  misc_feature: MA Experiment 20001558 PARAMETER Experiment Name: At_Drought_Soil_Dry_P Parameter: Post-Treatment Value: Re-Water vs. No Drought
  misc_feature: MA Experiment 20001558 PARAMETER Experiment Name: At_Drought_Soil_Dry_P Parameter: Timepoint (day) Value: 13
  misc_feature: MA Experiment 20001558 PARAMETER Experiment Name: At_Drought_Soil_Dry_P Parameter: Treatment Value: Drought vs. No Drought
aatcataggcatagcaaaactcttccaaaatgtctgatttctcgagctccgtgaagcttaaatatgttaaactcggttaccaataccttatcaacaacttccttactcttcttttgattccagtcatagcaaccgtcgccatcgagcttctccgaatgggtccggaagagattctcagtgtcttgaactcactccacttcgagcttcttcatatcctttgttcctctttccttattatctttgtttcaaccgtttacttcatgtccaagccacgtaccgtctaccttgtggactactcttgctacaaacctcctgtcacgtgccgtgtcccgttctcttcgttcatggaacactctcgtctcatcctcaaagacaatcccaagagtgtcgaattccaaatgagaatcctcgagcgatcaggtctaggagaagagacttgtctccctccagctattcattacatccctccaactccaaccatggaatccgcaagaaacgaggcccaaatggttatcttcaccgccatggaagatctcttcaagaatacaggtcttaaacctaaagacatcgacatcctcattgttaattgctctctgttctcaccaacgccgtctctctccgctatgattatcaacaagtacaagcttaggagtaacatcaaaagctataacctttccgggatgggatgcagcgctagtcttatctcagttgatgtagcacgtaatttgttacaagtccatcctaactccaacgcaatcataattagcactgagatcattactcctaattactataagggtaatgagagagccatgttgctcccaaactgcctcttccgtatgggaggcgccgccattctcctctctaaccgcagatccgacaggtggcgagctaagtacaagttatgccaccttgttaggacccatcgcggtgcggatgacaaatcctacaactgtgttatggaacaggaagacaaaaatggtaacgtgggaatcaacttgtctaaagatctcatgaccattgccggagaagccttgaaagctaatatcactaccataggtcctttggtccttccggcatccggagcagcttctcttcctctcatcccttatcggacgtaaaatcttcaatccaaagtggaagccgtacataccagatttcaagcaggccttcgagcatttctgcatccacgcaggaggaagagcggtgattgatgagctgcaaaagaatctacagctgtcgggagaacacgtggaagcttcaagaatgacactacataggtttggtaatacatcgtcgtcatcattatggtatgagcttagctacatagaggctcaagggaggatgaagagaaacgatagggtttggcagatcgctttcggaagtggattcaagtgtaactccgccgtttggaaatgtaaccgtacgatcaagacaccaacggatggagcgtggtcggattgtatcgaacgataccctgtctttatccctgaagttgttaaactatgaaaatacttttttttt

SEQ ID NO: 38672 - protein, 363 aa, Arabidopsis thaliana
  peptide (1)..(363): Ceres Seq. ID no. 12331034
  misc_feature (106)..(277): Pfam Name: Chalcone and stilbene synthases, N-terminal domain Pfam Description: Chalcone and stilbene synthases, N-terminal
  misc_feature (1)..(351): Homolog of NCBI NO: 29417540 NR Description: beta-ketoacyl-CoA-synthase [Marchantia polymorpha]
  misc_feature (1)..(344): Homolog of NCBI NO: 30697701 NR Description: very-long-chain fatty acid condensing enzyme
  misc_feature (1)..(351): Homolog of NCBI NO: 15223556 NR Description: very-long-chain fatty acid condensing enzyme
  misc_feature (1)..(351): Homolog of NCBI NO: 15226724 NR Description: putative beta-ketoacyl-CoA synthase; protein id:
  misc_feature (1)..(351): Homolog of NCBI NO: 21593111 NR Description: very-long-chain fatty acid condensing enzyme CUT1
  misc_feature (1)..(351): Homolog of NCBI NO: 15221431 NR Description: very-long-chain fatty acid condensing enzyme
  misc_feature (1)..(351): Homolog of NCBI NO: 17979464 NR Description: At1g68530/T26J14_10 [Arabidopsis thaliana]
  misc_feature (1)..(351): Homolog of NCBI NO: 28393607 NR Description: putative fatty acid condensing enzyme CUT1
  misc_feature (1)..(351): Homolog of NCBI NO: 15222592 NR Description: fatty acid condensing enzyme CUT1, putative
  misc_feature (1)..(351): Homolog of NCBI NO: 21618184 NR Description: fatty acid condensing enzyme CUT1, putative
MSDFSSSVKLKYVKLGYQYLINNFLTLLLIPVIATVAIELLRMGPEEILSVLNSLHFELLHILCSSFLIIFVSTVYFMSKPRTVYLVDYSCYKPPVTCRVPFSSFMEHSRLILKDNPKSVEFQMRILERSGLGEETCLPPAIHYIPPTPTMESARNEAQMVIFTAMEDLFKNTGLKPKDIDILIVNCSLFSPTPSLSAMIINKYKLRSNIKSYNLSGMGCSASLISVDVARNLLQVHPNSNAIIISTEIITPNYYKGNERAMLLPNCLFRMGGAAILLSNRRSDRWRAKYKLCHLVRTHRGADDKSYNCVMEQEDKNGNVGINLSKDLMTIAGEALKANITTIGPLVLPASGAASLPLIPYRT

SEQ ID NO: 38673 - protein, 321 aa, Arabidopsis thaliana
  peptide (1)..(321): Ceres Seq. ID no. 12331035
  misc_feature (64)..(235): Pfam Name: Chalcone and stilbene synthases, N-terminal domain Pfam Description: Chalcone and stilbene synthases, N-terminal
  misc_feature (1)..(309): Homolog of NCBI NO: 29417540 NR Description: beta-ketoacyl-CoA-synthase [Marchantia polymorpha]
  misc_feature (1)..(302): Homolog of NCBI NO: 30697701 NR Description: very-long-chain fatty acid condensing enzyme
  misc_feature (1)..(309): Homolog of NCBI NO: 15223556 NR Description: very-long-chain fatty acid condensing enzyme
  misc_feature (1)..(309): Homolog of NCBI NO: 15226724 NR Description: putative beta-ketoacyl-CoA synthase; protein id:
  misc_feature (1)..(309): Homolog of NCBI NO: 21593111 NR Description: very-long-chain fatty acid condensing enzyme CUT1
  misc_feature (1)..(309): Homolog of NCBI NO: 15221431 NR Description: very-long-chain fatty acid condensing enzyme
  misc_feature (1)..(309): Homolog of NCBI NO: 17979464 NR Description: At1g68530/T26J14_10 [Arabidopsis thaliana]
  misc_feature (1)..(309): Homolog of NCBI NO: 28393607 NR Description: putative fatty acid condensing enzyme CUT1
  misc_feature (1)..(309): Homolog of NCBI NO: 15222592 NR Description: fatty acid condensing enzyme CUT1, putative
  misc_feature (1)..(309): Homolog of NCBI NO: 21618184 NR Description: fatty acid condensing enzyme CUT1, putative
MGPEEILSVLNSLHFELLHILCSSFLIIFVSTVYFMSKPRTVYLVDYSCYKPPVTCRVPFSSFMEHSRLILKDNPKSVEFQMRILERSGLGEETCLPPAIHYIPPTPTMESARNEAQMVIFTAMEDLFKNTGLKPKDIDILIVNCSLFSPTPSLSAMIINKYKLRSNIKSYNLSGMGCSASLISVDVARNLLQVHPNSNAIIISTEIITPNYYKGNERAMLLPNCLFRMGGAAILLSNRRSDRWRAKYKLCHLVRTHRGADDKSYNCVMEQEDKNGNVGINLSKDLMTIAGEALKANITTIGPLVLPASGAASLPLIPYRT

SEQ ID NO: 38674 - protein, 286 aa, Arabidopsis thaliana
  peptide (1)..(286): Ceres Seq. ID no. 12331036
  misc_feature (29)..(200): Pfam Name: Chalcone and stilbene synthases, N-terminal domain Pfam Description: Chalcone and stilbene synthases, N-terminal
  misc_feature (1)..(274): Homolog of NCBI NO: 29417540 NR Description: beta-ketoacyl-CoA-synthase [Marchantia polymorpha]
  misc_feature (1)..(267): Homolog of NCBI NO: 30697701 NR Description: very-long-chain fatty acid condensing enzyme
  misc_feature (1)..(274): Homolog of NCBI NO: 15223556 NR Description: very-long-chain fatty acid condensing enzyme
  misc_feature (1)..(274): Homolog of NCBI NO: 15226724 NR Description: putative beta-ketoacyl-CoA synthase; protein id:
  misc_feature (1)..(274): Homolog of NCBI NO: 21593111 NR Description: very-long-chain fatty acid condensing enzyme CUT1
  misc_feature (1)..(274): Homolog of NCBI NO: 15221431 NR Description: very-long-chain fatty acid condensing enzyme
  misc_feature (1)..(274): Homolog of NCBI NO: 17979464 NR Description: At1g68530/T26J14_10 [Arabidopsis thaliana]
  misc_feature (1)..(274): Homolog of NCBI NO: 28393607 NR Description: putative fatty acid condensing enzyme CUT1
  misc_feature (1)..(274): Homolog of NCBI NO: 15222592 NR Description: fatty acid condensing enzyme CUT1, putative
  misc_feature (1)..(274): Homolog of NCBI NO: 21618184 NR Description: fatty acid condensing enzyme CUT1, putative
MSKPRTVYLVDYSCYKPPVTCRVPFSSFMEHSRLILKDNPKSVEFQMRILERSGLGEETCLPPAIHYIPPTPTMESARNEAQMVIFTAMEDLFKNTGLKPKDIDILIVNCSLFSPTPSLSAMIINKYKLRSNIKSYNLSGMGCSASLISVDVARNLLQVHPNSNAIIISTEIITPNYYKGNERAMLLPNCLFRMGGAAILLSNRRSDRWRAKYKLCHLVRTHRGADDKSYNCVMEQEDKNGNVGINLSKDLMTIAGEALKANITTIGPLVLPASGAASLPLIPYRT

SEQ ID NO: 38675 - DNA, 972 bp, Arabidopsis thaliana
  misc_feature (1)..(972): Ceres Seq. ID no. 12422442
  misc_feature: MA Experiment ID: 108434 Result: Down-regulated in Transcription
  misc_feature: MA Experiment 108434 PARAMETER Experiment Name: At_Root_Tips_cDNA_P Parameter: Tissue Value: Root Tips
  misc_feature: MA Experiment ID: 108462 Result: Up-regulated in Transcription
  misc_feature: MA Experiment 108462 PARAMETER Experiment Name: At_Germinating_Seeds_cDNA_P Parameter: Age (day) Value: 2 vs. 0
  misc_feature: MA Experiment 108462 PARAMETER Experiment Name: At_Germinating_Seeds_cDNA_P Parameter: Tissue Value: Germinating Seeds
  misc_feature: MA Experiment ID: 108463 Result: Up-regulated in Transcription
  misc_feature: MA Experiment 108463 PARAMETER Experiment Name: At_Germinating_Seeds_cDNA_P Parameter: Age (day) Value: 3 vs. 0
  misc_feature: MA Experiment 108463 PARAMETER Experiment Name: At_Germinating_Seeds_cDNA_P Parameter: Tissue Value: Germinating Seeds
  misc_feature: MA Experiment ID: 108464 Result: Up-regulated in Transcription
  misc_feature: MA Experiment 108464 PARAMETER Experiment Name: At_Germinating_Seeds_cDNA_P Parameter: Age (day) Value: 4 vs. 0
  misc_feature: MA Experiment 108464 PARAMETER Experiment Name: At_Germinating_Seeds_cDNA_P Parameter: Tissue Value: Germinating Seeds
  misc_feature: MA Experiment ID: 108572 Result: Up-regulated in Transcription
  misc_feature: MA Experiment 108572 PARAMETER Experiment Name: At_Drought_cDNA_P Parameter: Timepoint (hr) Value: 1
  misc_feature: MA Experiment 108572 PARAMETER Experiment Name: At_Drought_cDNA_P Parameter: Tissue Value: Aerial
  misc_feature: MA Experiment 108572 PARAMETER Experiment Name: At_Drought_cDNA_P Parameter: Treatment Value: Drought vs. No Drought
  misc_feature: MA Experiment ID: 108573 Result: Up-regulated in Transcription
  misc_feature: MA Experiment 108573 PARAMETER Experiment Name: At_Drought_cDNA_P Parameter: Timepoint (hr) Value: 6
  misc_feature: MA Experiment 108573 PARAMETER Experiment Name: At_Drought_cDNA_P Parameter: Tissue Value: Aerial
  misc_feature: MA Experiment 108573 PARAMETER Experiment Name: At_Drought_cDNA_P Parameter: Treatment Value: Drought vs. No Drought
  misc_feature: MA Experiment ID: 108585 Result: Up-regulated in Transcription
  misc_feature: MA Experiment 108585 PARAMETER Experiment Name: At_5mM_NaNP_cDNA_P Parameter: Timepoint (hr) Value: 6
  misc_feature: MA Experiment 108585 PARAMETER Experiment Name: At_5mM_NaNP_cDNA_P Parameter: Tissue Value: Aerial
  misc_feature: MA Experiment 108585 PARAMETER Experiment Name: At_5mM_NaNP_cDNA_P Parameter: Treatment Value: null
  misc_feature: MA Experiment ID: 108594 Result: Down-regulated in Transcription
  misc_feature: MA Experiment 108594 PARAMETER Experiment Name: At_Ler-rhl_Root_cDNA_P Parameter: Plant Line Value: null
  misc_feature: MA Experiment ID: 108595 Result: Down-regulated in Transcription
  misc_feature: MA Experiment 108595 PARAMETER Experiment Name: At_Ler-pi_Ovule_cDNA_P Parameter: Plant Line Value: null
  misc_feature: MA Experiment ID: 108668 Result: Up-regulated in Transcription
  misc_feature: MA Experiment 108668 PARAMETER Experiment Name: At_2mM_SA_cDNA_P Parameter: Plant Line Value: WS
  misc_feature: MA Experiment 108668 PARAMETER Experiment Name: At_2mM_SA_cDNA_P Parameter: Timepoint (hr) Value: 6
  misc_feature: MA Experiment 108668 PARAMETER Experiment Name: At_2mM_SA_cDNA_P Parameter: Treatment Value: 2mM SA vs. No Treatment
  misc_feature: MA Experiment ID: 20000089 Result: Down-regulated in Transcription
  misc_feature: MA Experiment ID: 20000182 Result: Up-regulated in Transcription
  misc_feature: MA Experiment 20000182 PARAMETER Experiment Name: At_2mM_SA_P Parameter: Age (day) Value: 14
  misc_feature: MA Experiment 20000182 PARAMETER Experiment Name: At_2mM_SA_P Parameter: Organism Value: A. thaliana
  misc_feature: MA Experiment 20000182 PARAMETER Experiment Name: At_2mM_SA_P Parameter: Plant Line Value: WS
  misc_feature: MA Experiment 20000182 PARAMETER Experiment Name: At_2mM_SA_P Parameter: Timepoint (hr) Value: 6
  misc_feature: MA Experiment 20000182 PARAMETER Experiment Name: At_2mM_SA_P Parameter: Tissue Value: Aerial
  misc_feature: MA Experiment 20000182 PARAMETER Experiment Name: At_2mM_SA_P Parameter: Treatment Value: 2mM SA vs. No Treatment
  misc_feature: MA Experiment ID: 20000185 Result: Up-regulated in Transcription
  misc_feature: MA Experiment 20000185 PARAMETER Experiment Name: At_Roots__P Parameter: Age (day) Value: 7 vs. 21
  misc_feature: MA Experiment 20000185 PARAMETER Experiment Name: At_Roots__P Parameter: Organism Value: A. thaliana
  misc_feature: MA Experiment 20000185 PARAMETER Experiment Name: At_Roots__P Parameter: Tissue Value: Roots vs. Whole Plant
  misc_feature: MA Experiment ID: 20000224 Result: Down-regulated in Transcription
  misc_feature: MA Experiment ID: 20000234 Result: Down-regulated in Transcription
  misc_feature: MA Experiment 20000234 PARAMETER Experiment Name: At_Siliques_P Parameter: Age (day) Value: 21
  misc_feature: MA Experiment 20000234 PARAMETER Experiment Name: At_Siliques_P Parameter: Organism Value: A. thaliana
  misc_feature: MA Experiment 20000234 PARAMETER Experiment Name: At_Siliques_P Parameter: Plant Line Value: WS
  misc_feature: MA Experiment 20000234 PARAMETER Experiment Name: At_Siliques_P Parameter: Tissue Value: Less Than 5mm Siliques vs. Whole Plant
  misc_feature: MA Experiment ID: 20000235 Result: Down-regulated in Transcription
  misc_feature: MA Experiment 20000235 PARAMETER Experiment Name: At_Siliques_P Parameter: Age (day) Value: 21
  misc_feature: MA Experiment 20000235 PARAMETER Experiment Name: At_Siliques_P Parameter: Organism Value: A. thaliana
  misc_feature: MA Experiment 20000235 PARAMETER Experiment Name: At_Siliques_P Parameter: Plant Line Value: WS
  misc_feature: MA Experiment 20000235 PARAMETER Experiment Name: At_Siliques_P Parameter: Tissue Value: 5-10mm Siliques vs. Whole Plant
  misc_feature: MA Experiment ID: 20000264 Result: Down-regulated in Transcription
  misc_feature: MA Experiment 20000264 PARAMETER Experiment Name: At_Open_Flower_P Parameter: Age (day) Value: 21
  misc_feature: MA Experiment 20000264 PARAMETER Experiment Name: At_Open_Flower_P Parameter: Plant Line Value: WS
  misc_feature: MA Experiment 20000264 PARAMETER Experiment Name: At_Open_Flower_P Parameter: Tissue Value: Open Flower vs. Whole Plant
  misc_feature: MA Experiment ID: 20000265 Result: Down-regulated in Transcription
  misc_feature: MA Experiment 20000265 PARAMETER Experiment Name: At_Open_Flower_P Parameter: Age (day) Value: 21
  misc_feature: MA Experiment 20000265 PARAMETER Experiment Name: At_Open_Flower_P Parameter: Plant Line Value: WS
  misc_feature: MA Experiment 20000265 PARAMETER Experiment Name: At_Open_Flower_P Parameter: Tissue Value: Closed Flower vs. Whole Plant
  misc_feature: MA Experiment ID: 20000269 Result: Down-regulated in Transcription
  misc_feature: MA Experiment 20000269 PARAMETER Experiment Name: At_1mM_KNO3_L-vs-H_Roots_P Parameter: Age (day) Value: 7,10,12
  misc_feature: MA Experiment 20000269 PARAMETER Experiment Name: At_1mM_KNO3_L-vs-H_Roots_P Parameter: Organism Value: A. thaliana
  misc_feature: MA Experiment 20000269 PARAMETER Experiment Name: At_1mM_KNO3_L-vs-H_Roots_P Parameter: Plant Line Value: WS
  misc_feature: MA Experiment 20000269 PARAMETER Experiment Name: At_1mM_KNO3_L-vs-H_Roots_P Parameter: Timepoint (day) Value: 7,10,12
  misc_feature: MA Experiment 20000269 PARAMETER Experiment Name: At_1mM_KNO3_L-vs-H_Roots_P Parameter: Tissue Value: Roots
  misc_feature: MA Experiment 20000269 PARAMETER Experiment Name: At_1mM_KNO3_L-vs-H_Roots_P Parameter: Treatment Value: 1mM KNO3 vs. 50mM KNO3
  misc_feature: MA Experiment ID: 20000286 Result: Down-regulated in Transcription
  misc_feature: MA Experiment 20000286 PARAMETER Experiment Name: At_Open_Flower_P Parameter: Age (day) Value: 21
  misc_feature: MA Experiment 20000286 PARAMETER Experiment Name: At_Open_Flower_P Parameter: Plant Line Value: WS
  misc_feature: MA Experiment 20000286 PARAMETER Experiment Name: At_Open_Flower_P Parameter: Tissue Value: Half Open vs. Whole Plant
  misc_feature: MA Experiment ID: 20000308 Result: Down-regulated in Transcription
  misc_feature: MA Experiment 20000308 PARAMETER Experiment Name: At_100mM_NaCl__P Parameter: Age (day) Value: 17
  misc_feature: MA Experiment 20000308 PARAMETER Experiment Name: At_100mM_NaCl__P Parameter: Organism Value: A. thaliana
  misc_feature: MA Experiment 20000308 PARAMETER Experiment Name: At_100mM_NaCl__P Parameter: Plant Line Value: WS
  misc_feature: MA Experiment 20000308 PARAMETER Experiment Name: At_100mM_NaCl__P Parameter: Timepoint (hr) Value: 72
  misc_feature: MA Experiment 20000308 PARAMETER Experiment Name: At_100mM_NaCl__P Parameter: Tissue Value: Whole Plant
  misc_feature: MA Experiment 20000308 PARAMETER Experiment Name: At_100mM_NaCl__P Parameter: Treatment Value: 100mM NaCl vs. No Treatment
  misc_feature: MA Experiment ID: 20000438 Result: Up-regulated in Transcription
  misc_feature: MA Experiment 20000438 PARAMETER Experiment Name: At_Shoots__P Parameter: Age (day) Value: 14
  misc_feature: MA Experiment 20000438 PARAMETER Experiment Name: At_Shoots__P Parameter: Tissue Value: Shoots vs. Whole Plant
  misc_feature: MA Experiment ID: 20000439 Result: Up-regulated in Transcription
  misc_feature: MA Experiment 20000439 PARAMETER Experiment Name: At_Roots__P Parameter: Age (day) Value: 14 vs. 21
  misc_feature: MA Experiment 20000439 PARAMETER Experiment Name: At_Roots__P Parameter: Organism Value: A. thaliana
  misc_feature: MA Experiment 20000439 PARAMETER Experiment Name: At_Roots__P Parameter: Tissue Value: Roots vs. Whole Plant
  misc_feature: MA Experiment ID: 20000451 Result: Down-regulated in Transcription
  misc_feature: MA Experiment 20000451 PARAMETER Experiment Name: At_CS6879_Shoots-Roots_P Parameter: Age (day) Value: 14
  misc_feature: MA Experiment 20000451 PARAMETER Experiment Name: At_CS6879_Shoots-Roots_P Parameter: Organism Value: A. thaliana
  misc_feature: MA Experiment 20000451 PARAMETER Experiment Name: At_CS6879_Shoots-Roots_P Parameter: Plant Line Value: CS6879 vs. WS
  misc_feature: MA Experiment 20000451 PARAMETER Experiment Name: At_CS6879_Shoots-Roots_P Parameter: Tissue Value: Roots
  misc_feature: MA Experiment ID: 20000452 Result: Down-regulated in Transcription
  misc_feature: MA Experiment 20000452 PARAMETER Experiment Name: At_CS6879_Shoots-Roots_P Parameter: Age (day) Value: 14
  misc_feature: MA Experiment 20000452 PARAMETER Experiment Name: At_CS6879_Shoots-Roots_P Parameter: Organism Value: A. thaliana
  misc_feature: MA Experiment 20000452 PARAMETER Experiment Name: At_CS6879_Shoots-Roots_P Parameter: Plant Line Value: CS6879 vs. WS
  misc_feature: MA Experiment 20000452 PARAMETER Experiment Name: At_CS6879_Shoots-Roots_P Parameter: Tissue Value: Shoots
  misc_feature: MA Experiment ID: 20000576 Result: Up-regulated in Transcription
  misc_feature: MA Experiment 20000576 PARAMETER Experiment Name: At_100uM_ABA_Mutants__P Parameter: Organism Value: A. thaliana
  misc_feature: MA Experiment 20000576 PARAMETER Experiment Name: At_100uM_ABA_Mutants__P Parameter: Plant Line Value: CS23
  misc_feature: MA Experiment 20000576 PARAMETER Experiment Name: At_100uM_ABA_Mutants__P Parameter: Timepoint (hr) Value: 6
  misc_feature: MA Experiment 20000576 PARAMETER Experiment Name: At_100uM_ABA_Mutants__P Parameter: Tissue Value: Whole Plant
  misc_feature: MA Experiment 20000576 PARAMETER Experiment Name: At_100uM_ABA_Mutants__P Parameter: Treatment Value: 1uM ABA vs. No Treatment
  misc_feature: MA Experiment ID: 20000794 Result: Down-regulated in Transcription
  misc_feature: MA Experiment 20000794 PARAMETER Experiment Name: At_Petals_P Parameter: Age (day) Value: 23-25 days
  misc_feature: MA Experiment 20000794 PARAMETER Experiment Name: At_Petals_P Parameter: Plant Line Value: WS
  misc_feature: MA Experiment 20000794 PARAMETER Experiment Name: At_Petals_P Parameter: Tissue Value: Petals vs. Whole plant
  misc_feature: MA Experiment ID: 20001555 Result: Down-regulated in Transcription
  misc_feature: MA Experiment 20001555 PARAMETER Experiment Name: At_Drought_Soil_Dry_P Parameter: Age (day) Value: 24
  misc_feature: MA Experiment 20001555 PARAMETER Experiment Name: At_Drought_Soil_Dry_P Parameter: Organism Value: A. thaliana
  misc_feature: MA Experiment 20001555 PARAMETER Experiment Name: At_Drought_Soil_Dry_P Parameter: Plant Line Value: WS
  misc_feature: MA Experiment 20001555 PARAMETER Experiment Name: At_Drought_Soil_Dry_P Parameter: Post Timepoint (hr) Value: None
  misc_feature: MA Experiment 20001555 PARAMETER Experiment Name: At_Drought_Soil_Dry_P Parameter: Post-Treatment Value: None
  misc_feature: MA Experiment 20001555 PARAMETER Experiment Name: At_Drought_Soil_Dry_P Parameter: Timepoint (day) Value: 10
  misc_feature: MA Experiment 20001555 PARAMETER Experiment Name: At_Drought_Soil_Dry_P Parameter: Treatment Value: Drought vs. No Drought
  misc_feature: MA Experiment ID: 20001556 Result: Down-regulated in Transcription
  misc_feature: MA Experiment 20001556 PARAMETER Experiment Name: At_Drought_Soil_Dry_P Parameter: Age (day) Value: 26
  misc_feature: MA Experiment 20001556 PARAMETER Experiment Name: At_Drought_Soil_Dry_P Parameter: Organism Value: A. thaliana
  misc_feature: MA Experiment 20001556 PARAMETER Experiment Name: At_Drought_Soil_Dry_P Parameter: Plant Line Value: WS
  misc_feature: MA Experiment 20001556 PARAMETER Experiment Name: At_Drought_Soil_Dry_P Parameter: Post Timepoint (hr) Value: None
  misc_feature: MA Experiment 20001556 PARAMETER Experiment Name: At_Drought_Soil_Dry_P Parameter: Post-Treatment Value: None
  misc_feature: MA Experiment 20001556 PARAMETER Experiment Name: At_Drought_Soil_Dry_P Parameter: Timepoint (day) Value: 12
  misc_feature: MA Experiment 20001556 PARAMETER Experiment Name: At_Drought_Soil_Dry_P Parameter: Treatment Value: Drought vs. No Drought
  misc_feature: MA Experiment ID: 20001558 Result: Down-regulated in Transcription
  misc_feature: MA Experiment 20001558 PARAMETER Experiment Name: At_Drought_Soil_Dry_P Parameter: Age (day) Value: 27
  misc_feature: MA Experiment 20001558 PARAMETER Experiment Name: At_Drought_Soil_Dry_P Parameter: Organism Value: A. thaliana
  misc_feature: MA Experiment 20001558 PARAMETER Experiment Name: At_Drought_Soil_Dry_P Parameter: Plant Line Value: WS
  misc_feature: MA Experiment 20001558 PARAMETER Experiment Name: At_Drought_Soil_Dry_P Parameter: Post Timepoint (hr) Value: 6
  misc_feature: MA Experiment 20001558 PARAMETER Experiment Name: At_Drought_Soil_Dry_P Parameter: Post-Treatment Value: Re-Water vs. No Drought
  misc_feature: MA Experiment 20001558 PARAMETER Experiment Name: At_Drought_Soil_Dry_P Parameter: Timepoint (day) Value: 13
  misc_feature: MA Experiment 20001558 PARAMETER Experiment Name: At_Drought_Soil_Dry_P Parameter: Treatment Value: Drought vs. No Drought
  misc_feature: MA Experiment ID: 20001559 Result: Down-regulated in Transcription
  misc_feature: MA Experiment 20001559 PARAMETER Experiment Name: At_Drought_Soil_Dry_P Parameter: Age (day) Value: 28
  misc_feature: MA Experiment 20001559 PARAMETER Experiment Name: At_Drought_Soil_Dry_P Parameter: Organism Value: A. thaliana
  misc_feature: MA Experiment 20001559 PARAMETER Experiment Name: At_Drought_Soil_Dry_P Parameter: Plant Line Value: WS
  misc_feature: MA Experiment 20001559 PARAMETER Experiment Name: At_Drought_Soil_Dry_P Parameter: Post Timepoint (hr) Value: 29
  misc_feature: MA Experiment 20001559 PARAMETER Experiment Name: At_Drought_Soil_Dry_P Parameter: Post-Treatment Value: Re-Water vs. No Drought
  misc_feature: MA Experiment 20001559 PARAMETER Experiment Name: At_Drought_Soil_Dry_P Parameter: Timepoint (day) Value: 14
  misc_feature: MA Experiment 20001559 PARAMETER Experiment Name: At_Drought_Soil_Dry_P Parameter: Treatment Value: Drought vs. No Drought
  misc_feature: MA Experiment ID: 20001560 Result: Down-regulated in Transcription
  misc_feature: MA Experiment 20001560 PARAMETER Experiment Name: At_Drought_Soil_Dry_P Parameter: Age (day) Value: 28
  misc_feature: MA Experiment 20001560 PARAMETER Experiment Name: At_Drought_Soil_Dry_P Parameter: Organism Value: A. thaliana
  misc_feature: MA Experiment 20001560 PARAMETER Experiment Name: At_Drought_Soil_Dry_P Parameter: Plant Line Value: WS
  misc_feature: MA Experiment 20001560 PARAMETER Experiment Name: At_Drought_Soil_Dry_P Parameter: Post Timepoint (hr) Value: None
  misc_feature: MA Experiment 20001560 PARAMETER Experiment Name: At_Drought_Soil_Dry_P Parameter: Post-Treatment Value: None
  misc_feature: MA Experiment 20001560 PARAMETER Experiment Name: At_Drought_Soil_Dry_P Parameter: Timepoint (day) Value: 14
  misc_feature: MA Experiment 20001560 PARAMETER Experiment Name: At_Drought_Soil_Dry_P Parameter: Treatment Value: Drought vs. No Drought
acacaaatagaaataacttgtaatcaaccaaagtcgaaaaacagagttattttgtcggatcaatggtgaagattgagataggaagtgtgggtgactcctttagtgtagcatctcttaaggcttacttgtctgaatttatcgcaactcttctctttgtgtttgctggcgttggctctgctcttgcttttgccaagctcacatccgatgcagccttggaccccgctggtcttgtcgctgtcgctgtggctcacgcctttgcccttttcgttggtgtttccatagccgccaacatctccggcggacaccttaaccccgccgtgacactcggtctcgccgtcggtggcaacatcacagtaataaccggtttcttttactggattgctcaatgccttggctccatcgtcgcgtgtctcctcctcgtcttcgttaccaatggcgagagcgtaccgactcatggagtagcggccggtttaggagctattgaaggagtagtgatggagattgtggtgacctttgctctggtctacacagtctacgccacagcggctgatccaaagaaaggttcactcgggaccattgctccaattgctatcggtttcatcgttggtgccaacatcctcgcagcgggtccctttagcggtggttccatgaacccggccaggtcatttggaccagctgttgtcagtggtgacttctctcagatatggatctactgggtgggtccactagtcggtggtgcacttgctggactcatctacggagacgtcttcatcggatcctacgctccagctcccaccacagaaagctacccttgatcaatcctatagcgttttaatttgcttggcttgctttttgttgtatgaaaatgtttggtcctcgtttcttccaaaaatgaatgattgaatgtggagaaaaagatcaaagttgtactttgtgttggttataaataagaattgtatattttcaaatttt

SEQ ID NO: 38676 - protein, 250 aa, Arabidopsis thaliana
  peptide (1)..(250): Ceres Seq. ID no. 12422443
  misc_feature (7)..(233): Homolog of NCBI NO: 1076687 NR Description: integral membrane protein - garden snapdragon
  misc_feature (1)..(249): Homolog of NCBI NO: 7441272 NR Description: aquaporin TIP7 - common sunflower
  misc_feature (1)..(242): Homolog of NCBI NO: 7441268 NR Description: probable membrane protein - carrot
  misc_feature (1)..(249): Homolog of NCBI NO: 2058706 NR Description: Rb7 [Lycopersicon esculentum]
  misc_feature (1)..(249): Homolog of NCBI NO: 11276918 NR Description: membrane channel protein [imported] - potato
  misc_feature (1)..(249): Homolog of NCBI NO: 267135 NR Description: TONOPLAST INTRINSIC PROTEIN, ROOT-SPECIFIC
  misc_feature (1)..(249): Homolog of NCBI NO: 126959 NR Description: Tonoplast intrinsic protein, root-specific RB7-5A
  misc_feature (1)..(249): Homolog of NCBI NO: 461929 NR Description: PROBABLE TONOPLAST INTRINSIC PROTEIN DIP
  misc_feature (1)..(247): Homolog of NCBI NO: 15238100 NR Description: membrane channel protein-like
  misc_feature (1)..(250): Homolog of NCBI NO: 15236043 NR Description: membrane channel like protein
MVKIEIGSVGDSFSVASLKAYLSEFIATLLFVFAGVGSALAFAKLTSDAALDPAGLVAVAVAHAFALFVGVSIAANISGGHLNPAVTLGLAVGGNITVITGFFYWIAQCLGSIVACLLLVFVTNGESVPTHGVAAGLGAIEGVVMEIVVTFALVYTVYATAADPKKGSLGTIAPIAIGFIVGANILAAGPFSGGSMNPARSFGPAVVSGDFSQIWIYWVGPLVGGALAGLIYGDVFIGSYAPAPTTESYP

SEQ ID NO: 38677 - DNA, 864 bp, Arabidopsis thaliana
  misc_feature (1)..(864): Ceres Seq. ID no. 12385261
  misc_feature: MA Experiment ID: 20000171 Result: Up-regulated in Transcription
  misc_feature: MA Experiment 20000171 PARAMETER Experiment Name: At_42deg_Heat_P Parameter: Age (day) Value: 14
  misc_feature: MA Experiment 20000171 PARAMETER Experiment Name: At_42deg_Heat_P Parameter: Organism Value: A. thaliana
  misc_feature: MA Experiment 20000171 PARAMETER Experiment Name: At_42deg_Heat_P Parameter: Plant Line Value: WS
  misc_feature: MA Experiment 20000171 PARAMETER Experiment Name: At_42deg_Heat_P Parameter: Temperature (deg C) Value: 42 vs. 22
  misc_feature: MA Experiment 20000171 PARAMETER Experiment Name: At_42deg_Heat_P Parameter: Timepoint (hr) Value: 1
  misc_feature: MA Experiment 20000171 PARAMETER Experiment Name: At_42deg_Heat_P Parameter: Tissue Value: Aerial
  misc_feature: MA Experiment ID: 20000173 Result: Up-regulated in Transcription
  misc_feature: MA Experiment 20000173 PARAMETER Experiment Name: At_42deg_Heat_P Parameter: Age (day) Value: 14
  misc_feature: MA Experiment 20000173 PARAMETER Experiment Name: At_42deg_Heat_P Parameter: Organism Value: A. thaliana
  misc_feature: MA Experiment 20000173 PARAMETER Experiment Name: At_42deg_Heat_P Parameter: Plant Line Value: WS
  misc_feature: MA Experiment 20000173 PARAMETER Experiment Name: At_42deg_Heat_P Parameter: Temperature (deg C) Value: 42 vs. 22
  misc_feature: MA Experiment 20000173 PARAMETER Experiment Name: At_42deg_Heat_P Parameter: Timepoint (hr) Value: 6
  misc_feature: MA Experiment 20000173 PARAMETER Experiment Name: At_42deg_Heat_P Parameter: Tissue Value: Aerial
  misc_feature: MA Experiment ID: 20000234 Result: Up-regulated in Transcription
  misc_feature: MA Experiment 20000234 PARAMETER Experiment Name: At_Siliques_P Parameter: Age (day) Value: 21
  misc_feature: MA Experiment 20000234 PARAMETER Experiment Name: At_Siliques_P Parameter: Organism Value: A. thaliana
  misc_feature: MA Experiment 20000234 PARAMETER Experiment Name: At_Siliques_P Parameter: Plant Line Value: WS
  misc_feature: MA Experiment 20000234 PARAMETER Experiment Name: At_Siliques_P Parameter: Tissue Value: Less Than 5mm Siliques vs. Whole Plant
aaattagttcgtcgaagcatcgagaaaatgatcgtactttctgttggttccgcttcttcatctccgatcgtcgtcgtcttttccgtcgctcttcttctgttctacttctctgaaacttctctaggagctccttgtcacatcaatggcttgccaatcgtgaggaatattagtgaccttcctcaggataactatggaagaccaggtctttcccacatgactgttgctggctccgtattgcatggaatgaaagaggttgaaatatggcttcagacatttgctccaggttcagagacaccaattcacaggcactcctgtgaagaggtttttgttgtcctaaagggcagtggtactctgtatctcgctgaaacacatggaaatttccctgggaaaccaatcgaatttccaatctttgccaacagtacaattcatattccgatcaatgatgctcatcaggtcaaaaacaccggtcatgaggacctgcaggtgttggttatcatatctcggccgcctattaaaatcttcatctacgaagactggtttatgccacacactgctgcaaggctgaagttcccttactattgggatgagcaatgcattcaagaatcacaaaaagacgagctttaaagcaaagtccgaggctaaaagcaagcacaacctttagatagtaaaatcatagttgaggttttgtgacactacgtagatactggtaaattggcaaggattttacatgaatgttgttgttaccagaaagtaaataaatgttcaatctttgatgttcttaagtaagtgagtcctattggtcatgaaaatatgtaagtgtgcacatcttgattgcatttgcgataaatttatagagtttcactc

SEQ ID NO: 38678 - protein, 207 aa, Arabidopsis thaliana
  peptide (1)..(207): Ceres Seq. ID no. 12385262
  misc_feature (42)..(207): Pfam Name: Auxin binding protein Pfam Description: Auxin binding protein
  misc_feature (25)..(207): Homolog of NCBI NO: 461449 NR Description: AUXIN-BINDING PROTEIN T85 PRECURSOR (ABP)
  misc_feature (21)..(207): Homolog of NCBI NO: 1843533 NR Description: auxin binding protein [Malus x domestica]
  misc_feature (10)..(207): Homolog of NCBI NO: 7442015 NR Description: auxin-binding protein precursor - radish
  misc_feature (10)..(207): Homolog of NCBI NO: 22122224 NR Description: susceptible endoplasmic reticulum auxin-binding
  misc_feature (10)..(207): Homolog of NCBI NO: 22122216 NR Description: resistant endoplasmic reticulum auxin-binding
  misc_feature (10)..(207): Homolog of NCBI NO: 22122220 NR Description: susceptible endoplasmic reticulum auxin-binding
  misc_feature (10)..(207): Homolog of NCBI NO: 22122222 NR Description: susceptible endoplasmic reticulum auxin-binding
  misc_feature (10)..(207): Homolog of NCBI NO: 22122218 NR Description: resistant endoplasmic reticulum auxin-binding
  misc_feature (10)..(207): Homolog of NCBI NO: 21592915 NR Description: auxin-binding protein 1 precursor [Arabidopsis
  misc_feature (10)..(207): Homolog of NCBI NO: 15236229 NR Description: auxin-binding protein 1 precursor
KLVRRSIEKMIVLSVGSASSSPIVVVFSVALLLFYFSETSLGAPCHINGLPIVRNISDLPQDNYGRPGLSHMTVAGSVLHGMKEVEIWLQTFAPGSETPIHRHSCEEVFVVLKGSGTLYLAETHGNFPGKPIEFPIFANSTIHIPINDAHQVKNTGHEDLQVLVIISRPPIKIFIYEDWFMPHTAARLKFPYYWDEQCIQESQKDEL

SEQ ID NO: 38679 - protein, 198 aa, Arabidopsis thaliana
  peptide (1)..(198): Ceres Seq. ID no. 12385263
  misc_feature (33)..(198): Pfam Name: Auxin binding protein Pfam Description: Auxin binding protein
  misc_feature (16)..(198): Homolog of NCBI NO: 461449 NR Description: AUXIN-BINDING PROTEIN T85 PRECURSOR (ABP)
  misc_feature (12)..(198): Homolog of NCBI NO: 1843533 NR Description: auxin binding protein [Malus x domestica]
  misc_feature (1)..(198): Homolog of NCBI NO: 7442015 NR Description: auxin-binding protein precursor - radish
  misc_feature (1)..(198): Homolog of NCBI NO: 22122224 NR Description: susceptible endoplasmic reticulum auxin-binding
  misc_feature (1)..(198): Homolog of NCBI NO: 22122216 NR Description: resistant endoplasmic reticulum auxin-binding
  misc_feature (1)..(198): Homolog of NCBI NO: 22122220 NR Description: susceptible endoplasmic reticulum auxin-binding
  misc_feature (1)..(198): Homolog of NCBI NO: 22122222 NR Description: susceptible endoplasmic reticulum auxin-binding
  misc_feature (1)..(198): Homolog of NCBI NO: 22122218 NR Description: resistant endoplasmic reticulum auxin-binding
  misc_feature (1)..(198): Homolog of NCBI NO: 21592915 NR Description: auxin-binding protein 1 precursor [Arabidopsis
  misc_feature (1)..(198): Homolog of NCBI NO: 15236229 NR Description: auxin-binding protein 1 precursor
MIVLSVGSASSSPIVVVFSVALLLFYFSETSLGAPCHINGLPIVRNISDLPQDNYGRPGLSHMTVAGSVLHGMKEVEIWLQTFAPGSETPIHRHSCEEVFVVLKGSGTLYLAETHGNFPGKPIEFPIFANSTIHIPINDAHQVKNTGHEDLQVLVIISRPPIKIFIYEDWFMPHTAARLKFPYYWDEQCIQESQKDEL

SEQ ID NO: 38680 - protein, 136 aa, Arabidopsis thaliana; identical to SEQ ID NO: 22652
  peptide (1)..(136): Ceres Seq. ID no. 12385264
  misc_feature (1)..(136): Pfam Name: Auxin binding protein Pfam Description: Auxin binding protein
  misc_feature (1)..(136): Homolog of NCBI NO: 461449 NR Description: AUXIN-BINDING PROTEIN T85 PRECURSOR (ABP)
  misc_feature (1)..(136): Homolog of NCBI NO: 1843533 NR Description: auxin binding protein [Malus x domestica]
  misc_feature (1)..(136): Homolog of NCBI NO: 7442015 NR Description: auxin-binding protein precursor - radish
  misc_feature (1)..(136): Homolog of NCBI NO: 22122224 NR Description: susceptible endoplasmic reticulum auxin-binding
  misc_feature (1)..(136): Homolog of NCBI NO: 22122216 NR Description: resistant endoplasmic reticulum auxin-binding
  misc_feature (1)..(136): Homolog of NCBI NO: 22122220 NR Description: susceptible endoplasmic reticulum auxin-binding
  misc_feature (1)..(136): Homolog of NCBI NO: 22122222 NR Description: susceptible endoplasmic reticulum auxin-binding
  misc_feature (1)..(136): Homolog of NCBI NO: 22122218 NR Description: resistant endoplasmic reticulum auxin-binding
  misc_feature (1)..(136): Homolog of NCBI NO: 21592915 NR Description: auxin-binding protein 1 precursor [Arabidopsis
  misc_feature (1)..(136): Homolog of NCBI NO: 15236229 NR Description: auxin-binding protein 1 precursor

SEQ ID NO: 38681 - DNA, 3238 bp, Arabidopsis thaliana
  misc_feature (1)..(3238): Ceres Seq. ID no. 12328934
  misc_feature: MA Experiment ID: 20000173 Result: Down-regulated in Transcription
  misc_feature: MA Experiment 20000173 PARAMETER Experiment Name: At_42deg_Heat_P Parameter: Age (day) Value: 14
  misc_feature: MA Experiment 20000173 PARAMETER Experiment Name: At_42deg_Heat_P Parameter: Organism Value: A. thaliana
  misc_feature: MA Experiment 20000173 PARAMETER Experiment Name: At_42deg_Heat_P Parameter: Plant Line Value: WS
  misc_feature: MA Experiment 20000173 PARAMETER Experiment Name: At_42deg_Heat_P Parameter: Temperature (deg C) Value: 42 vs. 22
  misc_feature: MA Experiment 20000173 PARAMETER Experiment Name: At_42deg_Heat_P Parameter: Timepoint (hr) Value: 6
  misc_feature: MA Experiment 20000173 PARAMETER Experiment Name: At_42deg_Heat_P Parameter: Tissue Value: Aerial
  misc_feature: MA Experiment ID: 20000184 Result: Down-regulated in Transcription
  misc_feature: MA Experiment 20000184 PARAMETER Experiment Name: At_Shoots__P Parameter: Age (day) Value: 7
  misc_feature: MA Experiment 20000184 PARAMETER Experiment Name: At_Shoots__P Parameter: Tissue Value: Shoots vs. Whole Plant
  misc_feature: MA Experiment ID: 20000234 Result: Down-regulated in Transcription
  misc_feature: MA Experiment 20000234 PARAMETER Experiment Name: At_Siliques_P Parameter: Age (day) Value: 21
  misc_feature: MA Experiment 20000234 PARAMETER Experiment Name: At_Siliques_P Parameter: Organism Value: A. thaliana
  misc_feature: MA Experiment 20000234 PARAMETER Experiment Name: At_Siliques_P Parameter: Plant Line Value: WS
  misc_feature: MA Experiment 20000234 PARAMETER Experiment Name: At_Siliques_P Parameter: Tissue Value: Less Than 5mm Siliques vs. Whole Plant
  misc_feature: MA Experiment ID: 20001560 Result: Down-regulated in Transcription
  misc_feature: MA Experiment 20001560 PARAMETER Experiment Name: At_Drought_Soil_Dry_P Parameter: Age (day) Value: 28
  misc_feature: MA Experiment 20001560 PARAMETER Experiment Name: At_Drought_Soil_Dry_P Parameter: Organism Value: A. thaliana
  misc_feature: MA Experiment 20001560 PARAMETER Experiment Name: At_Drought_Soil_Dry_P Parameter: Plant Line Value: WS
  misc_feature: MA Experiment 20001560 PARAMETER Experiment Name: At_Drought_Soil_Dry_P Parameter: Post Timepoint (hr) Value: None
  misc_feature: MA Experiment 20001560 PARAMETER Experiment Name: At_Drought_Soil_Dry_P Parameter: Post-Treatment Value: None
  misc_feature: MA Experiment 20001560 PARAMETER Experiment Name: At_Drought_Soil_Dry_P Parameter: Timepoint (day) Value: 14
  misc_feature: MA Experiment 20001560 PARAMETER Experiment Name: At_Drought_Soil_Dry_P Parameter: Treatment Value: Drought vs. No Drought
aaaacagaggaagtgataagaggttctttttgggtttgaagatgagttcaagaactggagcctctttgctcctgatcttgtttttcttccaaatttgttctgtttcggcactcacgaatggtttagacgcttctgctttaaatgctctgaagagtgaatggaccactcctcctgatggttgggaaggctctgatccttgtggaaccaattgggttggaattacatgtcaaaatgaccgcgtcgtttcaatatcactaggtaaccttgacttggaaggaaagcttcctgccgatatatcgttcttgtccgagttgcggatcttggatttgtcatacaatcctaaattgtccggaccgcttccaccaaacatcggtaaccttgggaagttaaggaacttgatccttgtgggatgtagtttcagtggtcaaatccctgagtccattggaactctaaaagaacttatatatctctccctaaatttaaataaatttagtggaacaattccgccttcaattggcctgttatcaaaactatattggtttgatatagctgacaatcagattgaaggagagcttccagtttctaatgggacttctgcacctggacttgacatgcttcttcaaactaagcattttcattttggaaaaaacaagctttcaggcaatatcccaaaagaacttttcagctcaaacatgagtttaatacatgtcctcttcgatggaaaccaattcacgggcgaaattccagagaccctcagtctcgttaaaacgttgacggtgttacgccttgataggaacaaactcattggagatattccttcatatcttaacaatctcacaaatcttaacgaactgtacttggccaacaacagatttactggtactcttccaaatttaaccagcttgaccagtctctacacattggatgtgagcaataacactttggatttctcacccattccatcatggatctcttcattaccctccctatcaacattaaggatggaagggatccaacttaatggtccaataccaatctcatttttcagccctcctcagttgcagactgttatcttaaagcgaaatagtatagtggaaagcttagactttggtacagacgttagcagccagttggagtttgtggatttacaatacaatgaaataactgattataaaccatcagctaataaagtcctccaagtaatattggcaaataatccagtgtgtctagaggcgggaaacgggccgagttactgttcagcaatccaacacaatacctcattttctacactcccaacaaactgttctccatgcgaaccgggcatggaagcgagtcccacgtgccgctgtgcgtatccattcatgggaacactctacttccggtctccttctttctcagggttgttcaactccaccaacttctcaattctacagaaggcaatcgcggatttctttaagaagttcaattatcctgtagactccgttggtgttcggaacataagagagaatccaactgatcatcagcttctaatagatctattggtctttccattgggaagagagagttttaatcagacaggaatgtcacttgttggttttgcatttagcaaccagacttataagcctcctccgatatttggcccttatattttcaaagctgatttgtacaaacagttctctggtatgatgaacccttgtcacacacacaatcaaactagaactaaaggttgttattgataactcatttgctctgcctttctttttgtcacagatgtagaagtttcatcaaagtcatcaaacaaaagcattctcattggagcagtagttggtgttgttgttcttctactattgttaacaatagctgggatttacgctcttaggcagaagaagagagctgaaagagcaactggtcaaaataatccttttgctaaatgggatacaagtaagagtagtattgatgctccgcagctaatgggagcaaaagcgtttacttttgaggagctgaagaaatgcactgacaacttttcagaggcaaatgatgttggcggtggaggttacggcaaggtttatagagggattcttcctaatgggcaactcatagcaatcaaaagggctcaacaaggatctttgcaaggagggttggagttcaaaactgagattgagcttctctcaagggtccatcataagaatgttgtcagactcttgggcttctgctttgaccggaatgaacaaatgctcgtatacgagtacatttcaaatgggtcacttaaagacagtctgtccgggaagagtgggattcgattggattggacaagaagacttaaaatagcacttggttcaggcaagggcttggcttatcttcatgaacttgctgatcctccaattatacatagagacatcaaatcaaataacatattacttgatgaaaatctaaccgcaaaggttgccgacttcggtctctccaaacttgtgggagaccctgagaaaactcatgtcacaacacaagtcaaaggaaccatgggctacttggatccagagtactacatgacgaatcaattaacggagaagagcgatgtgtatgggtttggtgtggttttactcgagctattaaccggtagaagtccgatagagagaggcaaatatgtggtgagagaggtgaagacaaagatgaataaatctcggagtttgtatgacctgcaggagttgttggacacaacgatcatagcaagcagtgggaatctaaaagggttcgagaagtatgtagacttggctttgagatgtgtggaggaggaaggagttaataggccatcaatgggtgaggttgtgaaagagattgagaacataatgcagcttgcgggattaaatcctaactcagattcagcaacgagttcaagaacgtatgaggacgcaatcaaaggatctggtgatccttatggcagtgaatcgtttcagtacagtgggaattttccagcttcaaagcttgagccccaatgattgattatgtttctttttgttattttgttatttcgtaagtgacttcatacttgaaatgccttgtgaatgtggagtagcatgattctgtttgatatgtggtcgctgattataaagcagatgaatggagagccaaacgcagaatcaaaaaccaccagatctttggcaatgtcgacaccagtttcaaacataagaaaagtaatcaagctcaatgtatgatgaataattgaatatattaattcttgttg

SEQ ID NO: 38682 - protein, 577 aa, Arabidopsis thaliana
  peptide (1)..(577): Ceres Seq. ID no. 12328935
  misc_feature (45)..(387): Homolog of NCBI NO: 15222211 NR Description: leucine-rich repeat transmembrane protein kinase,
  misc_feature (109)..(548): Homolog of NCBI NO: 30679474 NR Description: leucine-rich repeat transmembrane protein kinase,
  misc_feature (18)..(555): Homolog of NCBI NO: 30699436 NR Description: leucine-rich repeat transmembrane protein kinase,
  misc_feature (78)..(326): Homolog of NCBI NO: 34909240 NR Description: putative receptor protein kinase
  misc_feature (102)..(577): Homolog of NCBI NO: 30699436 NR Description: leucine-rich repeat transmembrane protein kinase,
  misc_feature (205)..(555): Homolog of NCBI NO: 34909240 NR Description: putative receptor protein kinase
  misc_feature (102)..(577): Homolog of NCBI NO: 7715608 NR Description: F20B17.5 [Arabidopsis thaliana]
  misc_feature (133)..(371): Homolog of NCBI NO: 34909240 NR Description: putative receptor protein kinase
  misc_feature (105)..(566): Homolog of NCBI NO: 15240549 NR Description: leucine-rich repeat transmembrane protein kinase,
  misc_feature (6)..(473): Homolog of NCBI NO: 15240549 NR Description: leucine-rich repeat transmembrane protein kinase,
NRGSDKRFFLGLKMSSRTGASLLLILFFFQICSVSALTNGLDASALNALKSEWTTPPDGWEGSDPCGTNWVGITCQNDRVVSISLGNLDLEGKLPADISFLSELRILDLSYNPKLSGPLPPNIGNLGKLRNLILVGCSFSGQIPESIGTLKELIYLSLNLNKFSGTIPPSIGLLSKLYWFDIADNQIEGELPVSNGTSAPGLDMLLQTKHFHFGKNKLSGNIPKELFSSNMSLIHVLFDGNQFTGEIPETLSLVKTLTVLRLDRNKLIGDIPSYLNNLTNLNELYLANNRFTGTLPNLTSLTSLYTLDVSNNTLDFSPIPSWISSLPSLSTLRMEGIQLNGPIPISFFSPPQLQTVILKRNSIVESLDFGTDVSSQLEFVDLQYNEITDYKPSANKVLQVILANNPVCLEAGNGPSYCSAIQHNTSFSTLPTNCSPCEPGMEASPTCRCAYPFMGTLYFRSPSFSGLFNSTNFSILQKAIADFFKKFNYPVDSVGVRNIRENPTDHQLLIDLLVFPLGRESFNQTGMSLVGFAFSNQTYKPPPIFGPYIFKADLYKQFSGMMNPCHTHNQTRTKGCY

SEQ ID NO: 38683 - protein, 564 aa, Arabidopsis thaliana
  peptide (1)..(564): Ceres Seq. ID no. 12328936
  misc_feature (32)..(374): Homolog of NCBI NO: 15222211 NR Description: leucine-rich repeat transmembrane protein kinase,
  misc_feature (96)..(535): Homolog of NCBI NO: 30679474 NR Description: leucine-rich repeat transmembrane protein kinase,
  misc_feature (5)..(542): Homolog of NCBI NO: 30699436 NR Description: leucine-rich repeat transmembrane protein kinase,
  misc_feature (65)..(313): Homolog of NCBI NO: 34909240 NR Description: putative receptor protein kinase
  misc_feature (89)..(564): Homolog of NCBI NO: 30699436 NR Description: leucine-rich repeat transmembrane protein kinase,
  misc_feature (192)..(542): Homolog of NCBI NO: 34909240 NR Description: putative receptor protein kinase
  misc_feature (89)..(564): Homolog of NCBI NO: 7715608 NR Description: F20B17.5 [Arabidopsis thaliana]
  misc_feature (120)..(358): Homolog of NCBI NO: 34909240 NR Description: putative receptor protein kinase
  misc_feature (92)..(553): Homolog of NCBI NO: 15240549 NR Description: leucine-rich repeat transmembrane protein kinase,
  misc_feature (1)..(460): Homolog of NCBI NO: 15240549 NR Description: leucine-rich repeat transmembrane protein kinase,
MSSRTGASLLLILFFFQICSVSALTNGLDASALNALKSEWTTPPDGWEGSDPCGTNWVGITCQNDRVVSISLGNLDLEGKLPADISFLSELRILDLSYNPKLSGPLPPNIGNLGKLRNLILVGCSFSGQIPESIGTLKELIYLSLNLNKFSGTIPPSIGLLSKLYWFDIADNQIEGELPVSNGTSAPGLDMLLQTKHFHFGKNKLSGNIPKELFSSNMSLIHVLFDGNQFTGEIPETLSLVKTLTVLRLDRNKLIGDIPSYLNNLTNLNELYLANNRFTGTLPNLTSLTSLYTLDVSNNTLDFSPIPSWISSLPSLSTLRMEGIQLNGPIPISFFSPPQLQTVILKRNSIVESLDFGTDVSSQLEFVDLQYNEITDYKPSANKVLQVILANNPVCLEAGNGPSYCSAIQHNTSFSTLPTNCSPCEPGMEASPTCRCAYPFMGTLYFRSPSFSGLFNSTNFSILQKAIADFFKKFNYPVDSVGVRNIRENPTDHQLLIDLLVFPLGRESFNQTGMSLVGFAFSNQTYKPPPIFGPYIFKADLYKQFSGMMNPCHTHNQTRTKGCY

SEQ ID NO: 38684 - protein, 374 aa, Arabidopsis thaliana
  peptide (1)..(374): Ceres Seq. ID no. 12328937
  misc_feature (1)..(184): Homolog of NCBI NO: 15222211 NR Description: leucine-rich repeat transmembrane protein kinase,
  misc_feature (1)..(345): Homolog of NCBI NO: 30679474 NR Description: leucine-rich repeat transmembrane protein kinase,
  misc_feature (1)..(352): Homolog of NCBI NO: 30699436 NR Description: leucine-rich repeat transmembrane protein kinase,
  misc_feature (1)..(123): Homolog of NCBI NO: 34909240 NR Description: putative receptor protein kinase
  misc_feature (1)..(374): Homolog of NCBI NO: 30699436 NR Description: leucine-rich repeat transmembrane protein kinase,
  misc_feature (2)..(352): Homolog of NCBI NO: 34909240 NR Description: putative receptor protein kinase
  misc_feature (1)..(374): Homolog of NCBI NO: 7715608 NR Description: F20B17.5 [Arabidopsis thaliana]
  misc_feature (1)..(168): Homolog of NCBI NO: 34909240 NR Description: putative receptor protein kinase
  misc_feature (1)..(363): Homolog of NCBI NO: 15240549 NR Description: leucine-rich repeat transmembrane protein kinase,
  misc_feature (1)..(270): Homolog of NCBI NO: 15240549 NR Description: leucine-rich repeat transmembrane protein kinase,
MLLQTKHFHFGKNKLSGNIPKELFSSNMSLIHVLFDGNQFTGEIPETLSLVKTLTVLRLDRNKLIGDIPSYLNNLTNLNELYLANNRFTGTLPNLTSLTSLYTLDVSNNTLDFSPIPSWISSLPSLSTLRMEGIQLNGPIPISFFSPPQLQTVILKRNSIVESLDFGTDVSSQLEFVDLQYNEITDYKPSANKVLQVILANNPVCLEAGNGPSYCSAIQHNTSFSTLPTNCSPCEPGMEASPTCRCAYPFMGTLYFRSPSFSGLFNSTNFSILQKAIADFFKKFNYPVDSVGVRNIRENPTDHQLLIDLLVFPLGRESFNQTGMSLVGFAFSNQTYKPPPIFGPYIFKADLYKQFSGMMNPCHTHNQTRTKGCY

SEQ ID NO: 38685 - DNA, 1391 bp, Arabidopsis thaliana
  misc_feature (1)..(1391): Ceres Seq. ID no. 12330746
  misc_feature: MA Experiment ID: 108461 Result: Up-regulated in Transcription
  misc_feature: MA Experiment 108461 PARAMETER Experiment Name: At_Germinating_Seeds_cDNA_P Parameter: Age (day) Value: 1 vs. 0
  misc_feature: MA Experiment 108461 PARAMETER Experiment Name: At_Germinating_Seeds_cDNA_P Parameter: Tissue Value: Germinating Seeds
  misc_feature: MA Experiment ID: 108462 Result: Up-regulated in Transcription
  misc_feature: MA Experiment 108462 PARAMETER Experiment Name: At_Germinating_Seeds_cDNA_P Parameter: Age (day) Value: 2 vs. 0
  misc_feature: MA Experiment 108462 PARAMETER Experiment Name: At_Germinating_Seeds_cDNA_P Parameter: Tissue Value: Germinating Seeds
  misc_feature: MA Experiment ID: 108577 Result: Down-regulated in Transcription
  misc_feature: MA Experiment 108577 PARAMETER Experiment Name: At_42deg_Heat_cDNA_P Parameter: Temperature (deg C) Value: 42 vs. 22
  misc_feature: MA Experiment 108577 PARAMETER Experiment Name: At_42deg_Heat_cDNA_P Parameter: Timepoint (hr) Value: 6
  misc_feature: MA Experiment 108577 PARAMETER Experiment Name: At_42deg_Heat_cDNA_P Parameter: Tissue Value: Aerial
  misc_feature: MA Experiment ID: 108585 Result: Down-regulated in Transcription
  misc_feature: MA Experiment 108585 PARAMETER Experiment Name: At_5mM_NaNP_cDNA_P Parameter: Timepoint (hr) Value: 6
  misc_feature: MA Experiment 108585 PARAMETER Experiment Name: At_5mM_NaNP_cDNA_P Parameter: Tissue Value: Aerial
  misc_feature: MA Experiment 108585 PARAMETER Experiment Name: At_5mM_NaNP_cDNA_P Parameter: Treatment Value: null
  misc_feature: MA Experiment ID: 20000111 Result: Down-regulated in Transcription
  misc_feature: MA Experiment 20000111 PARAMETER Experiment Name: At_42deg_Heat_cDNA_P Parameter: Temperature (deg C) Value: 42 vs. 22
  misc_feature: MA Experiment 20000111 PARAMETER Experiment Name: At_42deg_Heat_cDNA_P Parameter: Timepoint (hr) Value: 6
  misc_feature: MA Experiment 20000111 PARAMETER Experiment Name: At_42deg_Heat_cDNA_P Parameter: Tissue Value: Aerial
  misc_feature: MA Experiment ID: 20000113 Result: Down-regulated in Transcription
  misc_feature: MA Experiment 20000113 PARAMETER Experiment Name: At_42deg_Heat_cDNA_P Parameter: Temperature (deg C) Value: 42 vs. 22
  misc_feature: MA Experiment 20000113 PARAMETER Experiment Name: At_42deg_Heat_cDNA_P Parameter: Timepoint (hr) Value: 8
  misc_feature: MA Experiment 20000113 PARAMETER Experiment Name: At_42deg_Heat_cDNA_P Parameter: Tissue Value: Aerial
  misc_feature: MA Experiment ID: 20000307 Result: Up-regulated in Transcription
  misc_feature: MA Experiment 20000307 PARAMETER Experiment Name: At_Germinating_Seeds_Sub_P Parameter: Age (hr) Value: 24 vs. 0
  misc_feature: MA Experiment 20000307 PARAMETER Experiment Name: At_Germinating_Seeds_Sub_P Parameter: Organism Value: A. thaliana
  misc_feature: MA Experiment 20000307 PARAMETER Experiment Name: At_Germinating_Seeds_Sub_P Parameter: Plant Line Value: WS
  misc_feature: MA Experiment 20000307 PARAMETER Experiment Name: At_Germinating_Seeds_Sub_P Parameter: Tissue Value: Germinating Seeds
  misc_feature: MA Experiment ID: 20000327 Result: Down-regulated in Transcription
  misc_feature: MA Experiment 20000327 PARAMETER Experiment Name: At_42deg_Heat_Sub_P Parameter: Age (day) Value: 14
  misc_feature: MA Experiment 20000327 PARAMETER Experiment Name: At_42deg_Heat_Sub_P Parameter: Organism Value: A. thaliana
  misc_feature: MA Experiment 20000327 PARAMETER Experiment Name: At_42deg_Heat_Sub_P Parameter: Plant Line Value: WS
  misc_feature: MA Experiment 20000327 PARAMETER Experiment Name: At_42deg_Heat_Sub_P Parameter: Temperature (deg C) Value: 42 vs. 22
  misc_feature: MA Experiment 20000327 PARAMETER Experiment Name: At_42deg_Heat_Sub_P Parameter: Timepoint (hr) Value: 1
  misc_feature: MA Experiment 20000327 PARAMETER Experiment Name: At_42deg_Heat_Sub_P Parameter: Tissue Value: Aerial
  misc_feature: MA Experiment ID: 20000328 Result: Down-regulated in Transcription
  misc_feature: MA Experiment 20000328 PARAMETER Experiment Name: At_42deg_Heat_Sub_P Parameter: Age (day) Value: 14
  misc_feature: MA Experiment 20000328 PARAMETER Experiment Name: At_42deg_Heat_Sub_P Parameter: Organism Value: A. thaliana
  misc_feature: MA Experiment 20000328 PARAMETER Experiment Name: At_42deg_Heat_Sub_P Parameter: Plant Line Value: WS
  misc_feature: MA Experiment 20000328 PARAMETER Experiment Name: At_42deg_Heat_Sub_P Parameter: Temperature (deg C) Value: 42 vs. 22
  misc_feature: MA Experiment 20000328 PARAMETER Experiment Name: At_42deg_Heat_Sub_P Parameter: Timepoint (hr) Value: 6
  misc_feature: MA Experiment 20000328 PARAMETER Experiment Name: At_42deg_Heat_Sub_P Parameter: Tissue Value: Aerial
  misc_feature: MA Experiment ID: 20000347 Result: Down-regulated in Transcription
  misc_feature: MA Experiment 20000347 PARAMETER Experiment Name: At_2mM_SA_Sub_P Parameter: Age (day) Value: 14
  misc_feature: MA Experiment 20000347 PARAMETER Experiment Name: At_2mM_SA_Sub_P Parameter: Organism Value: A. thaliana
  misc_feature: MA Experiment 20000347 PARAMETER Experiment Name: At_2mM_SA_Sub_P Parameter: Plant Line Value: WS
  misc_feature: MA Experiment 20000347 PARAMETER Experiment Name: At_2mM_SA_Sub_P Parameter: Timepoint (hr) Value: 6
  misc_feature: MA Experiment 20000347 PARAMETER Experiment Name: At_2mM_SA_Sub_P Parameter: Tissue Value: Aerial
  misc_feature: MA Experiment 20000347 PARAMETER Experiment Name: At_2mM_SA_Sub_P Parameter: Treatment Value: 2mM SA vs. No Treatment
  misc_feature: MA Experiment ID: 20000355 Result: Up-regulated in Transcription
  misc_feature: MA Experiment 20000355 PARAMETER Experiment Name: At_Siliques_Sub_P Parameter: Age (day) Value: 21
  misc_feature: MA Experiment 20000355 PARAMETER Experiment Name: At_Siliques_Sub_P Parameter: Organism Value: A. thaliana
  misc_feature: MA Experiment 20000355 PARAMETER Experiment Name: At_Siliques_Sub_P Parameter: Plant Line Value: WS
  misc_feature: MA Experiment 20000355 PARAMETER Experiment Name: At_Siliques_Sub_P Parameter: Tissue Value: Less Than 5mm Siliques vs. Whole Plant
  misc_feature: MA Experiment ID: 20000440 Result: Up-regulated in Transcription
  misc_feature: MA Experiment 20000440 PARAMETER Experiment Name: At_Closed-Flower__Sub_P Parameter: Tissue Value: Closed Flower vs. Whole Plant
aagattcagtagaaaaaattgaccacaagacaaaatatagatacaactatacagaaagagaagataggatgaacaagtgagtctcttctctctctcaaatccactccgtaataagttcataatctatcatccaccatggagaaaacatcaatgttctccattcacgaaggaaagccgattcgatgcaaagcagcagtatctagaaaaccaggagaagcattggtgatagaagagatccatgtggatccacctcaagcttatgaagttaggataaagatcatatgtacatctttatgtcataccgatgtttctttctcgaaaatagacagtggaccgcttgcaaggtttcctaggattctaggacacgaagcagtcggtgtgatcgagagcattggtgaacatgtgaatggatttcaacaaggtgatatcgttttgccagtgtttcaccctcactgtgaagaatgtagagattgcaaatcctcaaagagcaactggtgcgcaagatttgccgacgatttcttatcaaacacgagacgatatggaatgacttcaagattcaaagactcctttggagaagatatttatcattttctctttgtctcgagtttttctgaatatacggtcgtcgacatcgcacatcttgtcaaaatctctcctgatattccggttgataaagcagcattgctcagctgcggtgtttccacaggaattggagcagcttggaaagtggctaacgtggaaaaaggctccaccgttgcagtttttggccttggtgctgttggacttgcggttggagaaggagccaggctgcgtggagccggcaagatcattggtgttgatctcaatccagaaaaattcgagctaggcaagaaatttggtttcacgagtttcatcaatcctaccttgtgtggagaaaagaagattagcgaggtgattaaagaaatgactggaggaggagttgactatagtttcgaatgcgttggtttaccttctttattgaccgaagctttctccagcactcgcacgggttcaggaaaaacggtagtgttggggatagataagcatctaacgccagtaagtttgggtagctttgatcttctcagaggcagacatgtttgtggaagcttgtttggtggtcttaaacccaaactagatattccgattctggttgatcattacttaaaaaaggagcttaatttggatagttttattacacatgaattgaaatttgaggaaatcaacaaagctttcgatttattagtgcaaggaaagtctctccgctgcattctttggatgaacaagtgaagtgattaattatgttgaaactatatatgttgaaaaattgattaaatttctttatcaaaaagaaaagaattaattattactctttc

SEQ ID NO: 38686 - protein, 389 aa, Arabidopsis thaliana
  peptide (1)..(389): Ceres Seq. ID no. 12330747
  misc_feature (1)..(389): Homolog of NCBI NO: 7705215 NR Description: alcohol dehydrogenase ADH [Lycopersicon
  misc_feature (13)..(388): Homolog of NCBI NO: 34906828 NR Description: contains EST C99136(E10204)~similar to alcohol
  misc_feature (13)..(387): Homolog of NCBI NO: 15238330 NR Description: alcohol dehydrogenase
  misc_feature (1)..(389): Homolog of NCBI NO: 1076579 NR Description: probable alcohol dehydrogenase (EC 1.1.1.1) ADH3a
  misc_feature (1)..(389): Homolog of NCBI NO: 7705214 NR Description: alcohol dehydrogenase ADH [Lycopersicon
  misc_feature (8)..(389): Homolog of NCBI NO: 15219884 NR Description: alcohol dehydrogenase ADH, putative; protein id:
  misc_feature (1)..(389): Homolog of NCBI NO: 15219882 NR Description: alcohol dehydrogenase ADH, putative
  misc_feature (1)..(389): Homolog of NCBI NO: 11250327 NR Description: probable alcohol dehydrogenase (EC 1.1.1.1)
  misc_feature (6)..(389): Homolog of NCBI NO: 21618210 NR Description: alcohol dehydrogenase like protein [Arabidopsis
  misc_feature (1)..(389): Homolog of NCBI NO: 18415840 NR Description: alcohol dehydrogenase like protein
MEKTSMFSIHEGKPIRCKAAVSRKPGEALVIEEIHVDPPQAYEVRIKIICTSLCHTDVSFSKIDSGPLARFPRILGHEAVGVIESIGEHVNGFQQGDIVLPVFHPHCEECRDCKSSKSNWCARFADDFLSNTRRYGMTSRFKDSFGEDIYHFLFVSSFSEYTVVDIAHLVKISPDIPVDKAALLSCGVSTGIGAAWKVANVEKGSTVAVFGLGAVGLAVGEGARLRGAGKIIGVDLNPEKFELGKKFGFTSFINPTLCGEKKISEVIKEMTGGGVDYSFECVGLPSLLTEAFSSTRTGSGKTVVLGIDKHLTPVSLGSFDLLRGRHVCGSLFGGLKPKLDIPILVDHYLKKELNLDSFITHELKFEEINKAFDLLVQGKSLRCILWMNK

SEQ ID NO: 38687 - protein, 384 aa, Arabidopsis thaliana
  peptide (1)..(384): Ceres Seq. ID no. 12330748
  misc_feature (1)..(384): Homolog of NCBI NO: 7705215 NR Description: alcohol dehydrogenase ADH [Lycopersicon
  misc_feature (8)..(383): Homolog of NCBI NO: 34906828 NR Description: contains EST C99136(E10204)~similar to alcohol
  misc_feature (8)..(382): Homolog of NCBI NO: 15238330 NR Description: alcohol dehydrogenase
  misc_feature (1)..(384): Homolog of NCBI NO: 1076579 NR Description: probable alcohol dehydrogenase (EC 1.1.1.1) ADH3a
  misc_feature (1)..(384): Homolog of NCBI NO: 7705214 NR Description: alcohol dehydrogenase ADH [Lycopersicon
  misc_feature (3)..(384): Homolog of NCBI NO: 15219884 NR Description: alcohol dehydrogenase ADH, putative; protein id:
  misc_feature (1)..(384): Homolog of NCBI NO: 15219882 NR Description: alcohol dehydrogenase ADH, putative
  misc_feature (1)..(384): Homolog of NCBI NO: 11250327 NR Description: probable alcohol dehydrogenase (EC 1.1.1.1)
  misc_feature (1)..(384): Homolog of NCBI NO: 21618210 NR Description: alcohol dehydrogenase like protein [Arabidopsis
  misc_feature (1)..(384): Homolog of NCBI NO: 18415840 NR Description: alcohol dehydrogenase like protein
MFSIHEGKPIRCKAAVSRKPGEALVIEEIHVDPPQAYEVRIKIICTSLCHTDVSFSKIDSGPLARFPRILGHEAVGVIESIGEHVNGFQQGDIVLPVFHPHCEECRDCKSSKSNWCARFADDFLSNTRRYGMTSRFKDSFGEDIYHFLFVSSFSEYTVVDIAHLVKISPDIPVDKAALLSCGVSTGIGAAWKVANVEKGSTVAVFGLGAVGLAVGEGARLRGAGKIIGVDLNPEKFELGKKFGFTSFINPTLCGEKKISEVIKEMTGGGVDYSFECVGLPSLLTEAFSSTRTGSGKTVVLGIDKHLTPVSLGSFDLLRGRHVCGSLFGGLKPKLDIPILVDHYLKKELNLDSFITHELKFEEINKAFDLLVQGKSLRCILWMNK

SEQ ID NO: 38688 - protein, 253 aa, Arabidopsis thaliana
  peptide (1)..(253): Ceres Seq. ID no. 12330749
  misc_feature (1)..(253): Homolog of NCBI NO: 7705215 NR Description: alcohol dehydrogenase ADH [Lycopersicon
  misc_feature (1)..(252): Homolog of NCBI NO: 34906828 NR Description: contains EST C99136(E10204)~similar to alcohol
  misc_feature (1)..(251): Homolog of NCBI NO: 15238330 NR Description: alcohol dehydrogenase
  misc_feature (1)..(253): Homolog of NCBI NO: 1076579 NR Description: probable alcohol dehydrogenase (EC 1.1.1.1) ADH3a
  misc_feature (1)..(253): Homolog of NCBI NO: 7705214 NR Description: alcohol dehydrogenase ADH [Lycopersicon
  misc_feature (1)..(253): Homolog of NCBI NO: 15219884 NR Description: alcohol dehydrogenase ADH, putative; protein id:
  misc_feature (1)..(253): Homolog of NCBI NO: 15219882 NR Description: alcohol dehydrogenase ADH, putative
  misc_feature (1)..(253): Homolog of NCBI NO: 11250327 NR Description: probable alcohol dehydrogenase (EC 1.1.1.1)
  misc_feature (1)..(253): Homolog of NCBI NO: 21618210 NR Description: alcohol dehydrogenase like protein [Arabidopsis
  misc_feature (1)..(253): Homolog of NCBI NO: 18415840 NR Description: alcohol dehydrogenase like protein
MTSRFKDSFGEDIYHFLFVSSFSEYTVVDIAHLVKISPDIPVDKAALLSCGVSTGIGAAWKVANVEKGSTVAVFGLGAVGLAVGEGARLRGAGKIIGVDLNPEKFELGKKFGFTSFINPTLCGEKKISEVIKEMTGGGVDYSFECVGLPSLLTEAFSSTRTGSGKTVVLGIDKHLTPVSLGSFDLLRGRHVCGSLFGGLKPKLDIPILVDHYLKKELNLDSFITHELKFEEINKAFDLLVQGKSLRCILWMNK

SEQ ID NO: 38689 - DNA, 1550 bp, Arabidopsis thaliana
  misc_feature (1)..(1550): Ceres Seq. ID no. 13492477
  misc_feature: MA Experiment ID: 108434 Result: Up-regulated in Transcription
  misc_feature: MA Experiment 108434 PARAMETER Experiment Name: At_Root_Tips_cDNA_P Parameter: Tissue Value: Root Tips
  misc_feature: MA Experiment ID: 108577 Result: Down-regulated in Transcription
  misc_feature: MA Experiment 108577 PARAMETER Experiment Name: At_42deg_Heat_cDNA_P Parameter: Temperature (deg C) Value: 42 vs. 22
  misc_feature: MA Experiment 108577 PARAMETER Experiment Name: At_42deg_Heat_cDNA_P Parameter: Timepoint (hr) Value: 6
  misc_feature: MA Experiment 108577 PARAMETER Experiment Name: At_42deg_Heat_cDNA_P Parameter: Tissue Value: Aerial
  misc_feature: MA Experiment ID: 20000111 Result: Down-regulated in Transcription
  misc_feature: MA Experiment 20000111 PARAMETER Experiment Name: At_42deg_Heat_cDNA_P Parameter: Temperature (deg C) Value: 42 vs. 22
  misc_feature: MA Experiment 20000111 PARAMETER Experiment Name: At_42deg_Heat_cDNA_P Parameter: Timepoint (hr) Value: 6
  misc_feature: MA Experiment 20000111 PARAMETER Experiment Name: At_42deg_Heat_cDNA_P Parameter: Tissue Value: Aerial
  misc_feature: MA Experiment ID: 20000113 Result: Down-regulated in Transcription
  misc_feature: MA Experiment 20000113 PARAMETER Experiment Name: At_42deg_Heat_cDNA_P Parameter: Temperature (deg C) Value: 42 vs. 22
  misc_feature: MA Experiment 20000113 PARAMETER Experiment Name: At_42deg_Heat_cDNA_P Parameter: Timepoint (hr) Value: 8
  misc_feature: MA Experiment 20000113 PARAMETER Experiment Name: At_42deg_Heat_cDNA_P Parameter: Tissue Value: Aerial
  misc_feature: MA Experiment ID: 20000171 Result: Down-regulated in Transcription
  misc_feature: MA Experiment 20000171 PARAMETER Experiment Name: At_42deg_Heat_P Parameter: Age (day) Value: 14
  misc_feature: MA Experiment 20000171 PARAMETER Experiment Name: At_42deg_Heat_P Parameter: Organism Value: A. thaliana
  misc_feature: MA Experiment 20000171 PARAMETER Experiment Name: At_42deg_Heat_P Parameter: Plant Line Value: WS
  misc_feature: MA Experiment 20000171 PARAMETER Experiment Name: At_42deg_Heat_P Parameter: Temperature (deg C) Value: 42 vs. 22
  misc_feature: MA Experiment 20000171 PARAMETER Experiment Name: At_42deg_Heat_P Parameter: Timepoint (hr) Value: 1
  misc_feature: MA Experiment 20000171 PARAMETER Experiment Name: At_42deg_Heat_P Parameter: Tissue Value: Aerial
  misc_feature: MA Experiment ID: 20000173 Result: Down-regulated in Transcription
  misc_feature: MA Experiment 20000173 PARAMETER Experiment Name: At_42deg_Heat_P Parameter: Age (day) Value: 14
  misc_feature: MA Experiment 20000173 PARAMETER Experiment Name: At_42deg_Heat_P Parameter: Organism Value: A. thaliana
  misc_feature: MA Experiment 20000173 PARAMETER Experiment Name: At_42deg_Heat_P Parameter: Plant Line Value: WS
  misc_feature: MA Experiment 20000173 PARAMETER Experiment Name: At_42deg_Heat_P Parameter: Temperature (deg C) Value: 42 vs. 22
  misc_feature: MA Experiment 20000173 PARAMETER Experiment Name: At_42deg_Heat_P Parameter: Timepoint (hr) Value: 6
  misc_feature: MA Experiment 20000173 PARAMETER Experiment Name: At_42deg_Heat_P Parameter: Tissue Value: Aerial
  misc_feature: MA Experiment ID: 20000179 Result: Up-regulated in Transcription
  misc_feature: MA Experiment 20000179 PARAMETER Experiment Name: At_Germinating_Seeds_P Parameter: Age (hr) Value: 6 vs. 0
  misc_feature: MA Experiment 20000179 PARAMETER Experiment Name: At_Germinating_Seeds_P Parameter: Tissue Value: Germinating Seeds
  misc_feature: MA Experiment ID: 20000180 Result: Up-regulated in Transcription
  misc_feature: MA Experiment 20000180 PARAMETER Experiment Name: At_Germinating_Seeds_P Parameter: Age (hr) Value: 24 vs. 0
  misc_feature: MA Experiment 20000180 PARAMETER Experiment Name: At_Germinating_Seeds_P Parameter: Tissue Value: Germinating Seeds
actttcttcttcgattagccacttttttttcttttgtaattttcctttcttttttttttcttttgaattttcgggaagcagcatttccactggagctgcaaaatcttcctatcaaaattatagatcgatccaagttttagattcgagaatcattttctccaaattagatttatatatcaaaaggaatcgaaaatagacagcaatttttgttttgtcggatcgtattgaatcagctgtgaattttagcgccaatttaaccactgaatcgtttgattagaagctaagatttggtcttacgatcgatctaagtagggttcttcttcttaagtgtgtgttttgttaaaattagtaaagagagatggagaagaagaaagtcgcgactccgctagtgtgccatggccattcgagacctgttgtggatttgttctacagtccaatcactcctgatggtttcttcctcatcagcgcaagtaaagattctcaaccaatgttgagaaatggggaaactggagattggattggtacatttgaaggtcataaaggtgctgtgtggagttcttgtcttgataacaatgctttacgtgcagcttctgcatctgctgatttttcagcgaagctttgggatgctttgactggggatgtcttgcattcttttgagcacaagcatattgttcgagcatgcgccttctctcaggatacgaaatatctaatcacaggaggatttgagaaaattcttcgtgttttcgacttgaatcgcttggatgcacctcctacagaaattgataaatctcctggttctatcagaacactaacatggcttcacggtgatcaaacaatattaagttcttgcactgatattggtggtgtgaggttatgggatgtgaggagtggcaaaatagtgcaaactctagaaaccaagtctcctgtcaccagtgctgaagtgagtcaagatggacggtatataacaactgccgatgggtcaactgttaaattttgggatgcaaatcattttggactagtgaaaagttacgacatgccctgcaatatcgaatctgcatcgcttgagccaaaatctggcaacaaattcgttgctggtggagaagatatgtgggttcgactctttgatttccacaccggaaaggagattggatgcaacaagggacatcatggtccggttcactgtgtgagatttgcaccaacaggtgagtcttatgcttcagggtctgaagatggtacaatcagaatttggcaaactggaccggtgaatcctgaagagatcagcgagtcaaagccgaagcagagtgtggatgaggttgctcgtaagattgaaggctttcacattaacaaggaaggaaaaaccgcagagaaaccatctgatgcttaaaccaagaaaagaaccaagaaaaatggctgcttctctttgtcttcttactgtgtttttacttccagactgaatatacggaaattcaaaacaagtgtttgaaaaacagtcgttgtcaatcttcattcgagtcaagtttatggatgtggctgaaaatttacgaattaat

SEQ ID NO: 38690 - protein, 341 aa, Arabidopsis thaliana
  peptide (1)..(341): Ceres Seq. ID no. 13492478
  misc_feature (8)..(340): Homolog of NCBI NO: 20149592 NR Description: unr-interacting protein [Homo sapiens]
  misc_feature (8)..(340): Homolog of NCBI NO: 12643951 NR Description: UNR-interacting protein (WD-40 repeat protein
  misc_feature (8)..(340): Homolog of NCBI NO: 4519417 NR Description: WD-40 repeat protein [Homo sapiens]
  misc_feature (8)..(337): Homolog of NCBI NO: 6755682 NR Description: serine/threonine kinase receptor associated
  misc_feature (8)..(299): Homolog of NCBI NO: 12667270 NR Description: serine-threonine kinase receptor-associated
  misc_feature (8)..(299): Homolog of NCBI NO: 29437263 NR Description: Similar to serine/threonine kinase receptor
  misc_feature (1)..(263): Homolog of NCBI NO: 15219076 NR Description: unknown protein; protein id: At1g52730.1
  misc_feature (6)..(336): Homolog of NCBI NO: 18394249 NR Description: transducin / WD-40 repeat protein family
  misc_feature (1)..(340): Homolog of NCBI NO: 30695318 NR Description: transducin / WD-40 repeat protein family
  misc_feature (1)..(341): Homolog of NCBI NO: 18400838 NR Description: transducin / WD-40 repeat protein family
MEKKKVATPLVCHGHSRPVVDLFYSPITPDGFFLISASKDSQPMLRNGETGDWIGTFEGHKGAVWSSCLDNNALRAASASADFSAKLWDALTGDVLHSFEHKHIVRACAFSQDTKYLITGGFEKILRVFDLNRLDAPPTEIDKSPGSIRTLTWLHGDQTILSSCTDIGGVRLWDVRSGKIVQTLETKSPVTSAEVSQDGRYITTADGSTVKFWDANHFGLVKSYDMPCNIESASLEPKSGNKFVAGGEDMWVRLFDFHTGKEIGCNKGHHGPVHCVRFAPTGESYASGSEDGTIRIWQTGPVNPEEISESKPKQSVDEVARKIEGFHINKEGKTAEKPSDA

SEQ ID NO: 38691 - protein, 298 aa, Arabidopsis thaliana
  peptide (1)..(298): Ceres Seq. ID no. 13492479
  misc_feature (1)..(297): Homolog of NCBI NO: 20149592 NR Description: unr-interacting protein [Homo sapiens]
  misc_feature (1)..(297): Homolog of NCBI NO: 12643951 NR Description: UNR-interacting protein (WD-40 repeat protein
  misc_feature (1)..(297): Homolog of NCBI NO: 4519417 NR Description: WD-40 repeat protein [Homo sapiens]
  misc_feature (1)..(294): Homolog of NCBI NO: 6755682 NR Description: serine/threonine kinase receptor associated
  misc_feature (1)..(256): Homolog of NCBI NO: 12667270 NR Description: serine-threonine kinase receptor-associated
  misc_feature (1)..(256): Homolog of NCBI NO: 29437263 NR Description: Similar to serine/threonine kinase receptor
  misc_feature (1)..(220): Homolog of NCBI NO: 15219076 NR Description: unknown protein; protein id: At1g52730.1
  misc_feature (1)..(293): Homolog of NCBI NO: 18394249 NR Description: transducin / WD-40 repeat protein family
  misc_feature (1)..(297): Homolog of NCBI NO: 30695318 NR Description: transducin / WD-40 repeat protein family
  misc_feature (1)..(298): Homolog of NCBI NO: 18400838 NR Description: transducin / WD-40 repeat protein family
MLRNGETGDWIGTFEGHKGAVWSSCLDNNALRAASASADFSAKLWDALTGDVLHSFEHKHIVRACAFSQDTKYLITGGFEKILRVFDLNRLDAPPTEIDKSPGSIRTLTWLHGDQTILSSCTDIGGVRLWDVRSGKIVQTLETKSPVTSAEVSQDGRYITTADGSTVKFWDANHFGLVKSYDMPCNIESASLEPKSGNKFVAGGEDMWVRLFDFHTGKEIGCNKGHHGPVHCVRFAPTGESYASGSEDGTIRIWQTGPVNPEEISESKPKQSVDEVARKIEGFHINKEGKTAEKPSDA

SEQ ID NO: 38692 - DNA, 1028 bp, Arabidopsis thaliana; identical to SEQ ID NO: 38518
  misc_feature (1)..(1028): Ceres Seq. ID no. 12325605
  misc_feature: MA Experiment ID: 20000185 Result: Down-regulated in Transcription
  misc_feature: MA Experiment 20000185 PARAMETER Experiment Name: At_Roots__P Parameter: Age (day) Value: 7 vs. 21
  misc_feature: MA Experiment 20000185 PARAMETER Experiment Name: At_Roots__P Parameter: Organism Value: A. thaliana
  misc_feature: MA Experiment 20000185 PARAMETER Experiment Name: At_Roots__P Parameter: Tissue Value: Roots vs. Whole Plant
  misc_feature: MA Experiment ID: 20000227 Result: Down-regulated in Transcription
  misc_feature: MA Experiment 20000227 PARAMETER Experiment Name: At_Root-Tips-vs-Tops_P Parameter: Tissue Value: Root Tips vs. Root Tops
  misc_feature: MA Experiment ID: 20000286 Result: Down-regulated in Transcription
  misc_feature: MA Experiment 20000286 PARAMETER Experiment Name: At_Open_Flower_P Parameter: Age (day) Value: 21
  misc_feature: MA Experiment 20000286 PARAMETER Experiment Name: At_Open_Flower_P Parameter: Plant Line Value: WS
  misc_feature: MA Experiment 20000286 PARAMETER Experiment Name: At_Open_Flower_P Parameter: Tissue Value: Half Open vs. Whole Plant
  misc_feature: MA Experiment ID: 20000439 Result: Down-regulated in Transcription
  misc_feature: MA Experiment 20000439 PARAMETER Experiment Name: At_Roots__P Parameter: Age (day) Value: 14 vs. 21
  misc_feature: MA Experiment 20000439 PARAMETER Experiment Name: At_Roots__P Parameter: Organism Value: A. thaliana
  misc_feature: MA Experiment 20000439 PARAMETER Experiment Name: At_Roots__P Parameter: Tissue Value: Roots vs. Whole Plant

SEQ ID NO: 38693 - protein, 258 aa, Arabidopsis thaliana; identical to SEQ ID NO: 38519
  peptide (1)..(258): Ceres Seq. ID no. 12325606
  misc_feature (69)..(258): Homolog of NCBI NO: 16329734 NR Description: unknown protein [Synechocystis sp. PCC 6803]
  misc_feature (70)..(258): Homolog of NCBI NO: 23039527 NR Description: hypothetical protein [Trichodesmium erythraeum
  misc_feature (68)..(258): Homolog of NCBI NO: 23129945 NR Description: hypothetical protein [Nostoc punctiforme]
  misc_feature (69)..(258): Homolog of NCBI NO: 17230751 NR Description: hypothetical protein [Nostoc sp. PCC 7120]
  misc_feature (25)..(258): Homolog of NCBI NO: 18409276 NR Description: putative protein
  misc_feature (12)..(258): Homolog of NCBI NO: 11357625 NR Description: hypothetical protein F24M12.180 - Arabidopsis
  misc_feature (145)..(258): Homolog of NCBI NO: 37573058 NR Description: unknown protein [Oryza sativa (japonica
  misc_feature (1)..(258): Homolog of NCBI NO: 15237199 NR Description: putative protein; protein id: At5g23040.1
  misc_feature (69)..(258): Homolog of NCBI NO: 16329734 NR Description: unknown protein [Synechocystis sp. PCC 6803]
  misc_feature (70)..(258): Homolog of NCBI NO: 23039527 NR Description: hypothetical protein [Trichodesmium erythraeum
  misc_feature (68)..(258): Homolog of NCBI NO: 23129945 NR Description: hypothetical protein [Nostoc punctiforme]
  misc_feature (69)..(258): Homolog of NCBI NO: 17230751 NR Description: hypothetical protein [Nostoc sp. PCC 7120]
  misc_feature (25)..(258): Homolog of NCBI NO: 18409276 NR Description: putative protein
  misc_feature (12)..(258): Homolog of NCBI NO: 11357625 NR Description: hypothetical protein F24M12.180 - Arabidopsis
  misc_feature (145)..(258): Homolog of NCBI NO: 37573058 NR Description: unknown protein [Oryza sativa (japonica
  misc_feature (1)..(258): Homolog of NCBI NO: 15237199 NR Description: putative protein; protein id: At5g23040.1

SEQ ID NO: 38694 - protein, 145 aa, Arabidopsis thaliana; identical to SEQ ID NO: 38520
  peptide (1)..(145): Ceres Seq. ID no. 12325607
  misc_feature (1)..(145): Homolog of NCBI NO: 16329734 NR Description: unknown protein [Synechocystis sp. PCC 6803]
  misc_feature (1)..(145): Homolog of NCBI NO: 23039527 NR Description: hypothetical protein [Trichodesmium erythraeum
  misc_feature (1)..(145): Homolog of NCBI NO: 23129945 NR Description: hypothetical protein [Nostoc punctiforme]
  misc_feature (1)..(145): Homolog of NCBI NO: 17230751 NR Description: hypothetical protein [Nostoc sp. PCC 7120]
  misc_feature (1)..(145): Homolog of NCBI NO: 18409276 NR Description: putative protein
  misc_feature (1)..(145): Homolog of NCBI NO: 11357625 NR Description: hypothetical protein F24M12.180 - Arabidopsis
  misc_feature (32)..(145): Homolog of NCBI NO: 37573058 NR Description: unknown protein [Oryza sativa (japonica
  misc_feature (1)..(145): Homolog of NCBI NO: 15237199 NR Description: putative protein; protein id: At5g23040.1
  misc_feature (1)..(145): Homolog of NCBI NO: 16329734 NR Description: unknown protein [Synechocystis sp. PCC 6803]
  misc_feature (1)..(145): Homolog of NCBI NO: 23039527 NR Description: hypothetical protein [Trichodesmium erythraeum
  misc_feature (1)..(145): Homolog of NCBI NO: 23129945 NR Description: hypothetical protein [Nostoc punctiforme]
  misc_feature (1)..(145): Homolog of NCBI NO: 17230751 NR Description: hypothetical protein [Nostoc sp. PCC 7120]
  misc_feature (1)..(145): Homolog of NCBI NO: 18409276 NR Description: putative protein
  misc_feature (1)..(145): Homolog of NCBI NO: 11357625 NR Description: hypothetical protein F24M12.180 - Arabidopsis
  misc_feature (32)..(145): Homolog of NCBI NO: 37573058 NR Description: unknown protein [Oryza sativa (japonica
  misc_feature (1)..(145): Homolog of NCBI NO: 15237199 NR Description: putative protein; protein id: At5g23040.1

SEQ ID NO: 38695 - DNA, 1516 bp, Arabidopsis thaliana
  misc_feature (1)..(1516): Ceres Seq. ID no. 12395354
  misc_feature: MA Experiment ID: 108434 Result: Up-regulated in Transcription
  misc_feature: MA Experiment 108434 PARAMETER Experiment Name: At_Root_Tips_cDNA_P Parameter: Tissue Value: Root Tips
  misc_feature: MA Experiment ID: 108464 Result: Down-regulated in Transcription
  misc_feature: MA Experiment 108464 PARAMETER Experiment Name: At_Germinating_Seeds_cDNA_P Parameter: Age (day) Value: 4 vs. 0
  misc_feature: MA Experiment 108464 PARAMETER Experiment Name: At_Germinating_Seeds_cDNA_P Parameter: Tissue Value: Germinating Seeds
  misc_feature: MA Experiment ID: 108579 Result: Down-regulated in Transcription
  misc_feature: MA Experiment 108579 PARAMETER Experiment Name: At_4deg_Cold_cDNA_P Parameter: Temperature (deg C) Value: 4 vs. 22
  misc_feature: MA Experiment 108579 PARAMETER Experiment Name: At_4deg_Cold_cDNA_P Parameter: Timepoint (hr) Value: 6
  misc_feature: MA Experiment 108579 PARAMETER Experiment Name: At_4deg_Cold_cDNA_P Parameter: Tissue Value: Aerial
actgaactttcttttcctttcaagtttcacctctaatgcgacgaacacagccacgggaactggccgtcactggtttatcggagaatctccaaggatgtgttttccgcacggtgaaacgagcagttctgatcggaaacggctgcgccggcgcggagaatcaatgcatcggtctccttcgatccttaggcctcttcgatcgccacctctattatagagtagctaaaccaagaggtggaatccttcaatggcttcctatctctctctacaaacgaattcatcgttttatcagcactatctgtgccggattatccattaacgctactggaatcacgaatgtgtttgaagtagatgatgcgaagcagattgctgctatggctcgtaaaacgtttgaaaagaatggcccgttgttagtcgtggcgtctggtagtgatactatttccgtcgcaagctcaataagacgactggctatggaaaatgtttttgttgttcaggtgcaacatccaaggtcgcatcttgagagatttgatctagtgatcacacctcaacacgattatttttctttaacacctgaagggaagaggcaaattcctttctttctcagaccatgggtaactccacgtgaacatccaggtagaaatgtgtttctcactactggagctcttcattacgccgacgcttctactctaagaaatgctacatcggaatggaaaaacgagtttgcttcgctgccaaagcctttggttgtagttaatattggaggacctacaaggaactgtttgtatggtgttgatcttgctaaacagttgtgtggtatgcttcagagtatcctctggagctgtggaagcctaagaatatctttctcaagaagaacaccaaagaaggttgtagaagtcataactggagaattgagctctaactctaaggtctacatttgggatggaaaagaccctaatccgcatttgggacatctagctttagccaatacttttatcataactgctgactctataagtatgttgagcgaggcatgtagtaccgggaaacccgtttatgttgtgggtgctgaacggtgtacatggaaattttctgacttccagaagactctccatggtagaggagctgttcgacctttgaccggcaaagaagatatgtgtgagaagtggagttactctcctcttaacgataatgtagaagctgcgaggcgtgtgattcaagatctggccaagcgtggctgggaaatcgaggcatgaccgttctttccctccacaagttttccagagtactactctcttttccctatatagtctacagttattattttcgtactgggaattatcctccatagaagttaaatgctctagtcgaactcagggtcatatacttagctcatcgtttgaactattagtctattaacgattggtttttgttagttctttggttttttccatttggtttgtagtctcatgtatcaagcatcatctgtaaaggaacgaataaaagctgcgtgctctgacct

SEQ ID NO: 38696 - protein, 404 aa, Arabidopsis thaliana
  peptide (1)..(404): Ceres Seq. ID no. 12395355
  misc_feature (32)..(397): Pfam Name: Protein of unknown function (DUF1022) Pfam Description: Protein of unknown function (DUF1022)
  misc_feature (184)..(398): Homolog of NCBI NO: 22968024 NR Description: hypothetical protein [Rhodospirillum rubrum]
  misc_feature (25)..(84): Homolog of NCBI NO: 38346329 NR Description: OJ000126_13.11 [Oryza sativa (japonica
  misc_feature (86)..(167): Homolog of NCBI NO: 38346329 NR Description: OJ000126_13.11 [Oryza sativa (japonica
  misc_feature (202)..(404): Homolog of NCBI NO: 38346329 NR Description: OJ000126_13.11 [Oryza sativa (japonica
  misc_feature (6)..(59): Homolog of NCBI NO: 9757815 NR Description: gene_id:MWD9.14~similar to unknown
  misc_feature (82)..(404): Homolog of NCBI NO: 9757815 NR Description: gene_id:MWD9.14~similar to unknown
  misc_feature (6)..(80): Homolog of NCBI NO: 18420465 NR Description: putative protein
  misc_feature (82)..(404): Homolog of NCBI NO: 18420465 NR Description: putative protein
  misc_feature (1)..(372): Homolog of NCBI NO: 9759316 NR Description: gene_id:MBL20.6~similar to unknown
  misc_feature (1)..(404): Homolog of NCBI NO: 18415120 NR Description: putative protein
MRRTQPRELAVTGLSENLQGCVFRTVKRAVLIGNGCAGAENQCIGLLRSLGLFDRHLYYRVAKPRGGILQWLPISLYKRIHRFISTICAGLSINATGITNVFEVDDAKQIAAMARKTFEKNGPLLVVASGSDTISVASSIRRLAMENVFVVQVQHPRSHLERFDLVITPQHDYFSLTPEGKRQIPFFLRPWVTPREHPGRNVFLTTGALHYADASTLRNATSEWKNEFASLPKPLVVVNIGGPTRNCLYGVDLAKQLCGMLQSILWSCGSLRISFSRRTPKKVVEVITGELSSNSKVYIWDGKDPNPHLGHLALANTFIITADSISMLSEACSTGKPVYVVGAERCTWKFSDFQKTLHGRGAVRPLTGKEDMCEKWSYSPLNDNVEAARRVIQDLAKRGWEIEA

SEQ ID NO: 38697 - protein, 292 aa, Arabidopsis thaliana
  peptide (1)..(292): Ceres Seq. ID no. 12395356
  misc_feature (1)..(285): Pfam Name: Protein of unknown function (DUF1022) Pfam Description: Protein of unknown function (DUF1022)
  misc_feature (7)..(288): Homolog of NCBI NO: 15892085 NR Description: unknown [Rickettsia conorii]
  misc_feature (71)..(290): Homolog of NCBI NO: 16127081 NR Description: conserved hypothetical protein [Caulobacter
  misc_feature (1)..(60): Homolog of NCBI NO: 22968024 NR Description: hypothetical protein [Rhodospirillum rubrum]
  misc_feature (72)..(286): Homolog of NCBI NO: 22968024 NR Description: hypothetical protein [Rhodospirillum rubrum]
  misc_feature (1)..(55): Homolog of NCBI NO: 38346329 NR Description: OJ000126_13.11 [Oryza sativa (japonica
  misc_feature (90)..(292): Homolog of NCBI NO: 38346329 NR Description: OJ000126_13.11 [Oryza sativa (japonica
  misc_feature (1)..(292): Homolog of NCBI NO: 9757815 NR Description: gene_id:MWD9.14~similar to unknown
  misc_feature (1)..(292): Homolog of NCBI NO: 18420465 NR Description: putative protein
  misc_feature (1)..(260): Homolog of NCBI NO: 9759316 NR Description: gene_id:MBL20.6~similar to unknown
  misc_feature (1)..(292): Homolog of NCBI NO: 18415120 NR Description: putative protein
MARKTFEKNGPLLVVASGSDTISVASSIRRLAMENVFVVQVQHPRSHLERFDLVITPQHDYFSLTPEGKRQIPFFLRPWVTPREHPGRNVFLTTGALHYADASTLRNATSEWKNEFASLPKPLVVVNIGGPTRNCLYGVDLAKQLCGMLQSILWSCGSLRISFSRRTPKKVVEVITGELSSNSKVYIWDGKDPNPHLGHLALANTFIITADSISMLSEACSTGKPVYVVGAERCTWKFSDFQKTLHGRGAVRPLTGKEDMCEKWSYSPLNDNVEAARRVIQDLAKRGWEIEA

SEQ ID NO: 38698 - protein, 260 aa, Arabidopsis thaliana
  peptide (1)..(260): Ceres Seq. ID no. 12395357
  misc_feature (1)..(253): Pfam Name: Protein of unknown function (DUF1022) Pfam Description: Protein of unknown function (DUF1022)
  misc_feature (1)..(256): Homolog of NCBI NO: 15892085 NR Description: unknown [Rickettsia conorii]
  misc_feature (39)..(258): Homolog of NCBI NO: 16127081 NR Description: conserved hypothetical protein [Caulobacter
  misc_feature (1)..(28): Homolog of NCBI NO: 22968024 NR Description: hypothetical protein [Rhodospirillum rubrum]
  misc_feature (40)..(254): Homolog of NCBI NO: 22968024 NR Description: hypothetical protein [Rhodospirillum rubrum]
  misc_feature (1)..(23): Homolog of NCBI NO: 38346329 NR Description: OJ000126_13.11 [Oryza sativa (japonica
  misc_feature (58)..(260): Homolog of NCBI NO: 38346329 NR Description: OJ000126_13.11 [Oryza sativa (japonica
  misc_feature (1)..(260): Homolog of NCBI NO: 9757815 NR Description: gene_id:MWD9.14~similar to unknown
  misc_feature (1)..(260): Homolog of NCBI NO: 18420465 NR Description: putative protein
  misc_feature (1)..(228): Homolog of NCBI NO: 9759316 NR Description: gene_id:MBL20.6~similar to unknown
  misc_feature (1)..(260): Homolog of NCBI NO: 18415120 NR Description: putative protein
MENVFVVQVQHPRSHLERFDLVITPQHDYFSLTPEGKRQIPFFLRPWVTPREHPGRNVFLTTGALHYADASTLRNATSEWKNEFASLPKPLVVVNIGGPTRNCLYGVDLAKQLCGMLQSILWSCGSLRISFSRRTPKKVVEVITGELSSNSKVYIWDGKDPNPHLGHLALANTFIITADSISMLSEACSTGKPVYVVGAERCTWKFSDFQKTLHGRGAVRPLTGKEDMCEKWSYSPLNDNVEAARRVIQDLAKRGWEIEA

SEQ ID NO: 38699 - DNA, 1164 bp, Arabidopsis thaliana
  misc_feature (1)..(1164): Ceres Seq. ID no. 12559029
  misc_feature: MA Experiment ID: 108434 Result: Down-regulated in Transcription
  misc_feature: MA Experiment 108434 PARAMETER Experiment Name: At_Root_Tips_cDNA_P Parameter: Tissue Value: Root Tips
  misc_feature: MA Experiment ID: 108435 Result: Down-regulated in Transcription
  misc_feature: MA Experiment 108435 PARAMETER Experiment Name: At_stm_Mutants_cDNA_P Parameter: Plant Line Value: wt Landsburg vs stm
  misc_feature: MA Experiment 108435 PARAMETER Experiment Name: At_stm_Mutants_cDNA_P Parameter: Tissue Value: Shoot Apical Meristem Region
  misc_feature: MA Experiment ID: 108462 Result: Up-regulated in Transcription
  misc_feature: MA Experiment 108462 PARAMETER Experiment Name: At_Germinating_Seeds_cDNA_P Parameter: Age (day) Value: 2 vs. 0
  misc_feature: MA Experiment 108462 PARAMETER Experiment Name: At_Germinating_Seeds_cDNA_P Parameter: Tissue Value: Germinating Seeds
  misc_feature: MA Experiment ID: 108463 Result: Up-regulated in Transcription
  misc_feature: MA Experiment 108463 PARAMETER Experiment Name: At_Germinating_Seeds_cDNA_P Parameter: Age (day) Value: 3 vs. 0
  misc_feature: MA Experiment 108463 PARAMETER Experiment Name: At_Germinating_Seeds_cDNA_P Parameter: Tissue Value: Germinating Seeds
  misc_feature: MA Experiment ID: 108464 Result: Up-regulated in Transcription
  misc_feature: MA Experiment 108464 PARAMETER Experiment Name: At_Germinating_Seeds_cDNA_P Parameter: Age (day) Value: 4 vs. 0
  misc_feature: MA Experiment 108464 PARAMETER Experiment Name: At_Germinating_Seeds_cDNA_P Parameter: Tissue Value: Germinating Seeds
  misc_feature: MA Experiment ID: 108561 Result: Down-regulated in Transcription
  misc_feature: MA Experiment 108561 PARAMETER Experiment Name: At_100uM_ABA_cDNA_P Parameter: Timepoint (hr) Value: 6
  misc_feature: MA Experiment 108561 PARAMETER Experiment Name: At_100uM_ABA_cDNA_P Parameter: Tissue Value: Aerial
  misc_feature: MA Experiment 108561 PARAMETER Experiment Name: At_100uM_ABA_cDNA_P Parameter: Treatment Value: 100uM ABA vs. No Treatment
  misc_feature: MA Experiment ID: 20000071 Result: Down-regulated in Transcription
  misc_feature: MA Experiment 20000071 PARAMETER Experiment Name: At_100uM_ABA_Mutants_cDNA_P Parameter: Plant Line Value: CS8104
  misc_feature: MA Experiment 20000071 PARAMETER Experiment Name: At_100uM_ABA_Mutants_cDNA_P Parameter: Timepoint (hr) Value: 6
  misc_feature: MA Experiment 20000071 PARAMETER Experiment Name: At_100uM_ABA_Mutants_cDNA_P Parameter: Tissue Value: Aerial
  misc_feature: MA Experiment 20000071 PARAMETER Experiment Name: At_100uM_ABA_Mutants_cDNA_P Parameter: Treatment Value: 100uM ABA vs. No Treatment
  misc_feature: MA Experiment ID: 20000086 Result: Down-regulated in Transcription
  misc_feature: MA Experiment 20000086 PARAMETER Experiment Name: At_100uM_ABA_Mutants_cDNA_P Parameter: Plant Line Value: CS22
  misc_feature: MA Experiment 20000086 PARAMETER Experiment Name: At_100uM_ABA_Mutants_cDNA_P Parameter: Timepoint (hr) Value: 6
  misc_feature: MA Experiment 20000086 PARAMETER Experiment Name: At_100uM_ABA_Mutants_cDNA_P Parameter: Tissue Value: Aerial
  misc_feature: MA Experiment 20000086 PARAMETER Experiment Name: At_100uM_ABA_Mutants_cDNA_P Parameter: Treatment Value: 100uM ABA vs. No Treatment
  misc_feature: MA Experiment ID: 20000087 Result: Down-regulated in Transcription
  misc_feature: MA Experiment 20000087 PARAMETER Experiment Name: At_100uM_ABA_Mutants_cDNA_P Parameter: Plant Line Value: WS
  misc_feature: MA Experiment 20000087 PARAMETER Experiment Name: At_100uM_ABA_Mutants_cDNA_P Parameter: Timepoint (hr) Value: 6
  misc_feature: MA Experiment 20000087 PARAMETER Experiment Name: At_100uM_ABA_Mutants_cDNA_P Parameter: Tissue Value: Aerial
  misc_feature: MA Experiment 20000087 PARAMETER Experiment Name: At_100uM_ABA_Mutants_cDNA_P Parameter: Treatment Value: 100uM ABA vs. No Treatment
  misc_feature: MA Experiment ID: 20000113 Result: Up-regulated in Transcription
  misc_feature: MA Experiment 20000113 PARAMETER Experiment Name: At_42deg_Heat_cDNA_P Parameter: Temperature (deg C) Value: 42 vs. 22
  misc_feature: MA Experiment 20000113 PARAMETER Experiment Name: At_42deg_Heat_cDNA_P Parameter: Timepoint (hr) Value: 8
  misc_feature: MA Experiment 20000113 PARAMETER Experiment Name: At_42deg_Heat_cDNA_P Parameter: Tissue Value: Aerial
  misc_feature: MA Experiment ID: 20000144 Result: Down-regulated in Transcription
  misc_feature: MA Experiment 20000144 PARAMETER Experiment Name: At_42deg_Heat_cDNA_P Parameter: Temperature (deg C) Value: 42 vs. 22
  misc_feature: MA Experiment 20000144 PARAMETER Experiment Name: At_42deg_Heat_cDNA_P Parameter: Timepoint (hr) Value: 1
  misc_feature: MA Experiment 20000144 PARAMETER Experiment Name: At_42deg_Heat_cDNA_P Parameter: Tissue Value: Aerial
  misc_feature: MA Experiment ID: 20000184 Result: Up-regulated in Transcription
  misc_feature: MA Experiment 20000184 PARAMETER Experiment Name: At_Shoots__P Parameter: Age (day) Value: 7
  misc_feature: MA Experiment 20000184 PARAMETER Experiment Name: At_Shoots__P Parameter: Tissue Value: Shoots vs. Whole Plant
  misc_feature: MA Experiment ID: 20000264 Result: Down-regulated in Transcription
  misc_feature: MA Experiment 20000264 PARAMETER Experiment Name: At_Open_Flower_P Parameter: Age (day) Value: 21
  misc_feature: MA Experiment 20000264 PARAMETER Experiment Name: At_Open_Flower_P Parameter: Plant Line Value: WS
  misc_feature: MA Experiment 20000264 PARAMETER Experiment Name: At_Open_Flower_P Parameter: Tissue Value: Open Flower vs. Whole Plant
  misc_feature: MA Experiment ID: 20000268 Result: Down-regulated in Transcription
  misc_feature: MA Experiment 20000268 PARAMETER Experiment Name: At_100mM_NaCl__P Parameter: Age (day) Value: 14
  misc_feature: MA Experiment 20000268 PARAMETER Experiment Name: At_100mM_NaCl__P Parameter: Organism Value: A. thaliana
  misc_feature: MA Experiment 20000268 PARAMETER Experiment Name: At_100mM_NaCl__P Parameter: Plant Line Value: WS
  misc_feature: MA Experiment 20000268 PARAMETER Experiment Name: At_100mM_NaCl__P Parameter: Timepoint (hr) Value: 6
  misc_feature: MA Experiment 20000268 PARAMETER Experiment Name: At_100mM_NaCl__P Parameter: Tissue Value: Whole Plant
  misc_feature: MA Experiment 20000268 PARAMETER Experiment Name: At_100mM_NaCl__P Parameter: Treatment Value: 100mM NaCl vs. No Treatment
  misc_feature: MA Experiment ID: 20000288 Result: Down-regulated in Transcription
  misc_feature: MA Experiment 20000288 PARAMETER Experiment Name: At_Drought_P Parameter: Age (day) Value: 7
  misc_feature: MA Experiment 20000288 PARAMETER Experiment Name: At_Drought_P Parameter: Organism Value: A. thaliana
  misc_feature: MA Experiment 20000288 PARAMETER Experiment Name: At_Drought_P Parameter: Plant Line Value: WS
  misc_feature: MA Experiment 20000288 PARAMETER Experiment Name: At_Drought_P Parameter: Timepoint (hr) Value: 1
  misc_feature: MA Experiment 20000288 PARAMETER Experiment Name: At_Drought_P Parameter: Tissue Value: Whole Plant
  misc_feature: MA Experiment 20000288 PARAMETER Experiment Name: At_Drought_P Parameter: Treatment Value: Drought vs. No Drought
  misc_feature: MA Experiment ID: 20000441 Result: Up-regulated in Transcription
  misc_feature: MA Experiment 20000441 PARAMETER Experiment Name: At_1uM_BR-BRZ__P Parameter: Tissue Value: Shoot Apices
  misc_feature: MA Experiment 20000441 PARAMETER Experiment Name: At_1uM_BR-BRZ__P Parameter: Treatment Value: 1uM BR vs. No Treatment
  misc_feature: MA Experiment ID: 20000460 Result: Up-regulated in Transcription
  misc_feature: MA Experiment 20000460 PARAMETER Experiment Name: At_10percent_PEG_P Parameter: Age (day) Value: 12
  misc_feature: MA Experiment 20000460 PARAMETER Experiment Name: At_10percent_PEG_P Parameter: Organism Value: A. thaliana
  misc_feature: MA Experiment 20000460 PARAMETER Experiment Name: At_10percent_PEG_P Parameter: Plant Line Value: WS
  misc_feature: MA Experiment 20000460 PARAMETER Experiment Name: At_10percent_PEG_P Parameter: Timepoint (day) Value: 12
  misc_feature: MA Experiment 20000460 PARAMETER Experiment Name: At_10percent_PEG_P Parameter: Tissue Value: Whole Plant
  misc_feature: MA Experiment 20000460 PARAMETER Experiment Name: At_10percent_PEG_P Parameter: Treatment Value: 10percent PEG vs. No Treatment
  misc_feature: MA Experiment ID: 20000495 Result: Down-regulated in Transcription
  misc_feature: MA Experiment 20000495 PARAMETER Experiment Name: At_Guard_Cells_P Parameter: Harvest Date Value: 8/2/2002
  misc_feature: MA Experiment 20000495 PARAMETER Experiment Name: At_Guard_Cells_P Parameter: Organism Value: A. thaliana
  misc_feature: MA Experiment 20000495 PARAMETER Experiment Name: At_Guard_Cells_P Parameter: Tissue Value: Guard Cells vs. Leaves
  misc_feature: MA Experiment ID: 20000527 Result: Up-regulated in Transcription
  misc_feature: MA Experiment 20000527 PARAMETER Experiment Name: At_10percent_PEG_P Parameter: Age (day) Value: 20
  misc_feature: MA Experiment 20000527 PARAMETER Experiment Name: At_10percent_PEG_P Parameter: Organism Value: A. thaliana
  misc_feature: MA Experiment 20000527 PARAMETER Experiment Name: At_10percent_PEG_P Parameter: Plant Line Value: WS
  misc_feature: MA Experiment 20000527 PARAMETER Experiment Name: At_10percent_PEG_P Parameter: Timepoint (day) Value: 20
  misc_feature: MA Experiment 20000527 PARAMETER Experiment Name: At_10percent_PEG_P Parameter: Tissue Value: Whole Plant
  misc_feature: MA Experiment 20000527 PARAMETER Experiment Name: At_10percent_PEG_P Parameter: Treatment Value: 10percent PEG vs. No Treatment
  misc_feature: MA Experiment ID: 20001247 Result: Up-regulated in Transcription
  misc_feature: MA Experiment 20001247 PARAMETER Experiment Name: At_Far-red-induction_P Parameter: Age (day) Value: 7
  misc_feature: MA Experiment 20001247 PARAMETER Experiment Name: At_Far-red-induction_P Parameter: Light Value: Far-red vs. White
  misc_feature: MA Experiment 20001247 PARAMETER Experiment Name: At_Far-red-induction_P Parameter: Organism Value: A. thaliana
  misc_feature: MA Experiment 20001247 PARAMETER Experiment Name: At_Far-red-induction_P Parameter: Plant Line Value: Columbia
  misc_feature: MA Experiment 20001247 PARAMETER Experiment Name: At_Far-red-induction_P Parameter: Timepoint (hr) Value: 1
  misc_feature: MA Experiment 20001247 PARAMETER Experiment Name: At_Far-red-induction_P Parameter: Tissue Value: Whole Plant
  misc_feature: MA Experiment ID: 20001450 Result: Up-regulated in Transcription
  misc_feature: MA Experiment 20001450 PARAMETER Experiment Name: At_Far-red-induction_P Parameter: Age (day) Value: 7
  misc_feature: MA Experiment 20001450 PARAMETER Experiment Name: At_Far-red-induction_P Parameter: Light Value: Far-red vs. White
  misc_feature: MA Experiment 20001450 PARAMETER Experiment Name: At_Far-red-induction_P Parameter: Organism Value: A. thaliana
  misc_feature: MA Experiment 20001450 PARAMETER Experiment Name: At_Far-red-induction_P Parameter: Plant Line Value: Columbia
  misc_feature: MA Experiment 20001450 PARAMETER Experiment Name: At_Far-red-induction_P Parameter: Timepoint (hr) Value: 8
  misc_feature: MA Experiment 20001450 PARAMETER Experiment Name: At_Far-red-induction_P Parameter: Tissue Value: Whole Plant
  misc_feature: MA Experiment ID: 20001557 Result: Up-regulated in Transcription
  misc_feature: MA Experiment 20001557 PARAMETER Experiment Name: At_Drought_Soil_Dry_P Parameter: Age (day) Value: 27
  misc_feature: MA Experiment 20001557 PARAMETER Experiment Name: At_Drought_Soil_Dry_P Parameter: Organism Value: A. thaliana
  misc_feature: MA Experiment 20001557 PARAMETER Experiment Name: At_Drought_Soil_Dry_P Parameter: Plant Line Value: WS
  misc_feature: MA Experiment 20001557 PARAMETER Experiment Name: At_Drought_Soil_Dry_P Parameter: Post Timepoint (hr) Value: 3
  misc_feature: MA Experiment 20001557 PARAMETER Experiment Name: At_Drought_Soil_Dry_P Parameter: Post-Treatment Value: Re-Water vs. No Drought
  misc_feature: MA Experiment 20001557 PARAMETER Experiment Name: At_Drought_Soil_Dry_P Parameter: Timepoint (day) Value: 13
  misc_feature: MA Experiment 20001557 PARAMETER Experiment Name: At_Drought_Soil_Dry_P Parameter: Treatment Value: Drought vs. No Drought
  misc_feature: MA Experiment ID: 20001558 Result: Up-regulated in Transcription
  misc_feature: MA Experiment 20001558 PARAMETER Experiment Name: At_Drought_Soil_Dry_P Parameter: Age (day) Value: 27
  misc_feature: MA Experiment 20001558 PARAMETER Experiment Name: At_Drought_Soil_Dry_P Parameter: Organism Value: A. thaliana
  misc_feature: MA Experiment 20001558 PARAMETER Experiment Name: At_Drought_Soil_Dry_P Parameter: Plant Line Value: WS
  misc_feature: MA Experiment 20001558 PARAMETER Experiment Name: At_Drought_Soil_Dry_P Parameter: Post Timepoint (hr) Value: 6
  misc_feature: MA Experiment 20001558 PARAMETER Experiment Name: At_Drought_Soil_Dry_P Parameter: Post-Treatment Value: Re-Water vs. No Drought
  misc_feature: MA Experiment 20001558 PARAMETER Experiment Name: At_Drought_Soil_Dry_P Parameter: Timepoint (day) Value: 13
  misc_feature: MA Experiment 20001558 PARAMETER Experiment Name: At_Drought_Soil_Dry_P Parameter: Treatment Value: Drought vs. No Drought
  misc_feature: MA Experiment ID: 20001774 Result: Down-regulated in Transcription
  misc_feature: MA Experiment 20001774 PARAMETER Experiment Name: At_Far-red-enriched-adult_P Parameter: Age (day) Value: 31
  misc_feature: MA Experiment 20001774 PARAMETER Experiment Name: At_Far-red-enriched-adult_P Parameter: Light Value: Far-red enriched vs. White
  misc_feature: MA Experiment 20001774 PARAMETER Experiment Name: At_Far-red-enriched-adult_P Parameter: Organism Value: A. thaliana
  misc_feature: MA Experiment 20001774 PARAMETER Experiment Name: At_Far-red-enriched-adult_P Parameter: Plant Line Value: Columbia
  misc_feature: MA Experiment 20001774 PARAMETER Experiment Name: At_Far-red-enriched-adult_P Parameter: Timepoint (hr) Value: 72
  misc_feature: MA Experiment 20001774 PARAMETER Experiment Name: At_Far-red-enriched-adult_P Parameter: Tissue Value: Aerial
  misc_feature: MA Experiment ID: 20001904 Result: Down-regulated in Transcription
  misc_feature: MA Experiment 20001904 PARAMETER Experiment Name: At_Drought_Reproduction_P Parameter: Age (day) Value: 37
  misc_feature: MA Experiment 20001904 PARAMETER Experiment Name: At_Drought_Reproduction_P Parameter: Organism Value: A. thaliana
  misc_feature: MA Experiment 20001904 PARAMETER Experiment Name: At_Drought_Reproduction_P Parameter: Plant Line Value: WS
  misc_feature: MA Experiment 20001904 PARAMETER Experiment Name: At_Drought_Reproduction_P Parameter: Timepoint (day) Value: 7
  misc_feature: MA Experiment 20001904 PARAMETER Experiment Name: At_Drought_Reproduction_P Parameter: Tissue Value: Rosettes
  misc_feature: MA Experiment 20001904 PARAMETER Experiment Name: At_Drought_Reproduction_P Parameter: Treatment Value: Drought vs. No Drought
atcaaaaaatctctatccatccacaacaacaacaaaaactcaagaacaatatctccacttgatcactaccacattgtccaatcactctacaaagcctgtacgtacacaacaacattaccatggtgaaacaagaacgcaagatccaaaccagcagcacaaaaaaggaaatgcctttgtcatcatcaccatcttcttcttcttcttcatcttcttcctcgtcttcgtcttcgtgtaagaacaagaacaagaagagtaagattaagaagtacaaaggagtgaggatgagaagttggggatcatgggtctctgagattagggcaccaaatcaaaagacaaggatttggttaggttcttactcaacagctgaagcagctgctagagcttacgatgttgcactcttatgtctcaaaggccctcaagccaatctcaacttccctacttcttcttcttctcatcatcttcttgataatctcttagatgaaaatacccttttgtcccccaaatccatccaaagagtagctgctcaagctgccaactcatttaaccattttgcccctacttcatcagccgtctcgtcaccgtccgatcatgatcatcaccatgatgatgggatgcaatctttgatgggatcttttgtggacaatcatgtgtctttgatggattcaacatcttcatggtatgatgatcataatgggatgttcttgtttgataatggagctccattcaattactctcctcaactaaactcgacgacgatgctcgatgaatacttctacgaagatgctgacattccgctttggagtttcaattaatccgacggtccataatacatactttaattagttttctaaatcattttttaaattcttttttatatatgtaacatatatttaccctcgtcgtaattattcatttccaagttgtttgttgcttggagagaattgacgacggatacgattatataatataattgtaagtttttatatgtagcaaactcggtacaattcggatttaatagggatctaggaagttcacatgaacaagcgactcttttttttgtcacttctttgactttttcatgtgaggtttcttttcatcaattttttttaacaatgtgtgaaaatatttctgtattgtaatgatatatttcgcacaatagttttg

SEQ ID NO: 38700 - protein, 230 aa, Arabidopsis thaliana
  peptide (1)..(230): Ceres Seq. ID no. 12559030
  misc_feature (47)..(111): Pfam Name: AP2 domain Pfam Description: AP2 domain
  misc_feature (20)..(158): Homolog of NCBI NO: 38605845 NR Description: OSJNBb0034G17.3 [Oryza sativa (japonica
  misc_feature (13)..(155): Homolog of NCBI NO: 15239113 NR Description: transcription factor TINY, putative; protein id:
  misc_feature (20)..(152): Homolog of NCBI NO: 38605848 NR Description: OSJNBb0034G17.6 [Oryza sativa (japonica
  misc_feature (1)..(197): Homolog of NCBI NO: 15232340 NR Description: transcription factor - like protein; protein id:
  misc_feature (10)..(163): Homolog of NCBI NO: 14140163 NR Description: putative AP2 domain containing protein [Oryza
  misc_feature (47)..(142): Homolog of NCBI NO: 34902130 NR Description: hypothetical protein [Oryza sativa (japonica
  misc_feature (13)..(229): Homolog of NCBI NO: 15219452 NR Description: transcription factor, putative; protein id:
  misc_feature (1)..(191): Homolog of NCBI NO: 15224024 NR Description: hypothetical protein; protein id: At1g77640.1
  misc_feature (1)..(230): Homolog of NCBI NO: 21554056 NR Description: TINY-like protein [Arabidopsis thaliana]
  misc_feature (1)..(230): Homolog of NCBI NO: 15219139 NR Description: TINY-like protein
MVKQERKIQTSSTKKEMPLSSSPSSSSSSSSSSSSSSCKNKNKKSKIKKYKGVRMRSWGSWVSEIRAPNQKTRIWLGSYSTAEAAARAYDVALLCLKGPQANLNFPTSSSSHHLLDNLLDENTLLSPKSIQRVAAQAANSFNHFAPTSSAVSSPSDHDHHHDDGMQSLMGSFVDNHVSLMDSTSSWYDDHNGMFLFDNGAPFNYSPQLNSTTMLDEYFYEDADIPLWSFN

SEQ ID NO: 38701 - protein, 214 aa, Arabidopsis thaliana
  peptide (1)..(214): Ceres Seq. ID no. 12559031
  misc_feature (31)..(95): Pfam Name: AP2 domain Pfam Description: AP2 domain
  misc_feature (4)..(142): Homolog of NCBI NO: 38605845 NR Description: OSJNBb0034G17.3 [Oryza sativa (japonica
  misc_feature (1)..(139): Homolog of NCBI NO: 15239113 NR Description: transcription factor TINY, putative; protein id:
  misc_feature (4)..(136): Homolog of NCBI NO: 38605848 NR Description: OSJNBb0034G17.6 [Oryza sativa (japonica
  misc_feature (1)..(181): Homolog of NCBI NO: 15232340 NR Description: transcription factor - like protein; protein id:
  misc_feature (1)..(147): Homolog of NCBI NO: 14140163 NR Description: putative AP2 domain containing protein [Oryza
  misc_feature (31)..(126): Homolog of NCBI NO: 34902130 NR Description: hypothetical protein [Oryza sativa (japonica
  misc_feature (1)..(213): Homolog of NCBI NO: 15219452 NR Description: transcription factor, putative; protein id:
  misc_feature (1)..(175): Homolog of NCBI NO: 15224024 NR Description: hypothetical protein; protein id: At1g77640.1
  misc_feature (1)..(214): Homolog of NCBI NO: 21554056 NR Description: TINY-like protein [Arabidopsis thaliana]
  misc_feature (1)..(214): Homolog of NCBI NO: 15219139 NR Description: TINY-like protein
MPLSSSPSSSSSSSSSSSSSSCKNKNKKSKIKKYKGVRMRSWGSWVSEIRAPNQKTRIWLGSYSTAEAAARAYDVALLCLKGPQANLNFPTSSSSHHLLDNLLDENTLLSPKSIQRVAAQAANSFNHFAPTSSAVSSPSDHDHHHDDGMQSLMGSFVDNHVSLMDSTSSWYDDHNGMFLFDNGAPFNYSPQLNSTTMLDEYFYEDADIPLWSFN

SEQ ID NO: 38702 - protein, 176 aa, Arabidopsis thaliana; identical to SEQ ID NO: 30986
  peptide (1)..(176): Ceres Seq. ID no. 12559032
  misc_feature (1)..(57): Pfam Name: AP2 domain Pfam Description: AP2 domain
  misc_feature (1)..(104): Homolog of NCBI NO: 38605845 NR Description: OSJNBb0034G17.3 [Oryza sativa (japonica
  misc_feature (1)..(101): Homolog of NCBI NO: 15239113 NR Description: transcription factor TINY, putative; protein id:
  misc_feature (1)..(98): Homolog of NCBI NO: 38605848 NR Description: OSJNBb0034G17.6 [Oryza sativa (japonica
  misc_feature (1)..(143): Homolog of NCBI NO: 15232340 NR Description: transcription factor - like protein; protein id:
  misc_feature (1)..(109): Homolog of NCBI NO: 14140163 NR Description: putative AP2 domain containing protein [Oryza
  misc_feature (1)..(88): Homolog of NCBI NO: 34902130 NR Description: hypothetical protein [Oryza sativa (japonica
  misc_feature (1)..(175): Homolog of NCBI NO: 15219452 NR Description: transcription factor, putative; protein id:
  misc_feature (1)..(137): Homolog of NCBI NO: 15224024 NR Description: hypothetical protein; protein id: At1g77640.1
  misc_feature (1)..(176): Homolog of NCBI NO: 21554056 NR Description: TINY-like protein [Arabidopsis thaliana]
  misc_feature (1)..(176): Homolog of NCBI NO: 15219139 NR Description: TINY-like protein

SEQ ID NO: 38703 - DNA, 1889 bp, Arabidopsis thaliana
  misc_feature (1)..(1889): Ceres Seq. ID no. 13488816
  misc_feature: MA Experiment ID: 108461 Result: Down-regulated in Transcription
  misc_feature: MA Experiment 108461 PARAMETER Experiment Name: At_Germinating_Seeds_cDNA_P Parameter: Age (day) Value: 1 vs. 0
  misc_feature: MA Experiment 108461 PARAMETER Experiment Name: At_Germinating_Seeds_cDNA_P Parameter: Tissue Value: Germinating Seeds
  misc_feature: MA Experiment ID: 108561 Result: Up-regulated in Transcription
  misc_feature: MA Experiment 108561 PARAMETER Experiment Name: At_100uM_ABA_cDNA_P Parameter: Timepoint (hr) Value: 6
  misc_feature: MA Experiment 108561 PARAMETER Experiment Name: At_100uM_ABA_cDNA_P Parameter: Tissue Value: Aerial
  misc_feature: MA Experiment 108561 PARAMETER Experiment Name: At_100uM_ABA_cDNA_P Parameter: Treatment Value: 100uM ABA vs. No Treatment
  misc_feature: MA Experiment ID: 108573 Result: Up-regulated in Transcription
  misc_feature: MA Experiment 108573 PARAMETER Experiment Name: At_Drought_cDNA_P Parameter: Timepoint (hr) Value: 6
  misc_feature: MA Experiment 108573 PARAMETER Experiment Name: At_Drought_cDNA_P Parameter: Tissue Value: Aerial
  misc_feature: MA Experiment 108573 PARAMETER Experiment Name: At_Drought_cDNA_P Parameter: Treatment Value: Drought vs. No Drought
  misc_feature: MA Experiment ID: 108574 Result: Up-regulated in Transcription
  misc_feature: MA Experiment 108574 PARAMETER Experiment Name: At_Wounding__cDNA_P Parameter: Timepoint (hr) Value: 1
  misc_feature: MA Experiment 108574 PARAMETER Experiment Name: At_Wounding__cDNA_P Parameter: Tissue Value: Aerial
  misc_feature: MA Experiment 108574 PARAMETER Experiment Name: At_Wounding__cDNA_P Parameter: Treatment Value: Wounding vs. No Wounding
  misc_feature: MA Experiment ID: 20000173 Result: Down-regulated in Transcription
  misc_feature: MA Experiment 20000173 PARAMETER Experiment Name: At_42deg_Heat_P Parameter: Age (day) Value: 14
  misc_feature: MA Experiment 20000173 PARAMETER Experiment Name: At_42deg_Heat_P Parameter: Organism Value: A. thaliana
  misc_feature: MA Experiment 20000173 PARAMETER Experiment Name: At_42deg_Heat_P Parameter: Plant Line Value: WS
  misc_feature: MA Experiment 20000173 PARAMETER Experiment Name: At_42deg_Heat_P Parameter: Temperature (deg C) Value: 42 vs. 22
  misc_feature: MA Experiment 20000173 PARAMETER Experiment Name: At_42deg_Heat_P Parameter: Timepoint (hr) Value: 6
  misc_feature: MA Experiment 20000173 PARAMETER Experiment Name: At_42deg_Heat_P Parameter: Tissue Value: Aerial
  misc_feature: MA Experiment ID: 20000227 Result: Down-regulated in Transcription
  misc_feature: MA Experiment 20000227 PARAMETER Experiment Name: At_Root-Tips-vs-Tops_P Parameter: Tissue Value: Root Tips vs. Root Tops
  misc_feature: MA Experiment ID: 20001248 Result: Down-regulated in Transcription
  misc_feature: MA Experiment 20001248 PARAMETER Experiment Name: At_Far-red-induction_P Parameter: Age (day) Value: 7
  misc_feature: MA Experiment 20001248 PARAMETER Experiment Name: At_Far-red-induction_P Parameter: Light Value: Far-red vs. White
  misc_feature: MA Experiment 20001248 PARAMETER Experiment Name: At_Far-red-induction_P Parameter: Organism Value: A. thaliana
  misc_feature: MA Experiment 20001248 PARAMETER Experiment Name: At_Far-red-induction_P Parameter: Plant Line Value: Columbia
  misc_feature: MA Experiment 20001248 PARAMETER Experiment Name: At_Far-red-induction_P Parameter: Timepoint (hr) Value: 4
  misc_feature: MA Experiment 20001248 PARAMETER Experiment Name: At_Far-red-induction_P Parameter: Tissue Value: Whole Plant
atacaaaaacaaacccacaaagtctagctctctctctatatcggtgattcgaattttcagaaccgaaactccggcgaaaagattatggcgggacagtcacgaaaatggatgatactggtggcgacgatatggattcaagctttcaccgggacgaatttcgatttctcagcttactcgtcagatttgaaatcggttctagggatttcacaggtgcagctaaactacctcgccgtggcttcggatctcggaaaagtattcggatggtcgtcgggactagcgcttatgtatttcccgctttggacggtgcttttcgcggcggcgtttatgggattcgtcggttatggagttcagtggcttgtcatcactcatttcatctctttgccttatatcatggtgtttctctgttgcttacttgctggtttaagtatctgttggttcaacactgtctgctttgtgctctgcattagtaacttccctgcaaacagatcacttgctctttccctcacagtgagtttcaatggtgtaagcgctgctttatatactcttgcttacaacgcaatcaatccaacttctccagagctatatcttcttttgaacgctcttataccgctcattgtctctttcactgctatcatcccgattcttcgtcaaccgccttttgagcctcttccaccagatggagttcgtcgtgactctctcatgtttctattgctcaacatactcgctgctttaaacggtgtttatctccttctctttggatcaaactcctctgatttaacctctgctcgtctactctttggtggagcaatcctcctcttggtattccctttatgtattcccggtttagtcatcgcccggaattggtataaccgcacaatccacactagtttccgtctagaaggttctggtttcattcttgttgatcctgatgagcttgagttgcataaagggatgcttgcacatgaagcaaaccgtgaaggttatcaattgctgagtgacgatgtggtgcaaaacccggttaagtccgtagctgttgaggaagaggatagtgatgagtcatgttgcaagaaacttatcacaagagatcagcttgaaggtttggggattgaacattctttgtcgctgctcttaaccagatcagatttttggttatactatatcacgtacttctgcggtggaaccattggacttgtgtacagcaacaaccttggacagattgctcaatctttaggacaaagctcaaataccacaactcttgtcacactttattctgctttctcattctttggaagattgctttctgcaacaccagattatatccgagcgaaggtttattttgccagaaccgggtggttagcaatcgcgctattaccaacccccttcgcacttttcttgcttgcatcatcaggaactgcatcagcattacaagctggaacagcgctgatgggtttaagctccgggtttatctttgcagcagcggtttccatcacatcagagctttttggaccaaacagtgttggagttaaccacaatatcttaatcacaaacataccgataggatcattgatctatggattcttggctgcattggtctatgactcacatggtttcaccgggaccaaatcaatgacctcggagtcggtggtgtgtatgggacgagattgttattacttgacctttgtgtggtggggttgcttgtctcttcttgggctaggttcgagtcttgtgttgtttattagaactagacgagcttatcaacggtttgaacaagctcgtataagttcgaacatcaacgactcttagaaatttgcatcaaccccaacggtttgtgtatatgtaggatctaagttataacagacggattaatggtattttagtggattttggcc

SEQ ID NO: 38704 - protein, 572 aa, Arabidopsis thaliana
  peptide (1)..(572): Ceres Seq. ID no. 13488817
  misc_feature (344)..(508): Pfam Name: Sugar (and other) transporter Pfam Description: Sugar (and other) transporter
  misc_feature (6)..(298): Homolog of NCBI NO: 28393720 NR Description: unknown protein [Arabidopsis thaliana]
  misc_feature (6)..(298): Homolog of NCBI NO: 15232155 NR Description: expressed protein [Arabidopsis thaliana]
  misc_feature (174)..(565): Homolog of NCBI NO: 15232155 NR Description: expressed protein [Arabidopsis thaliana]
  misc_feature (5)..(256): Homolog of NCBI NO: 34907888 NR Description: P0031D02.33 [Oryza sativa (japonica
  misc_feature (277)..(567): Homolog of NCBI NO: 34907888 NR Description: P0031D02.33 [Oryza sativa (japonica
  misc_feature (291)..(566): Homolog of NCBI NO: 15222361 NR Description: expressed protein [Arabidopsis thaliana]
  misc_feature (1)..(313): Homolog of NCBI NO: 15222361 NR Description: expressed protein [Arabidopsis thaliana]
  misc_feature (142)..(572): Homolog of NCBI NO: 7487718 NR Description: hypothetical protein T5K18.230 - Arabidopsis
  misc_feature (1)..(572): Homolog of NCBI NO: 21536488 NR Description: unknown [Arabidopsis thaliana]
  misc_feature (1)..(572): Homolog of NCBI NO: 18415316 NR Description: expressed protein [Arabidopsis thaliana]
MAGQSRKWMILVATIWIQAFTGTNFDFSAYSSDLKSVLGISQVQLNYLAVASDLGKVFGWSSGLALMYFPLWTVLFAAAFMGFVGYGVQWLVITHFISLPYIMVFLCCLLAGLSICWFNTVCFVLCISNFPANRSLALSLTVSFNGVSAALYTLAYNAINPTSPELYLLLNALIPLIVSFTAIIPILRQPPFEPLPPDGVRRDSLMFLLLNILAALNGVYLLLFGSNSSDLTSARLLFGGAILLLVFPLCIPGLVIARNWYNRTIHTSFRLEGSGFILVDPDELELHKGMLAHEANREGYQLLSDDVVQNPVKSVAVEEEDSDESCCKKLITRDQLEGLGIEHSLSLLLTRSDFWLYYITYFCGGTIGLVYSNNLGQIAQSLGQSSNTTTLVTLYSAFSFFGRLLSATPDYIRAKVYFARTGWLAIALLPTPFALFLLASSGTASALQAGTALMGLSSGFIFAAAVSITSELFGPNSVGVNHNILITNIPIGSLIYGFLAALVYDSHGFTGTKSMTSESVVCMGRDCYYLTFVWWGCLSLLGLGSSLVLFIRTRRAYQRFEQARISSNINDS

SEQ ID NO: 38705 - protein, 564 aa, Arabidopsis thaliana
  peptide (1)..(564): Ceres Seq. ID no. 13488818
  misc_feature (336)..(500): Pfam Name: Sugar (and other) transporter Pfam Description: Sugar (and other) transporter
  misc_feature (1)..(290): Homolog of NCBI NO: 28393720 NR Description: unknown protein [Arabidopsis thaliana]
  misc_feature (1)..(290): Homolog of NCBI NO: 15232155 NR Description: expressed protein [Arabidopsis thaliana]
  misc_feature (166)..(557): Homolog of NCBI NO: 15232155 NR Description: expressed protein [Arabidopsis thaliana]
  misc_feature (1)..(248): Homolog of NCBI NO: 34907888 NR Description: P0031D02.33 [Oryza sativa (japonica
  misc_feature (269)..(559): Homolog of NCBI NO: 34907888 NR Description: P0031D02.33 [Oryza sativa (japonica
  misc_feature (283)..(558): Homolog of NCBI NO: 15222361 NR Description: expressed protein [Arabidopsis thaliana]
  misc_feature (1)..(305): Homolog of NCBI NO: 15222361 NR Description: expressed protein [Arabidopsis thaliana]
  misc_feature (134)..(564): Homolog of NCBI NO: 7487718 NR Description: hypothetical protein T5K18.230 - Arabidopsis
  misc_feature (1)..(564): Homolog of NCBI NO: 21536488 NR Description: unknown [Arabidopsis thaliana]
  misc_feature (1)..(564): Homolog of NCBI NO: 18415316 NR Description: expressed protein [Arabidopsis thaliana]
MILVATIWIQAFTGTNFDFSAYSSDLKSVLGISQVQLNYLAVASDLGKVFGWSSGLALMYFPLWTVLFAAAFMGFVGYGVQWLVITHFISLPYIMVFLCCLLAGLSICWFNTVCFVLCISNFPANRSLALSLTVSFNGVSAALYTLAYNAINPTSPELYLLLNALIPLIVSFTAIIPILRQPPFEPLPPDGVRRDSLMFLLLNILAALNGVYLLLFGSNSSDLTSARLLFGGAILLLVFPLCIPGLVIARNWYNRTIHTSFRLEGSGFILVDPDELELHKGMLAHEANREGYQLLSDDVVQNPVKSVAVEEEDSDESCCKKLITRDQLEGLGIEHSLSLLLTRSDFWLYYITYFCGGTIGLVYSNNLGQIAQSLGQSSNTTTLVTLYSAFSFFGRLLSATPDYIRAKVYFARTGWLAIALLPTPFALFLLASSGTASALQAGTALMGLSSGFIFAAAVSITSELFGPNSVGVNHNILITNIPIGSLIYGFLAALVYDSHGFTGTKSMTSESVVCMGRDCYYLTFVWWGCLSLLGLGSSLVLFIRTRRAYQRFEQARISSNINDS

SEQ ID NO: 38706 - protein, 506 aa, Arabidopsis thaliana
  peptide (1)..(506): Ceres Seq. ID no. 13488819
  misc_feature (278)..(442): Pfam Name: Sugar (and other) transporter Pfam Description: Sugar (and other) transporter
  misc_feature (1)..(232): Homolog of NCBI NO: 28393720 NR Description: unknown protein [Arabidopsis thaliana]
  misc_feature (1)..(232): Homolog of NCBI NO: 15232155 NR Description: expressed protein [Arabidopsis thaliana]
  misc_feature (108)..(499): Homolog of NCBI NO: 15232155 NR Description: expressed protein [Arabidopsis thaliana]
  misc_feature (1)..(190): Homolog of NCBI NO: 34907888 NR Description: P0031D02.33 [Oryza sativa (japonica
  misc_feature (211)..(501): Homolog of NCBI NO: 34907888 NR Description: P0031D02.33 [Oryza sativa (japonica
  misc_feature (225)..(500): Homolog of NCBI NO: 15222361 NR Description: expressed protein [Arabidopsis thaliana]
  misc_feature (1)..(247): Homolog of NCBI NO: 15222361 NR Description: expressed protein [Arabidopsis thaliana]
  misc_feature (76)..(506): Homolog of NCBI NO: 7487718 NR Description: hypothetical protein T5K18.230 - Arabidopsis
  misc_feature (1)..(506): Homolog of NCBI NO: 21536488 NR Description: unknown [Arabidopsis thaliana]
  misc_feature (1)..(506): Homolog of NCBI NO: 18415316 NR Description: expressed protein [Arabidopsis thaliana]
MYFPLWTVLFAAAFMGFVGYGVQWLVITHFISLPYIMVFLCCLLAGLSICWFNTVCFVLCISNFPANRSLALSLTVSFNGVSAALYTLAYNAINPTSPELYLLLNALIPLIVSFTAIIPILRQPPFEPLPPDGVRRDSLMFLLLNILAALNGVYLLLFGSNSSDLTSARLLFGGAILLLVFPLCIPGLVIARNWYNRTIHTSFRLEGSGFILVDPDELELHKGMLAHEANREGYQLLSDDVVQNPVKSVAVEEEDSDESCCKKLITRDQLEGLGIEHSLSLLLTRSDFWLYYITYFCGGTIGLVYSNNLGQIAQSLGQSSNTTTLVTLYSAFSFFGRLLSATPDYIRAKVYFARTGWLAIALLPTPFALFLLASSGTASALQAGTALMGLSSGFIFAAAVSITSELFGPNSVGVNHNILITNIPIGSLIYGFLAALVYDSHGFTGTKSMTSESVVCMGRDCYYLTFVWWGCLSLLGLGSSLVLFIRTRRAYQRFEQARISSNINDS

SEQ ID NO: 38707 - DNA, 1751 bp, Arabidopsis thaliana
  misc_feature (1)..(1751): Ceres Seq. ID no. 12727312
  misc_feature: MA Experiment ID: 20000184 Result: Down-regulated in Transcription
  misc_feature: MA Experiment 20000184 PARAMETER Experiment Name: At_Shoots__P Parameter: Age (day) Value: 7
  misc_feature: MA Experiment 20000184 PARAMETER Experiment Name: At_Shoots__P Parameter: Tissue Value: Shoots vs. Whole Plant
  misc_feature: Phenotype: WHOLE PLANT Size-Small
  misc_feature: Phenotype: FERTILITY Fertility-Sterile
  misc_feature: Phenotype: SENESCENCE TIME Senescence Time-Late Senescence
  misc_feature: Phenotype: WHOLE PLANT Size-Small
  misc_feature: Phenotype: INFLORESCENCE Height-Short
  misc_feature: Phenotype: FERTILITY Fertility-Sterile
  misc_feature: Phenotype: WHOLE PLANT Size-Small
  misc_feature: Phenotype: FERTILITY Fertility-Reduced
  misc_feature: Phenotype: SENESCENCE TIME Senescence Time-Late Senescence
  misc_feature: Phenotype: SILIQUES Shape-Clubbed
  misc_feature: Phenotype: SENESCENCE TIME Senescence Time-Late Senescence
  misc_feature: Phenotype: WHOLE PLANT Size-Small
  misc_feature: Phenotype: FERTILITY Fertility-Sterile
  misc_feature: Phenotype: SENESCENCE TIME Senescence Time-Late Senescence
  misc_feature: Phenotype: WHOLE PLANT Size-Small
  misc_feature: Phenotype: SENESCENCE TIME Senescence Time-Late Senescence
  misc_feature: Phenotype: WHOLE PLANT Size-Small
  misc_feature: Phenotype: SILIQUES Shape-Bent
  misc_feature: Phenotype: SILIQUES Shape-Clubbed
  misc_feature: Phenotype: FERTILITY Fertility-Reduced
gagtttgtttaggcaggggagattcttcttcattctcatcattatttctctattaatttcaccccaaaaaagaaaaaagaaaaattccaacaagaaaaaaaaaagaaaaagaaagttgattcttcgcttaggcttgaaatctctccaatccaaatctcaaattaaccttccatcgtcatctctttccctttttttttcccactttctttgcgaatcgcgagatctcggaatcgcatccttgattttgggatactgttttttttttttttaatcttgtttcattttcacgtgaaattcttagctgctagaactggacttgaatttcaacgagaattttggagattttttttttgtttgggtttttcctttctgttttgtgtgtttggaattagggttgtcgagcgagaatggacaagtacgagctggtgaaagacataggtgctgggaattttggagttgccaggctcatgaaggtcaaaaactctaaggaacttgttgccatgaagtacatcgagcgtggtcctaagattgatgagaatgtggcaagagagatcattaatcacagatcacttcgccatccgaatataatccggttcaaggaggtggtgttgactccaacccatcttgccattgccatggaatatgctgctggtggtgaactattcgagcgtatatgcagtgctggaagatttagtgaggatgaggcgagatatttcttccagcagcttatatcaggtgttagctattgccatgctatgcaaatatgccatagagatctgaagctcgagaatacgctcttggatggaagtcctgctccacgtctgaaaatctgtgattttggttattccaagtcctctctgctgcactctaggcccaaatcaacagttggaactccagcatatattgcacctgaggtcctttctcgaagagaatatgatggcaagatggctgatgtatggtcttgtggtgtgactctttatgtcatgctggttggagcatacccatttgaagaccaggaagaccccaagaacttcaggaaaacaatacaaaaaataatggctgtccagtacaagatcccggactacgtccatatctcacaggattgtaaaaatctcctttcccgtatatttgtcgccaattcactcaagaggatcaccattgcagaaatcaagaaacattcatggttcctaaagaatttgccaagggaactcacagagacagctcaagctgcatatttcaagaaagagaacccaaccttctcccttcagaccgttgaagagatcatgaagatagtggctgacgccaaaacaccgcctcctgtttcccgatccatcggaggttttggctggggaggaaatggggatgcagatggaaaagaggaagatgcagaagacgtggaggaggaagaggaggaggtggaagaagaggaagacgatgaggatgaatacgataagactgtaaaggaagtacacgcaagtggagaagtgagaataagttgatattttggtttttggtctgtgtaagaaagaagtcgtcgttggtttgttgaaactgaaaagtctctgttctcgtgtttgcctttacaatgctttggctaaggttttggttctggttttggagatttgtaaaatttgcagtataagatgaacaaacagagaggttgatgatgagaatgagtcctttgctacgcatggtactatgaacattgtgacctccaataaatatttttgtaaattagattttattttccg

SEQ ID NO: 38708 - protein, 363 aa, Arabidopsis thaliana
  peptide (1)..(363): Ceres Seq. ID no. 12727313
  misc_feature (4)..(260): Pfam Name: Protein kinase domain Pfam Description: Protein kinase domain
  misc_feature (1)..(363): Homolog of NCBI NO: 19568098 NR Description: osmotic stress-activated protein kinase
  misc_feature (1)..(363): Homolog of NCBI NO: 15219836 NR Description: putative serine/threonine-protein kinase
  misc_feature (1)..(363): Homolog of NCBI NO: 21618062 NR Description: putative serine/threonine-protein kinase
  misc_feature (1)..(360): Homolog of NCBI NO: 2129803 NR Description: probable serine/threonine-specific protein kinase
  misc_feature (1)..(363): Homolog of NCBI NO: 1362026 NR Description: probable serine/threonine-specific protein kinase
  misc_feature (1)..(363): Homolog of NCBI NO: 15220251 NR Description: Ser/Thr kinase
MDKYELVKDIGAGNFGVARLMKVKNSKELVAMKYIERGPKIDENVAREIINHRSLRHPNIIRFKEVVLTPTHLAIAMEYAAGGELFERICSAGRFSEDEARYFFQQLISGVSYCHAMQICHRDLKLENTLLDGSPAPRLKICDFGYSKSSLLHSRPKSTVGTPAYIAPEVLSRREYDGKMADVWSCGVTLYVMLVGAYPFEDQEDPKNFRKTIQKIMAVQYKIPDYVHISQDCKNLLSRIFVANSLKRITIAEIKKHSWFLKNLPRELTETAQAAYFKKENPTFSLQTVEEIMKIVADAKTPPPVSRSIGGFGWGGNGDADGKEEDAEDVEEEEEEVEEEEDDEDEYDKTVKEVHASGEVRIS

SEQ ID NO: 38709 - protein, 343 aa, Arabidopsis thaliana
  peptide (1)..(343): Ceres Seq. ID no. 12727314
  misc_feature (1)..(240): Pfam Name: Protein kinase domain Pfam Description: Protein kinase domain
  misc_feature (1)..(343): Homolog of NCBI NO: 19568098 NR Description: osmotic stress-activated protein kinase
  misc_feature (1)..(343): Homolog of NCBI NO: 15219836 NR Description: putative serine/threonine-protein kinase
  misc_feature (1)..(343): Homolog of NCBI NO: 21618062 NR Description: putative serine/threonine-protein kinase
  misc_feature (1)..(340): Homolog of NCBI NO: 2129803 NR Description: probable serine/threonine-specific protein kinase
  misc_feature (1)..(343): Homolog of NCBI NO: 1362026 NR Description: probable serine/threonine-specific protein kinase
  misc_feature (1)..(343): Homolog of NCBI NO: 15220251 NR Description: Ser/Thr kinase
MKVKNSKELVAMKYIERGPKIDENVAREIINHRSLRHPNIIRFKEVVLTPTHLAIAMEYAAGGELFERICSAGRFSEDEARYFFQQLISGVSYCHAMQICHRDLKLENTLLDGSPAPRLKICDFGYSKSSLLHSRPKSTVGTPAYIAPEVLSRREYDGKMADVWSCGVTLYVMLVGAYPFEDQEDPKNFRKTIQKIMAVQYKIPDYVHISQDCKNLLSRIFVANSLKRITIAEIKKHSWFLKNLPRELTETAQAAYFKKENPTFSLQTVEEIMKIVADAKTPPPVSRSIGGFGWGGNGDADGKEEDAEDVEEEEEEVEEEEDDEDEYDKTVKEVHASGEVRIS

SEQ ID NO: 38710 - protein, 332 aa, Arabidopsis thaliana
  peptide (1)..(332): Ceres Seq. ID no. 12727315
  misc_feature (1)..(229): Pfam Name: Protein kinase domain Pfam Description: Protein kinase domain
  misc_feature (1)..(332): Homolog of NCBI NO: 19568098 NR Description: osmotic stress-activated protein kinase
  misc_feature (1)..(332): Homolog of NCBI NO: 15219836 NR Description: putative serine/threonine-protein kinase
  misc_feature (1)..(332): Homolog of NCBI NO: 21618062 NR Description: putative serine/threonine-protein kinase
  misc_feature (1)..(329): Homolog of NCBI NO: 2129803 NR Description: probable serine/threonine-specific protein kinase
  misc_feature (1)..(332): Homolog of NCBI NO: 1362026 NR Description: probable serine/threonine-specific protein kinase
  misc_feature (1)..(332): Homolog of NCBI NO: 15220251 NR Description: Ser/Thr kinase
MKYIERGPKIDENVAREIINHRSLRHPNIIRFKEVVLTPTHLAIAMEYAAGGELFERICSAGRFSEDEARYFFQQLISGVSYCHAMQICHRDLKLENTLLDGSPAPRLKICDFGYSKSSLLHSRPKSTVGTPAYIAPEVLSRREYDGKMADVWSCGVTLYVMLVGAYPFEDQEDPKNFRKTIQKIMAVQYKIPDYVHISQDCKNLLSRIFVANSLKRITIAEIKKHSWFLKNLPRELTETAQAAYFKKENPTFSLQTVEEIMKIVADAKTPPPVSRSIGGFGWGGNGDADGKEEDAEDVEEEEEEVEEEEDDEDEYDKTVKEVHASGEVRIS

SEQ ID NO: 38711 - DNA, 1643 bp, Arabidopsis thaliana
  misc_feature (1)..(1643): Ceres Seq. ID no. 12328994
  misc_feature: MA Experiment ID: 108434 Result: Up-regulated in Transcription
  misc_feature: MA Experiment 108434 PARAMETER Experiment Name: At_Root_Tips_cDNA_P Parameter: Tissue Value: Root Tips
  misc_feature: MA Experiment ID: 108435 Result: Down-regulated in Transcription
  misc_feature: MA Experiment 108435 PARAMETER Experiment Name: At_stm_Mutants_cDNA_P Parameter: Plant Line Value: wt Landsburg vs stm
  misc_feature: MA Experiment 108435 PARAMETER Experiment Name: At_stm_Mutants_cDNA_P Parameter: Tissue Value: Shoot Apical Meristem Region
  misc_feature: MA Experiment ID: 108462 Result: Down-regulated in Transcription
  misc_feature: MA Experiment 108462 PARAMETER Experiment Name: At_Germinating_Seeds_cDNA_P Parameter: Age (day) Value: 2 vs. 0
  misc_feature: MA Experiment 108462 PARAMETER Experiment Name: At_Germinating_Seeds_cDNA_P Parameter: Tissue Value: Germinating Seeds
  misc_feature: MA Experiment ID: 108463 Result: Down-regulated in Transcription
  misc_feature: MA Experiment 108463 PARAMETER Experiment Name: At_Germinating_Seeds_cDNA_P Parameter: Age (day) Value: 3 vs. 0
  misc_feature: MA Experiment 108463 PARAMETER Experiment Name: At_Germinating_Seeds_cDNA_P Parameter: Tissue Value: Germinating Seeds
  misc_feature: MA Experiment ID: 108464 Result: Down-regulated in Transcription
  misc_feature: MA Experiment 108464 PARAMETER Experiment Name: At_Germinating_Seeds_cDNA_P Parameter: Age (day) Value: 4 vs. 0
  misc_feature: MA Experiment 108464 PARAMETER Experiment Name: At_Germinating_Seeds_cDNA_P Parameter: Tissue Value: Germinating Seeds
  misc_feature: MA Experiment ID: 20000070 Result: Up-regulated in Transcription
  misc_feature: MA Experiment 20000070 PARAMETER Experiment Name: At_100uM_ABA_Mutants_cDNA_P Parameter: Plant Line Value: CS24
  misc_feature: MA Experiment 20000070 PARAMETER Experiment Name: At_100uM_ABA_Mutants_cDNA_P Parameter: Timepoint (hr) Value: 6
  misc_feature: MA Experiment 20000070 PARAMETER Experiment Name: At_100uM_ABA_Mutants_cDNA_P Parameter: Tissue Value: Aerial
  misc_feature: MA Experiment 20000070 PARAMETER Experiment Name: At_100uM_ABA_Mutants_cDNA_P Parameter: Treatment Value: 100uM ABA vs. No Treatment
  misc_feature: MA Experiment ID: 20000071 Result: Up-regulated in Transcription
  misc_feature: MA Experiment 20000071 PARAMETER Experiment Name: At_100uM_ABA_Mutants_cDNA_P Parameter: Plant Line Value: CS8104
  misc_feature: MA Experiment 20000071 PARAMETER Experiment Name: At_100uM_ABA_Mutants_cDNA_P Parameter: Timepoint (hr) Value: 6
  misc_feature: MA Experiment 20000071 PARAMETER Experiment Name: At_100uM_ABA_Mutants_cDNA_P Parameter: Tissue Value: Aerial
  misc_feature: MA Experiment 20000071 PARAMETER Experiment Name: At_100uM_ABA_Mutants_cDNA_P Parameter: Treatment Value: 100uM ABA vs. No Treatment
  misc_feature: MA Experiment ID: 20000072 Result: Up-regulated in Transcription
  misc_feature: MA Experiment 20000072 PARAMETER Experiment Name: At_100uM_ABA_Mutants_cDNA_P Parameter: Plant Line Value: CS8105
  misc_feature: MA Experiment 20000072 PARAMETER Experiment Name: At_100uM_ABA_Mutants_cDNA_P Parameter: Timepoint (hr) Value: 6
  misc_feature: MA Experiment 20000072 PARAMETER Experiment Name: At_100uM_ABA_Mutants_cDNA_P Parameter: Tissue Value: Aerial
  misc_feature: MA Experiment 20000072 PARAMETER Experiment Name: At_100uM_ABA_Mutants_cDNA_P Parameter: Treatment Value: 100uM ABA vs. No Treatment
  misc_feature: MA Experiment ID: 20000086 Result: Up-regulated in Transcription
  misc_feature: MA Experiment 20000086 PARAMETER Experiment Name: At_100uM_ABA_Mutants_cDNA_P Parameter: Plant Line Value: CS22
  misc_feature: MA Experiment 20000086 PARAMETER Experiment Name: At_100uM_ABA_Mutants_cDNA_P Parameter: Timepoint (hr) Value: 6
  misc_feature: MA Experiment 20000086 PARAMETER Experiment Name: At_100uM_ABA_Mutants_cDNA_P Parameter: Tissue Value: Aerial
  misc_feature: MA Experiment 20000086 PARAMETER Experiment Name: At_100uM_ABA_Mutants_cDNA_P Parameter: Treatment Value: 100uM ABA vs. No Treatment
  misc_feature: MA Experiment ID: 20000087 Result: Up-regulated in Transcription
  misc_feature: MA Experiment 20000087 PARAMETER Experiment Name: At_100uM_ABA_Mutants_cDNA_P Parameter: Plant Line Value: WS
  misc_feature: MA Experiment 20000087 PARAMETER Experiment Name: At_100uM_ABA_Mutants_cDNA_P Parameter: Timepoint (hr) Value: 6
  misc_feature: MA Experiment 20000087 PARAMETER Experiment Name: At_100uM_ABA_Mutants_cDNA_P Parameter: Tissue Value: Aerial
  misc_feature: MA Experiment 20000087 PARAMETER Experiment Name: At_100uM_ABA_Mutants_cDNA_P Parameter: Treatment Value: 100uM ABA vs. No Treatment
  misc_feature: MA Experiment ID: 20000088 Result: Up-regulated in Transcription
  misc_feature: MA Experiment 20000088 PARAMETER Experiment Name: At_100uM_ABA_Mutants_cDNA_P Parameter: Plant Line Value: Landsberg
  misc_feature: MA Experiment 20000088 PARAMETER Experiment Name: At_100uM_ABA_Mutants_cDNA_P Parameter: Timepoint (hr) Value: 6
  misc_feature: MA Experiment 20000088 PARAMETER Experiment Name: At_100uM_ABA_Mutants_cDNA_P Parameter: Tissue Value: Aerial
  misc_feature: MA Experiment 20000088 PARAMETER Experiment Name: At_100uM_ABA_Mutants_cDNA_P Parameter: Treatment Value: 100uM ABA vs. No Treatment
  misc_feature: MA Experiment ID: 20000090 Result: Up-regulated in Transcription
  misc_feature: MA Experiment ID: 20000111 Result: Down-regulated in Transcription
  misc_feature: MA Experiment 20000111 PARAMETER Experiment Name: At_42deg_Heat_cDNA_P Parameter: Temperature (deg C) Value: 42 vs. 22
  misc_feature: MA Experiment 20000111 PARAMETER Experiment Name: At_42deg_Heat_cDNA_P Parameter: Timepoint (hr) Value: 6
  misc_feature: MA Experiment 20000111 PARAMETER Experiment Name: At_42deg_Heat_cDNA_P Parameter: Tissue Value: Aerial
  misc_feature: MA Experiment ID: 20000113 Result: Down-regulated in Transcription
  misc_feature: MA Experiment 20000113 PARAMETER Experiment Name: At_42deg_Heat_cDNA_P Parameter: Temperature (deg C) Value: 42 vs. 22
  misc_feature: MA Experiment 20000113 PARAMETER Experiment Name: At_42deg_Heat_cDNA_P Parameter: Timepoint (hr) Value: 8
  misc_feature: MA Experiment 20000113 PARAMETER Experiment Name: At_42deg_Heat_cDNA_P Parameter: Tissue Value: Aerial
  misc_feature: MA Experiment ID: 20000117 Result: Up-regulated in Transcription
  misc_feature: MA Experiment 20000117 PARAMETER Experiment Name: At_100uM_ABA_Mutants_cDNA_P Parameter: Plant Line Value: Columbia
  misc_feature: MA Experiment 20000117 PARAMETER Experiment Name: At_100uM_ABA_Mutants_cDNA_P Parameter: Timepoint (hr) Value: 6
  misc_feature: MA Experiment 20000117 PARAMETER Experiment Name: At_100uM_ABA_Mutants_cDNA_P Parameter: Tissue Value: Aerial
  misc_feature: MA Experiment 20000117 PARAMETER Experiment Name: At_100uM_ABA_Mutants_cDNA_P Parameter: Treatment Value: 100uM ABA vs. No Treatment
  misc_feature: MA Experiment ID: 20000184 Result: Down-regulated in Transcription
  misc_feature: MA Experiment 20000184 PARAMETER Experiment Name: At_Shoots__P Parameter: Age (day) Value: 7
  misc_feature: MA Experiment 20000184 PARAMETER Experiment Name: At_Shoots__P Parameter: Tissue Value: Shoots vs. Whole Plant
  misc_feature: MA Experiment ID: 20000185 Result: Down-regulated in Transcription
  misc_feature: MA Experiment 20000185 PARAMETER Experiment Name: At_Roots__P Parameter: Age (day) Value: 7 vs. 21
  misc_feature: MA Experiment 20000185 PARAMETER Experiment Name: At_Roots__P Parameter: Organism Value: A. thaliana
  misc_feature: MA Experiment 20000185 PARAMETER Experiment Name: At_Roots__P Parameter: Tissue Value: Roots vs. Whole Plant
  misc_feature: MA Experiment ID: 20000234 Result: Down-regulated in Transcription
  misc_feature: MA Experiment 20000234 PARAMETER Experiment Name: At_Siliques_P Parameter: Age (day) Value: 21
  misc_feature: MA Experiment 20000234 PARAMETER Experiment Name: At_Siliques_P Parameter: Organism Value: A. thaliana
  misc_feature: MA Experiment 20000234 PARAMETER Experiment Name: At_Siliques_P Parameter: Plant Line Value: WS
  misc_feature: MA Experiment 20000234 PARAMETER Experiment Name: At_Siliques_P Parameter: Tissue Value: Less Than 5mm Siliques vs. Whole Plant
  misc_feature: MA Experiment ID: 20000264 Result: Down-regulated in Transcription
  misc_feature: MA Experiment 20000264 PARAMETER Experiment Name: At_Open_Flower_P Parameter: Age (day) Value: 21
  misc_feature: MA Experiment 20000264 PARAMETER Experiment Name: At_Open_Flower_P Parameter: Plant Line Value: WS
  misc_feature: MA Experiment 20000264 PARAMETER Experiment Name: At_Open_Flower_P Parameter: Tissue Value: Open Flower vs. Whole Plant
  misc_feature: MA Experiment ID: 20000265 Result: Down-regulated in Transcription
  misc_feature: MA Experiment 20000265 PARAMETER Experiment Name: At_Open_Flower_P Parameter: Age (day) Value: 21
  misc_feature: MA Experiment 20000265 PARAMETER Experiment Name: At_Open_Flower_P Parameter: Plant Line Value: WS
  misc_feature: MA Experiment 20000265 PARAMETER Experiment Name: At_Open_Flower_P Parameter: Tissue Value: Closed Flower vs. Whole Plant
  misc_feature: MA Experiment ID: 20000286 Result: Down-regulated in Transcription
  misc_feature: MA Experiment 20000286 PARAMETER Experiment Name: At_Open_Flower_P Parameter: Age (day) Value: 21
  misc_feature: MA Experiment 20000286 PARAMETER Experiment Name: At_Open_Flower_P Parameter: Plant Line Value: WS
  misc_feature: MA Experiment 20000286 PARAMETER Experiment Name: At_Open_Flower_P Parameter: Tissue Value: Half Open vs. Whole Plant
  misc_feature: MA Experiment ID: 20000437 Result: Up-regulated in Transcription
  misc_feature: MA Experiment 20000437 PARAMETER Experiment Name: At_Drought_P Parameter: Age (day) Value: 8
  misc_feature: MA Experiment 20000437 PARAMETER Experiment Name: At_Drought_P Parameter: Organism Value: A. thaliana
  misc_feature: MA Experiment 20000437 PARAMETER Experiment Name: At_Drought_P Parameter: Plant Line Value: WS
  misc_feature: MA Experiment 20000437 PARAMETER Experiment Name: At_Drought_P Parameter: Timepoint (hr) Value: 24
  misc_feature: MA Experiment 20000437 PARAMETER Experiment Name: At_Drought_P Parameter: Tissue Value: Whole Plant
  misc_feature: MA Experiment 20000437 PARAMETER Experiment Name: At_Drought_P Parameter: Treatment Value: Drought vs. No Drought
  misc_feature: MA Experiment ID: 20000438 Result: Down-regulated in Transcription
  misc_feature: MA Experiment 20000438 PARAMETER Experiment Name: At_Shoots__P Parameter: Age (day) Value: 14
  misc_feature: MA Experiment 20000438 PARAMETER Experiment Name: At_Shoots__P Parameter: Tissue Value: Shoots vs. Whole Plant
  misc_feature: MA Experiment ID: 20000439 Result: Down-regulated in Transcription
  misc_feature: MA Experiment 20000439 PARAMETER Experiment Name: At_Roots__P Parameter: Age (day) Value: 14 vs. 21
  misc_feature: MA Experiment 20000439 PARAMETER Experiment Name: At_Roots__P Parameter: Organism Value: A. thaliana
  misc_feature: MA Experiment 20000439 PARAMETER Experiment Name: At_Roots__P Parameter: Tissue Value: Roots vs. Whole Plant
  misc_feature: MA Experiment ID: 20000794 Result: Down-regulated in Transcription
  misc_feature: MA Experiment 20000794 PARAMETER Experiment Name: At_Petals_P Parameter: Age (day) Value: 23-25 days
  misc_feature: MA Experiment 20000794 PARAMETER Experiment Name: At_Petals_P Parameter: Plant Line Value: WS
  misc_feature: MA Experiment 20000794 PARAMETER Experiment Name: At_Petals_P Parameter: Tissue Value: Petals vs. Whole plant
  misc_feature: MA Experiment ID: 20001247 Result: Down-regulated in Transcription
  misc_feature: MA Experiment 20001247 PARAMETER Experiment Name: At_Far-red-induction_P Parameter: Age (day) Value: 7
  misc_feature: MA Experiment 20001247 PARAMETER Experiment Name: At_Far-red-induction_P Parameter: Light Value: Far-red vs. White
  misc_feature: MA Experiment 20001247 PARAMETER Experiment Name: At_Far-red-induction_P Parameter: Organism Value: A. thaliana
  misc_feature: MA Experiment 20001247 PARAMETER Experiment Name: At_Far-red-induction_P Parameter: Plant Line Value: Columbia
  misc_feature: MA Experiment 20001247 PARAMETER Experiment Name: At_Far-red-induction_P Parameter: Timepoint (hr) Value: 1
  misc_feature: MA Experiment 20001247 PARAMETER Experiment Name: At_Far-red-induction_P Parameter: Tissue Value: Whole Plant
  misc_feature: MA Experiment ID: 20001248 Result: Up-regulated in Transcription
  misc_feature: MA Experiment 20001248 PARAMETER Experiment Name: At_Far-red-induction_P Parameter: Age (day) Value: 7
  misc_feature: MA Experiment 20001248 PARAMETER Experiment Name: At_Far-red-induction_P Parameter: Light Value: Far-red vs. White
  misc_feature: MA Experiment 20001248 PARAMETER Experiment Name: At_Far-red-induction_P Parameter: Organism Value: A. thaliana
  misc_feature: MA Experiment 20001248 PARAMETER Experiment Name: At_Far-red-induction_P Parameter: Plant Line Value: Columbia
  misc_feature: MA Experiment 20001248 PARAMETER Experiment Name: At_Far-red-induction_P Parameter: Timepoint (hr) Value: 4
  misc_feature: MA Experiment 20001248 PARAMETER Experiment Name: At_Far-red-induction_P Parameter: Tissue Value: Whole Plant
  misc_feature: MA Experiment ID: 20001905 Result: Down-regulated in Transcription
  misc_feature: MA Experiment 20001905 PARAMETER Experiment Name: At_Drought_Reproduction_P Parameter: Age (day) Value: 40
  misc_feature: MA Experiment 20001905 PARAMETER Experiment Name: At_Drought_Reproduction_P Parameter: Organism Value: A. thaliana
  misc_feature: MA Experiment 20001905 PARAMETER Experiment Name: At_Drought_Reproduction_P Parameter: Plant Line Value: WS
  misc_feature: MA Experiment 20001905 PARAMETER Experiment Name: At_Drought_Reproduction_P Parameter: Timepoint (day) Value: 10
  misc_feature: MA Experiment 20001905 PARAMETER Experiment Name: At_Drought_Reproduction_P Parameter: Tissue Value: Rosettes
  misc_feature: MA Experiment 20001905 PARAMETER Experiment Name: At_Drought_Reproduction_P Parameter: Treatment Value: Drought vs. No Drought
ggttcagtctcttcgaagctcgtcgtctctctcttcaaaactccggtgaaaatggcgtcgcttactctccggtgcgattcgacgcatcttttgccttcccgtgatgttgtcaagggaacaaaaccatttggaacgagcttggtgtatcctaggatcatatcgaagaagtttaatgttagaatgagagtgatacctgaggaaggagatgtgttctcttcttctaagagtaatggatcatcaatggggattgagttacagccagatttggtttcgtttggaacattagcagctgaaatgattcctacaacaatggattctcctgaagttgaggatgaagagtttgatttagatcgacctactgatggatttgcgtctattcctcaagctattgaagatattcgacatggcaagatggtagttgttgtagatgatgaagatagagaaaacgaaggagatttgataatggcggcatctttggctacacctgaagctatggcttttgttgtaaagcatgggactggaatcgtgtgtgtgagcatgaaaggcgaagacttggagaggttagagcttcctttaatggtaacgcgtaaggataacgaggaaaaactccgcacggccttcacggtttcagtggacgcaaaaaagggaacatccacaggtgtctcagctcgtgatagggcgcaaacaatattaacccttgcatcaaaagattcaaaacctgaagatttcaatcgtcctggtcatatttttcctttgagatacagagaaggtggtgttcttaaaagagcagggcatacagaagcctctgttgacttgactgtgttgtccggtttagaaccagtatctgttttatgtgagattgtagatgatgatggttccatggctagattaccaagactccgccaattcgctcaagagaacaacttgaaattaatttcaatcgctgatttaatcagataccgaaggaaaagagagagactggttgagtttactgcggttgcgcctataccgacaatgtggggaccattcaaagcacattgctttaagtcattacttgatggagttgagcacattgcaatggtcaagggagaaatcggagatgggaaggatattctcgtgagagtacacgcggagtgtatcacagatgatatattcggaaatagctctggtggaaaacagttagcgattgcaatgagactgattgaagaaaatgggagaggtgtttttgtctacttacgtggtcctgaaagtaaaggcattgatctaagccacaagcctcgtacttacaacaccaattcagatcaagccgagggtgtttcatttcccgttgcttcacgggaatacggcattggagcacaaattctaagggatcttggagttagagagatgaaggtgatgacgaataatccagcacattacgttggtcttaaaggctatggtttatcaatttctggtaaggttccactcattactactccttaagtgttgttttgaccgttgtttgattacgttaagagacgacacgtgtcggcttcttgagtgacttagtttgttgtttagttgtggttttggcgcctaaatcatgtgatctgatattgtgttttttgacctccataattatcattagaattattttaaatggc

SEQ ID NO: 38712 - protein, 493 aa, Arabidopsis thaliana
  peptide (1)..(493): Ceres Seq. ID no. 12328995
  misc_feature (126)..(323): Pfam Name: 3,4-dihydroxy-2-butanone 4-phosphate synthase Pfam Description: 3,4-dihydroxy-2-butanone 4-phosphate synthase
  misc_feature (112)..(489): Homolog of NCBI NO: 23018011 NR Description: hypothetical protein [Thermobifida fusca]
  misc_feature (123)..(493): Homolog of NCBI NO: 15605862 NR Description: GTP cyclohydrolase II [Aquifex aeolicus]
  misc_feature (124)..(489): Homolog of NCBI NO: 23053279 NR Description: hypothetical protein [Geobacter metallireducens]
  misc_feature (88)..(491): Homolog of NCBI NO: 18424277 NR Description: GTP cyclohydrolase II /
  misc_feature (91)..(491): Homolog of NCBI NO: 29367375 NR Description: GTP cyclohydrolase
  misc_feature (155)..(491): Homolog of NCBI NO: 30697989 NR Description: GTP cyclohydrolase II
  misc_feature (53)..(491): Homolog of NCBI NO: 7436011 NR Description: GTP cyclohydrolase II (EC 3.5.4.25) / 3,
  misc_feature (2)..(491): Homolog of NCBI NO: 27735197 NR Description: Riboflavin biosynthesis protein ribA
  misc_feature (61)..(493): Homolog of NCBI NO: 25290324 NR Description: probable GTP cyclohydrolase [imported] -
  misc_feature (18)..(493): Homolog of NCBI NO: 30681714 NR Description: GTP cyclohydrolase -related [Arabidopsis thaliana]
GSVSSKLVVSLFKTPVKMASLTLRCDSTHLLPSRDVVKGTKPFGTSLVYPRIISKKFNVRMRVIPEEGDVFSSSKSNGSSMGIELQPDLVSFGTLAAEMIPTTMDSPEVEDEEFDLDRPTDGFASIPQAIEDIRHGKMVVVVDDEDRENEGDLIMAASLATPEAMAFVVKHGTGIVCVSMKGEDLERLELPLMVTRKDNEEKLRTAFTVSVDAKKGTSTGVSARDRAQTILTLASKDSKPEDFNRPGHIFPLRYREGGVLKRAGHTEASVDLTVLSGLEPVSVLCEIVDDDGSMARLPRLRQFAQENNLKLISIADLIRYRRKRERLVEFTAVAPIPTMWGPFKAHCFKSLLDGVEHIAMVKGEIGDGKDILVRVHAECITDDIFGNSSGGKQLAIAMRLIEENGRGVFVYLRGPESKGIDLSHKPRTYNTNSDQAEGVSFPVASREYGIGAQILRDLGVREMKVMTNNPAHYVGLKGYGLSISGKVPLITTP

SEQ ID NO: 38713 - protein, 476 aa, Arabidopsis thaliana
  peptide (1)..(476): Ceres Seq. ID no. 12328996
  misc_feature (109)..(306): Pfam Name: 3,4-dihydroxy-2-butanone 4-phosphate synthase Pfam Description: 3,4-dihydroxy-2-butanone 4-phosphate synthase
  misc_feature (95)..(472): Homolog of NCBI NO: 23018011 NR Description: hypothetical protein [Thermobifida fusca]
  misc_feature (106)..(476): Homolog of NCBI NO: 15605862 NR Description: GTP cyclohydrolase II [Aquifex aeolicus]
  misc_feature (107)..(472): Homolog of NCBI NO: 23053279 NR Description: hypothetical protein [Geobacter metallireducens]
  misc_feature (71)..(474): Homolog of NCBI NO: 18424277 NR Description: GTP cyclohydrolase II /
  misc_feature (74)..(474): Homolog of NCBI NO: 29367375 NR Description: GTP cyclohydrolase
  misc_feature (138)..(474): Homolog of NCBI NO: 30697989 NR Description: GTP cyclohydrolase II
  misc_feature (36)..(474): Homolog of NCBI NO: 7436011 NR Description: GTP cyclohydrolase II (EC 3.5.4.25) / 3,
  misc_feature (1)..(474): Homolog of NCBI NO: 27735197 NR Description: Riboflavin biosynthesis protein ribA
  misc_feature (44)..(476): Homolog of NCBI NO: 25290324 NR Description: probable GTP cyclohydrolase [imported] -
  misc_feature (1)..(476): Homolog of NCBI NO: 30681714 NR Description: GTP cyclohydrolase -related [Arabidopsis thaliana]
MASLTLRCDSTHLLPSRDVVKGTKPFGTSLVYPRIISKKFNVRMRVIPEEGDVFSSSKSNGSSMGIELQPDLVSFGTLAAEMIPTTMDSPEVEDEEFDLDRPTDGFASIPQAIEDIRHGKMVVVVDDEDRENEGDLIMAASLATPEAMAFVVKHGTGIVCVSMKGEDLERLELPLMVTRKDNEEKLRTAFTVSVDAKKGTSTGVSARDRAQTILTLASKDSKPEDFNRPGHIFPLRYREGGVLKRAGHTEASVDLTVLSGLEPVSVLCEIVDDDGSMARLPRLRQFAQENNLKLISIADLIRYRRKRERLVEFTAVAPIPTMWGPFKAHCFKSLLDGVEHIAMVKGEIGDGKDILVRVHAECITDDIFGNSSGGKQLAIAMRLIEENGRGVFVYLRGPESKGIDLSHKPRTYNTNSDQAEGVSFPVASREYGIGAQILRDLGVREMKVMTNNPAHYVGLKGYGLSISGKVPLITTP

SEQ ID NO: 38714 - protein, 433 aa, Arabidopsis thaliana
  peptide (1)..(433): Ceres Seq. ID no. 12328997
  misc_feature (66)..(263): Pfam Name: 3,4-dihydroxy-2-butanone 4-phosphate synthase Pfam Description: 3,4-dihydroxy-2-butanone 4-phosphate synthase
  misc_feature (52)..(429): Homolog of NCBI NO: 23018011 NR Description: hypothetical protein [Thermobifida fusca]
  misc_feature (63)..(433): Homolog of NCBI NO: 15605862 NR Description: GTP cyclohydrolase II [Aquifex aeolicus]
  misc_feature (64)..(429): Homolog of NCBI NO: 23053279 NR Description: hypothetical protein [Geobacter metallireducens]
  misc_feature (28)..(431): Homolog of NCBI NO: 18424277 NR Description: GTP cyclohydrolase II /
  misc_feature (31)..(431): Homolog of NCBI NO: 29367375 NR Description: GTP cyclohydrolase
  misc_feature (95)..(431): Homolog of NCBI NO: 30697989 NR Description: GTP cyclohydrolase II
  misc_feature (1)..(431): Homolog of NCBI NO: 7436011 NR Description: GTP cyclohydrolase II (EC 3.5.4.25) / 3,
  misc_feature (1)..(431): Homolog of NCBI NO: 27735197 NR Description: Riboflavin biosynthesis protein ribA
  misc_feature (1)..(433): Homolog of NCBI NO: 25290324 NR Description: probable GTP cyclohydrolase [imported] -
  misc_feature (1)..(433): Homolog of NCBI NO: 30681714 NR Description: GTP cyclohydrolase -related [Arabidopsis thaliana]
MRVIPEEGDVFSSSKSNGSSMGIELQPDLVSFGTLAAEMIPTTMDSPEVEDEEFDLDRPTDGFASIPQAIEDIRHGKMVVVVDDEDRENEGDLIMAASLATPEAMAFVVKHGTGIVCVSMKGEDLERLELPLMVTRKDNEEKLRTAFTVSVDAKKGTSTGVSARDRAQTILTLASKDSKPEDFNRPGHIFPLRYREGGVLKRAGHTEASVDLTVLSGLEPVSVLCEIVDDDGSMARLPRLRQFAQENNLKLISIADLIRYRRKRERLVEFTAVAPIPTMWGPFKAHCFKSLLDGVEHIAMVKGEIGDGKDILVRVHAECITDDIFGNSSGGKQLAIAMRLIEENGRGVFVYLRGPESKGIDLSHKPRTYNTNSDQAEGVSFPVASREYGIGAQILRDLGVREMKVMTNNPAHYVGLKGYGLSISGKVPLITTP

SEQ ID NO: 38715 - DNA, 1066 bp, Arabidopsis thaliana
  misc_feature (1)..(1066): Ceres Seq. ID no. 13497453
  misc_feature: MA Experiment ID: 108434 Result: Up-regulated in Transcription
  misc_feature: MA Experiment 108434 PARAMETER Experiment Name: At_Root_Tips_cDNA_P Parameter: Tissue Value: Root Tips
  misc_feature: MA Experiment ID: 108576 Result: Up-regulated in Transcription
  misc_feature: MA Experiment 108576 PARAMETER Experiment Name: At_42deg_Heat_cDNA_P Parameter: Temperature (deg C) Value: 42 vs. 22
  misc_feature: MA Experiment 108576 PARAMETER Experiment Name: At_42deg_Heat_cDNA_P Parameter: Timepoint (hr) Value: 1
  misc_feature: MA Experiment 108576 PARAMETER Experiment Name: At_42deg_Heat_cDNA_P Parameter: Tissue Value: Aerial
  misc_feature: MA Experiment ID: 20000111 Result: Up-regulated in Transcription
  misc_feature: MA Experiment 20000111 PARAMETER Experiment Name: At_42deg_Heat_cDNA_P Parameter: Temperature (deg C) Value: 42 vs. 22
  misc_feature: MA Experiment 20000111 PARAMETER Experiment Name: At_42deg_Heat_cDNA_P Parameter: Timepoint (hr) Value: 6
  misc_feature: MA Experiment 20000111 PARAMETER Experiment Name: At_42deg_Heat_cDNA_P Parameter: Tissue Value: Aerial
  misc_feature: MA Experiment ID: 20000112 Result: Up-regulated in Transcription
  misc_feature: MA Experiment 20000112 PARAMETER Experiment Name: At_42deg_Heat_cDNA_P Parameter: Temperature (deg C) Value: 42 vs. 22
  misc_feature: MA Experiment 20000112 PARAMETER Experiment Name: At_42deg_Heat_cDNA_P Parameter: Timepoint (hr) Value: 2
  misc_feature: MA Experiment 20000112 PARAMETER Experiment Name: At_42deg_Heat_cDNA_P Parameter: Tissue Value: Aerial
  misc_feature: MA Experiment ID: 20000144 Result: Up-regulated in Transcription
  misc_feature: MA Experiment 20000144 PARAMETER Experiment Name: At_42deg_Heat_cDNA_P Parameter: Temperature (deg C) Value: 42 vs. 22
  misc_feature: MA Experiment 20000144 PARAMETER Experiment Name: At_42deg_Heat_cDNA_P Parameter: Timepoint (hr) Value: 1
  misc_feature: MA Experiment 20000144 PARAMETER Experiment Name: At_42deg_Heat_cDNA_P Parameter: Tissue Value: Aerial
  misc_feature: MA Experiment ID: 20000180 Result: Up-regulated in Transcription
  misc_feature: MA Experiment 20000180 PARAMETER Experiment Name: At_Germinating_Seeds_P Parameter: Age (hr) Value: 24 vs. 0
  misc_feature: MA Experiment 20000180 PARAMETER Experiment Name: At_Germinating_Seeds_P Parameter: Tissue Value: Germinating Seeds
  misc_feature: MA Experiment ID: 20000437 Result: Up-regulated in Transcription
  misc_feature: MA Experiment 20000437 PARAMETER Experiment Name: At_Drought_P Parameter: Age (day) Value: 8
  misc_feature: MA Experiment 20000437 PARAMETER Experiment Name: At_Drought_P Parameter: Organism Value: A. thaliana
  misc_feature: MA Experiment 20000437 PARAMETER Experiment Name: At_Drought_P Parameter: Plant Line Value: WS
  misc_feature: MA Experiment 20000437 PARAMETER Experiment Name: At_Drought_P Parameter: Timepoint (hr) Value: 24
  misc_feature: MA Experiment 20000437 PARAMETER Experiment Name: At_Drought_P Parameter: Tissue Value: Whole Plant
  misc_feature: MA Experiment 20000437 PARAMETER Experiment Name: At_Drought_P Parameter: Treatment Value: Drought vs. No Drought
  misc_feature: MA Experiment ID: 20001905 Result: Up-regulated in Transcription
  misc_feature: MA Experiment 20001905 PARAMETER Experiment Name: At_Drought_Reproduction_P Parameter: Age (day) Value: 40
  misc_feature: MA Experiment 20001905 PARAMETER Experiment Name: At_Drought_Reproduction_P Parameter: Organism Value: A. thaliana
  misc_feature: MA Experiment 20001905 PARAMETER Experiment Name: At_Drought_Reproduction_P Parameter: Plant Line Value: WS
  misc_feature: MA Experiment 20001905 PARAMETER Experiment Name: At_Drought_Reproduction_P Parameter: Timepoint (day) Value: 10
  misc_feature: MA Experiment 20001905 PARAMETER Experiment Name: At_Drought_Reproduction_P Parameter: Tissue Value: Rosettes
  misc_feature: MA Experiment 20001905 PARAMETER Experiment Name: At_Drought_Reproduction_P Parameter: Treatment Value: Drought vs. No Drought
aacgtctgatctctgatcttccgttttaaaacgacatcaaggtgttactgtccaatttcagattgggttagaacatcttgtaatatctacaaacttgagggtgttttacacgaatatttcttaattaagaggcttaacgttggcgtttttgacgaaaatggagcaaccaatgtcgccgggaacgaagtcggtggatctccgagaatgcatggaatcacttctccgttttagtctgagatctcatttaaacgaatctgttccaagtttcgatcttgacctgaccagagatttttgtcttcatctccttggggaagctacagattcaacagaaaaatctgcggtgtacaagcttctagcaacggctttgtctgaatgtctagcttccgagggtgataaaaattctaacttggaaaaatacagcaaactgattcatggcttgggatatgacttaataaatatgttgaaggaggtgaactttgagcttcatgtccaagagccttacttcacccaattgaaagatggtttgaaaactgttgaaggaagatgcgcagtgggagactacatgagaattagttcaggagattttcttttgttcaataaatgcttgctgcttgaagttcaggacgttcaccgttatacttcattctcagaaatgctgaaagtggagggtcttgccaaagttcttcctggagttgaaagtatagaagaaggtgttcaagtttaccgaaacttttattctgaagagaaggaaagaatgaacggtgttgtagctattcgtgttgcaaaaccagctaatcagccttctgcagctttggcaggagtattgtctgaactgaagtccagtgggatcaaaagcctgttggatgaatacacagctggggttacctcgtagctgcatctgaaaacctttgtgcgcagagaaactactcaatttgaagggttttgatttctctacactcggatgatgttaaatttgtgtttgtttgtgtgtacgagtagctaaatcacagaagatcacatcttttcttacttattgagcacctcacaaggcaacaaaacatttttc

SEQ ID NO: 38716 - protein, 244 aa, Arabidopsis thaliana
  peptide (1)..(244): Ceres Seq. ID no. 13497454
  misc_feature (107)..(207): Homolog of NCBI NO: 18976842 NR Description: hypothetical protein [Pyrococcus furiosus DSM
  misc_feature (107)..(207): Homolog of NCBI NO: 14521785 NR Description: hypothetical protein [Pyrococcus abyssi]
  misc_feature (154)..(241): Homolog of NCBI NO: 30689388 NR Description: expressed protein [Arabidopsis thaliana]
  misc_feature (154)..(241): Homolog of NCBI NO: 25408874 NR Description: hypothetical protein At2g43470 [imported] -
  misc_feature (105)..(208): Homolog of NCBI NO: 18976827 NR Description: hypothetical protein [Pyrococcus furiosus DSM
  misc_feature (105)..(208): Homolog of NCBI NO: 14521811 NR Description: hypothetical protein [Pyrococcus abyssi]
  misc_feature (105)..(208): Homolog of NCBI NO: 14590265 NR Description: hypothetical protein [Pyrococcus horikoshii]
  misc_feature (111)..(208): Homolog of NCBI NO: 20093930 NR Description: Archaea-specific enzyme related to ProFAR
  misc_feature (1)..(244): Homolog of NCBI NO: 21536491 NR Description: unknown [Arabidopsis thaliana]
  misc_feature (1)..(244): Homolog of NCBI NO: 18396513 NR Description: expressed protein [Arabidopsis thaliana]
MEQPMSPGTKSVDLRECMESLLRFSLRSHLNESVPSFDLDLTRDFCLHLLGEATDSTEKSAVYKLLATALSECLASEGDKNSNLEKYSKLIHGLGYDLINMLKEVNFELHVQEPYFTQLKDGLKTVEGRCAVGDYMRISSGDFLLFNKCLLLEVQDVHRYTSFSEMLKVEGLAKVLPGVESIEEGVQVYRNFYSEEKERMNGVVAIRVAKPANQPSAALAGVLSELKSSGIKSLLDEYTAGVTS

SEQ ID NO: 38717 - protein, 240 aa, Arabidopsis thaliana
  peptide (1)..(240): Ceres Seq. ID no. 13497455
  misc_feature (103)..(203): Homolog of NCBI NO: 18976842 NR Description: hypothetical protein [Pyrococcus furiosus DSM
  misc_feature (103)..(203): Homolog of NCBI NO: 14521785 NR Description: hypothetical protein [Pyrococcus abyssi]
  misc_feature (150)..(237): Homolog of NCBI NO: 30689388 NR Description: expressed protein [Arabidopsis thaliana]
  misc_feature (150)..(237): Homolog of NCBI NO: 25408874 NR Description: hypothetical protein At2g43470 [imported] -
  misc_feature (101)..(204): Homolog of NCBI NO: 18976827 NR Description: hypothetical protein [Pyrococcus furiosus DSM
  misc_feature (101)..(204): Homolog of NCBI NO: 14521811 NR Description: hypothetical protein [Pyrococcus abyssi]
  misc_feature (101)..(204): Homolog of NCBI NO: 14590265 NR Description: hypothetical protein [Pyrococcus horikoshii]
  misc_feature (107)..(204): Homolog of NCBI NO: 20093930 NR Description: Archaea-specific enzyme related to ProFAR
  misc_feature (1)..(240): Homolog of NCBI NO: 21536491 NR Description: unknown [Arabidopsis thaliana]
  misc_feature (1)..(240): Homolog of NCBI NO: 18396513 NR Description: expressed protein [Arabidopsis thaliana]
MSPGTKSVDLRECMESLLRFSLRSHLNESVPSFDLDLTRDFCLHLLGEATDSTEKSAVYKLLATALSECLASEGDKNSNLEKYSKLIHGLGYDLINMLKEVNFELHVQEPYFTQLKDGLKTVEGRCAVGDYMRISSGDFLLFNKCLLLEVQDVHRYTSFSEMLKVEGLAKVLPGVESIEEGVQVYRNFYSEEKERMNGVVAIRVAKPANQPSAALAGVLSELKSSGIKSLLDEYTAGVTS

SEQ ID NO: 38718 - protein, 227 aa, Arabidopsis thaliana
  peptide (1)..(227): Ceres Seq. ID no. 13497456
  misc_feature (90)..(190): Homolog of NCBI NO: 18976842 NR Description: hypothetical protein [Pyrococcus furiosus DSM
  misc_feature (90)..(190): Homolog of NCBI NO: 14521785 NR Description: hypothetical protein [Pyrococcus abyssi]
  misc_feature (137)..(224): Homolog of NCBI NO: 30689388 NR Description: expressed protein [Arabidopsis thaliana]
  misc_feature (137)..(224): Homolog of NCBI NO: 25408874 NR Description: hypothetical protein At2g43470 [imported] -
  misc_feature (88)..(191): Homolog of NCBI NO: 18976827 NR Description: hypothetical protein [Pyrococcus furiosus DSM
  misc_feature (88)..(191): Homolog of NCBI NO: 14521811 NR Description: hypothetical protein [Pyrococcus abyssi]
  misc_feature (88)..(191): Homolog of NCBI NO: 14590265 NR Description: hypothetical protein [Pyrococcus horikoshii]
  misc_feature (94)..(191): Homolog of NCBI NO: 20093930 NR Description: Archaea-specific enzyme related to ProFAR
  misc_feature (1)..(227): Homolog of NCBI NO: 21536491 NR Description: unknown [Arabidopsis thaliana]
  misc_feature (1)..(227): Homolog of NCBI NO: 18396513 NR Description: expressed protein [Arabidopsis thaliana]
MESLLRFSLRSHLNESVPSFDLDLTRDFCLHLLGEATDSTEKSAVYKLLATALSECLASEGDKNSNLEKYSKLIHGLGYDLINMLKEVNFELHVQEPYFTQLKDGLKTVEGRCAVGDYMRISSGDFLLFNKCLLLEVQDVHRYTSFSEMLKVEGLAKVLPGVESIEEGVQVYRNFYSEEKERMNGVVAIRVAKPANQPSAALAGVLSELKSSGIKSLLDEYTAGVTS

SEQ ID NO: 38719 - DNA, 1636 bp, Arabidopsis thaliana
  misc_feature (1)..(1636): Ceres Seq. ID no. 12371490
  misc_feature: MA Experiment ID: 108434 Result: Up-regulated in Transcription
  misc_feature: MA Experiment 108434 PARAMETER Experiment Name: At_Root_Tips_cDNA_P Parameter: Tissue Value: Root Tips
  misc_feature: MA Experiment ID: 108461 Result: Up-regulated in Transcription
  misc_feature: MA Experiment 108461 PARAMETER Experiment Name: At_Germinating_Seeds_cDNA_P Parameter: Age (day) Value: 1 vs. 0
  misc_feature: MA Experiment 108461 PARAMETER Experiment Name: At_Germinating_Seeds_cDNA_P Parameter: Tissue Value: Germinating Seeds
  misc_feature: MA Experiment ID: 108462 Result: Up-regulated in Transcription
  misc_feature: MA Experiment 108462 PARAMETER Experiment Name: At_Germinating_Seeds_cDNA_P Parameter: Age (day) Value: 2 vs. 0
  misc_feature: MA Experiment 108462 PARAMETER Experiment Name: At_Germinating_Seeds_cDNA_P Parameter: Tissue Value: Germinating Seeds
  misc_feature: MA Experiment ID: 20000069 Result: Down-regulated in Transcription
  misc_feature: MA Experiment 20000069 PARAMETER Experiment Name: At_100uM_ABA_Mutants_cDNA_P Parameter: Plant Line Value: CS23
  misc_feature: MA Experiment 20000069 PARAMETER Experiment Name: At_100uM_ABA_Mutants_cDNA_P Parameter: Timepoint (hr) Value: 6
  misc_feature: MA Experiment 20000069 PARAMETER Experiment Name: At_100uM_ABA_Mutants_cDNA_P Parameter: Tissue Value: Aerial
  misc_feature: MA Experiment 20000069 PARAMETER Experiment Name: At_100uM_ABA_Mutants_cDNA_P Parameter: Treatment Value: 100uM ABA vs. No Treatment
  misc_feature: MA Experiment ID: 20000070 Result: Down-regulated in Transcription
  misc_feature: MA Experiment 20000070 PARAMETER Experiment Name: At_100uM_ABA_Mutants_cDNA_P Parameter: Plant Line Value: CS24
  misc_feature: MA Experiment 20000070 PARAMETER Experiment Name: At_100uM_ABA_Mutants_cDNA_P Parameter: Timepoint (hr) Value: 6
  misc_feature: MA Experiment 20000070 PARAMETER Experiment Name: At_100uM_ABA_Mutants_cDNA_P Parameter: Tissue Value: Aerial
  misc_feature: MA Experiment 20000070 PARAMETER Experiment Name: At_100uM_ABA_Mutants_cDNA_P Parameter: Treatment Value: 100uM ABA vs. No Treatment
aagggatgcaatagagccaagaggaggagaaagatgggatctggtaaacaaaacacgtcaaagtcaaattacaaatttatattttataaaacagataacaacaacaaattaaacttttattaatctctctctgcctctactcactggatcatcatagctccaaacttgtaccagtcgcatcaaagcaagttttggtgaagaagaagagacgaggtcttcctcttactgtggtggtgacattttctctaaaaagaaagtctccgatatgtcgcagagatggagtagaaagaagagtagacttccattagcgggtctcctctttattctcgttgtcacctttatgattctcttcaacgagcgtagcattcagcagatccatcaccacgccgcgagtcacactcaaaatctccgagaaccttccacgttcgatttcgtcaagcctaatgttcctcggattaactacttgggagctcatgaggttttggatagattcagcaaatgcaactcgacgaaagagtacagtgggaagaaaatcggatgggttgacccgtttgaagaccacccgggtcaagtaacaaaggaggagcagaaatgtgatgtcttttctgggaaatgggtctttgataattcatcatcataccctttacacaaggaatctcagtgtccttacatgtccgaccagttggcttgtcagaagcatggtaggaaggatttggagtatcagcattggagatggcaacctcatgcctgcaacttgaagagatggaatgcgatagaaatgtgggagaagctgagaggaaagagattgatgtttgttggagactcgttaaacagaggccaatggatttcaatggtttgtctcttacagtctgtcattccacgtgacaagcagtctatgtctcctaacgctcacctcaccattttcagggctgaggactacaatgccacagtggagtttctctgggcaccgttgctcgtggagtcgaattctgatgaccctgttaatcacagattgagcgagcggattatccgacccgattctgttcttaaacatgcatcaaagtggcaacatgctgatattctaatcttcaacacctacttatggtggagacaagactctgtcaagctccgatggagcagtgaagaaaaagggtcatgcgaggaggtgaagagcgccgagggaatggagatggcaatggatagttggggtgattgggttgctaacaatgtcgatccaaacaaaaagcgagttttcttcgttacaatgtctcctacacatcaatggagccgagaatggaacccgggaagcgaaggaaactgctacggggagaagaaaccaatagaggaagagagttattggggaagtgggtcggacattccgacaatgaggatggtgaagagagttttggagagattgggaccaaaggtctcagttataaacatcactcagttgtctgagtatcgaaaagatggtcatccatcggtgtaccggaaattctgggaacctctaaatgaagaccggttgaaaaacccggcatcgtattctgactgtactcattggtgtgtacctggagttcctgatgtctggaatcaattgcttttccattttttgtgaaaatgaaatgaatataacctt

SEQ ID NO: 38720 - protein, 449 aa, Arabidopsis thaliana
  peptide (1)..(449): Ceres Seq. ID no. 12371491
  misc_feature (280)..(449): Pfam Name: Arabidopsis proteins of unknown function Pfam Description: Arabidopsis proteins of unknown function
  misc_feature (103)..(449): Homolog of NCBI NO: 15219382 NR Description: hypothetical protein; protein id: At1g73140.1
  misc_feature (103)..(446): Homolog of NCBI NO: 15228429 NR Description: unknown protein; protein id: At3g11030.1
  misc_feature (103)..(446): Homolog of NCBI NO: 15226647 NR Description: hypothetical protein; protein id: At2g40320.1
  misc_feature (103)..(446): Homolog of NCBI NO: 28393743 NR Description: unknown protein [Arabidopsis thaliana]
  misc_feature (110)..(446): Homolog of NCBI NO: 28876013 NR Description: unknown protein [Oryza sativa (japonica
  misc_feature (108)..(449): Homolog of NCBI NO: 18404712 NR Description: expressed protein
  misc_feature (108)..(449): Homolog of NCBI NO: 7487161 NR Description: hypothetical protein At2g38320 [imported] -
  misc_feature (1)..(449): Homolog of NCBI NO: 21536676 NR Description: unknown [Arabidopsis thaliana]
  misc_feature (1)..(449): Homolog of NCBI NO: 11291876 NR Description: hypothetical protein F7A7.140 - Arabidopsis
  misc_feature (1)..(449): Homolog of NCBI NO: 18413698 NR Description: putative protein
MSQRWSRKKSRLPLAGLLFILVVTFMILFNERSIQQIHHHAASHTQNLREPSTFDFVKPNVPRINYLGAHEVLDRFSKCNSTKEYSGKKIGWVDPFEDHPGQVTKEEQKCDVFSGKWVFDNSSSYPLHKESQCPYMSDQLACQKHGRKDLEYQHWRWQPHACNLKRWNAIEMWEKLRGKRLMFVGDSLNRGQWISMVCLLQSVIPRDKQSMSPNAHLTIFRAEDYNATVEFLWAPLLVESNSDDPVNHRLSERIIRPDSVLKHASKWQHADILIFNTYLWWRQDSVKLRWSSEEKGSCEEVKSAEGMEMAMDSWGDWVANNVDPNKKRVFFVTMSPTHQWSREWNPGSEGNCYGEKKPIEEESYWGSGSDIPTMRMVKRVLERLGPKVSVINITQLSEYRKDGHPSVYRKFWEPLNEDRLKNPASYSDCTHWCVPGVPDVWNQLLFHFL

SEQ ID NO: 38721 - protein, 424 aa, Arabidopsis thaliana
  peptide (1)..(424): Ceres Seq. ID no. 12371492
  misc_feature (255)..(424): Pfam Name: Arabidopsis proteins of unknown function Pfam Description: Arabidopsis proteins of unknown function
  misc_feature (78)..(424): Homolog of NCBI NO: 15219382 NR Description: hypothetical protein; protein id: At1g73140.1
  misc_feature (78)..(421): Homolog of NCBI NO: 15228429 NR Description: unknown protein; protein id: At3g11030.1
  misc_feature (78)..(421): Homolog of NCBI NO: 15226647 NR Description: hypothetical protein; protein id: At2g40320.1
  misc_feature (78)..(421): Homolog of NCBI NO: 28393743 NR Description: unknown protein [Arabidopsis thaliana]
  misc_feature (85)..(421): Homolog of NCBI NO: 28876013 NR Description: unknown protein [Oryza sativa (japonica
  misc_feature (83)..(424): Homolog of NCBI NO: 18404712 NR Description: expressed protein
  misc_feature (83)..(424): Homolog of NCBI NO: 7487161 NR Description: hypothetical protein At2g38320 [imported] -
  misc_feature (1)..(424): Homolog of NCBI NO: 21536676 NR Description: unknown [Arabidopsis thaliana]
  misc_feature (1)..(424): Homolog of NCBI NO: 11291876 NR Description: hypothetical protein F7A7.140 - Arabidopsis
  misc_feature (1)..(424): Homolog of NCBI NO: 18413698 NR Description: putative protein
MILFNERSIQQIHHHAASHTQNLREPSTFDFVKPNVPRINYLGAHEVLDRFSKCNSTKEYSGKKIGWVDPFEDHPGQVTKEEQKCDVFSGKWVFDNSSSYPLHKESQCPYMSDQLACQKHGRKDLEYQHWRWQPHACNLKRWNAIEMWEKLRGKRLMFVGDSLNRGQWISMVCLLQSVIPRDKQSMSPNAHLTIFRAEDYNATVEFLWAPLLVESNSDDPVNHRLSERIIRPDSVLKHASKWQHADILIFNTYLWWRQDSVKLRWSSEEKGSCEEVKSAEGMEMAMDSWGDWVANNVDPNKKRVFFVTMSPTHQWSREWNPGSEGNCYGEKKPIEEESYWGSGSDIPTMRMVKRVLERLGPKVSVINITQLSEYRKDGHPSVYRKFWEPLNEDRLKNPASYSDCTHWCVPGVPDVWNQLLFHFL

SEQ ID NO: 38722 - protein, 314 aa, Arabidopsis thaliana
  peptide (1)..(314): Ceres Seq. ID no. 12371493
  misc_feature (145)..(314): Pfam Name: Arabidopsis proteins of unknown function Pfam Description: Arabidopsis proteins of unknown function
  misc_feature (1)..(314): Homolog of NCBI NO: 15219382 NR Description: hypothetical protein; protein id: At1g73140.1
  misc_feature (1)..(311): Homolog of NCBI NO: 15228429 NR Description: unknown protein; protein id: At3g11030.1
  misc_feature (1)..(311): Homolog of NCBI NO: 15226647 NR Description: hypothetical protein; protein id: At2g40320.1
  misc_feature (1)..(311): Homolog of NCBI NO: 28393743 NR Description: unknown protein [Arabidopsis thaliana]
  misc_feature (1)..(311): Homolog of NCBI NO: 28876013 NR Description: unknown protein [Oryza sativa (japonica
  misc_feature (1)..(314): Homolog of NCBI NO: 18404712 NR Description: expressed protein
  misc_feature (1)..(314): Homolog of NCBI NO: 7487161 NR Description: hypothetical protein At2g38320 [imported] -
  misc_feature (1)..(314): Homolog of NCBI NO: 21536676 NR Description: unknown [Arabidopsis thaliana]
  misc_feature (1)..(314): Homolog of NCBI NO: 11291876 NR Description: hypothetical protein F7A7.140 - Arabidopsis
  misc_feature (1)..(314): Homolog of NCBI NO: 18413698 NR Description: putative protein
MSDQLACQKHGRKDLEYQHWRWQPHACNLKRWNAIEMWEKLRGKRLMFVGDSLNRGQWISMVCLLQSVIPRDKQSMSPNAHLTIFRAEDYNATVEFLWAPLLVESNSDDPVNHRLSERIIRPDSVLKHASKWQHADILIFNTYLWWRQDSVKLRWSSEEKGSCEEVKSAEGMEMAMDSWGDWVANNVDPNKKRVFFVTMSPTHQWSREWNPGSEGNCYGEKKPIEEESYWGSGSDIPTMRMVKRVLERLGPKVSVINITQLSEYRKDGHPSVYRKFWEPLNEDRLKNPASYSDCTHWCVPGVPDVWNQLLFHFL

SEQ ID NO: 38723 - DNA, 1885 bp, Arabidopsis thaliana
  misc_feature (1)..(1885): Ceres Seq. ID no. 12482192
  misc_feature: MA Experiment ID: 108434 Result: Up-regulated in Transcription
  misc_feature: MA Experiment 108434 PARAMETER Experiment Name: At_Root_Tips_cDNA_P Parameter: Tissue Value: Root Tips
  misc_feature: MA Experiment ID: 108461 Result: Down-regulated in Transcription
  misc_feature: MA Experiment 108461 PARAMETER Experiment Name: At_Germinating_Seeds_cDNA_P Parameter: Age (day) Value: 1 vs. 0
  misc_feature: MA Experiment 108461 PARAMETER Experiment Name: At_Germinating_Seeds_cDNA_P Parameter: Tissue Value: Germinating Seeds
  misc_feature: MA Experiment ID: 108462 Result: Down-regulated in Transcription
  misc_feature: MA Experiment 108462 PARAMETER Experiment Name: At_Germinating_Seeds_cDNA_P Parameter: Age (day) Value: 2 vs. 0
  misc_feature: MA Experiment 108462 PARAMETER Experiment Name: At_Germinating_Seeds_cDNA_P Parameter: Tissue Value: Germinating Seeds
  misc_feature: MA Experiment ID: 108463 Result: Down-regulated in Transcription
  misc_feature: MA Experiment 108463 PARAMETER Experiment Name: At_Germinating_Seeds_cDNA_P Parameter: Age (day) Value: 3 vs. 0
  misc_feature: MA Experiment 108463 PARAMETER Experiment Name: At_Germinating_Seeds_cDNA_P Parameter: Tissue Value: Germinating Seeds
  misc_feature: MA Experiment ID: 20000180 Result: Down-regulated in Transcription
  misc_feature: MA Experiment 20000180 PARAMETER Experiment Name: At_Germinating_Seeds_P Parameter: Age (hr) Value: 24 vs. 0
  misc_feature: MA Experiment 20000180 PARAMETER Experiment Name: At_Germinating_Seeds_P Parameter: Tissue Value: Germinating Seeds
  misc_feature: MA Experiment ID: 20001558 Result: Up-regulated in Transcription
  misc_feature: MA Experiment 20001558 PARAMETER Experiment Name: At_Drought_Soil_Dry_P Parameter: Age (day) Value: 27
  misc_feature: MA Experiment 20001558 PARAMETER Experiment Name: At_Drought_Soil_Dry_P Parameter: Organism Value: A. thaliana
  misc_feature: MA Experiment 20001558 PARAMETER Experiment Name: At_Drought_Soil_Dry_P Parameter: Plant Line Value: WS
  misc_feature: MA Experiment 20001558 PARAMETER Experiment Name: At_Drought_Soil_Dry_P Parameter: Post Timepoint (hr) Value: 6
  misc_feature: MA Experiment 20001558 PARAMETER Experiment Name: At_Drought_Soil_Dry_P Parameter: Post-Treatment Value: Re-Water vs. No Drought
  misc_feature: MA Experiment 20001558 PARAMETER Experiment Name: At_Drought_Soil_Dry_P Parameter: Timepoint (day) Value: 13
  misc_feature: MA Experiment 20001558 PARAMETER Experiment Name: At_Drought_Soil_Dry_P Parameter: Treatment Value: Drought vs. No Drought
ggtgatctctgtgctccggcgcataaacccctgtaaagccaataacttgttgttccccaaagtttggttcttcatgttggaaaccgaaagcagtgtctgcgacaacatcgccggcaatgagaaatggcgagcggaagctgaaattggtggcaacgagagagctctgcaagcgcttcgagaactcattatcttcccttttcgttaccctctcgaagctcgaactcttggtctcaaatggcctagaggattgcttctctacggtcctcctggaaccggcaagacaagcttggtccgtgctgttgtccaggaatgtgatgcacatttgattgttttaagccctcattctgtacatcgagcacatgctggagaaagcgagaaagtcttaagggaagctttcgctgaggcttcttctcacgctgtttcagacaagccttctgtgatttttattgatgaaatcgatgttctttgtcctcgtcgtgatgctagacgagaacaagatgttcgtattgcttctcaactgtttacacttatggactcaaacaagccttcatcatctgcaccaagagttgttgttgtagcatccacaaatagggtggatgcgattgacccagcgctaagaagagcgggacgatttgatgctttagttgaagtgagcacaccaaatgaggaggatcgtttaaaaatcctgcagctgtacacaaagaaagtcaatttagatcctagtgtcgatcttcaagccattgcaatatcttgcaacggttatgttggagcagatttggaagctttatgtcgtgaagcgacaatatctgcaagtaaaagatcttcagattctcttattctaacatctcaagacttcaagattgcaaaatctgtggttggtccaagtataaacagaggcatcacagttgaaatccctaaagtgacatgggacgatgttggtggtcttaaagacttaaagaaaaagctccagcaagctgttgaatggccaatcaaacattcagctgcatttgtaaaaatgggcatatcgccaatgcgtgggatacttctacatggtcctccaggttgctcaaagacaactcttgctaaagccgctgcaaatgctgctcaagcctccttcttttccttaagctgtgcggagctattttctatgtatgttggagaaggtgaagcattattgcggaatacatttcaaagagctcgacttgcttctccaagtataatattctttgatgaagctgatgtcgttgcctgtaaaagaggtgatgagagctcaagcaatagttctacagttggagaaaggcttctatctacactgttaaccgaaatggacggtcttgaagaagcaaagggaatcctcgtcttggctgccacaaaccgcccgtatgcaattgatgctgctctaatgcgacctggtcgatttgatctcgtgctatacgtgccaccgcctgatctagaagcccggtttgaaatactgcaagtgcatacacgcaacatgacactaggagacgacgttgatctcagaaaaatcgctgaagaaaccgatctcttcacaggtgccgagctcgagggtctatgcagagaaagcggaactgtctcacttagagaaaacatcgcagcaaccgctgtcttcaatcgccatttccaaaccgcaaaaagctcgcttaaaccagcgttaacaatcgaagaagtcgaaacttattcatcattcaggaaggcggcgaaaagatctgattcgaaaccgattccgattaacaaaaagaaggcgacttccaccgtcttcggattctcatggcaattaggtgttttgagcttattgttgcttgctactggaaactattacttcaaccacactaaacatgaattactagtagcttctgctacatga

SEQ ID NO: 38724 - protein, 627 aa, Arabidopsis thaliana
  peptide (1)..(627): Ceres Seq. ID no. 12482193
  misc_feature (82)..(272): Pfam Name: ATPase family associated with various cellular Pfam Description: ATPase family associated with various cellular
  misc_feature (47)..(566): Homolog of NCBI NO: 15679634 NR Description: cell division control protein Cdc48
  misc_feature (48)..(558): Homolog of NCBI NO: 21624654 NR Description: spermatogenesis associated factor SPAF [Homo
  misc_feature (47)..(239): Homolog of NCBI NO: 11499681 NR Description: cell division control protein 48, AAA family
  misc_feature (244)..(571): Homolog of NCBI NO: 11499681 NR Description: cell division control protein 48, AAA family
  misc_feature (47)..(566): Homolog of NCBI NO: 11498895 NR Description: cell division control protein 48, AAA family
  misc_feature (2)..(558): Homolog of NCBI NO: 12847023 NR Description: unnamed protein product [Mus musculus]
  misc_feature (2)..(558): Homolog of NCBI NO: 10946660 NR Description: spermatogenesis associated factor [Mus musculus]
  misc_feature (47)..(575): Homolog of NCBI NO: 14602090 NR Description: transitional endoplasmic reticulum ATPase
  misc_feature (41)..(568): Homolog of NCBI NO: 38345020 NR Description: OSJNBa0029H02.4 [Oryza sativa (japonica
  misc_feature (25)..(627): Homolog of NCBI NO: 15227690 NR Description: putative AAA-type ATPase
VISVLRRINPCKANNLLFPKVWFFMLETESSVCDNIAGNEKWRAEAEIGGNERALQALRELIIFPFRYPLEARTLGLKWPRGLLLYGPPGTGKTSLVRAVVQECDAHLIVLSPHSVHRAHAGESEKVLREAFAEASSHAVSDKPSVIFIDEIDVLCPRRDARREQDVRIASQLFTLMDSNKPSSSAPRVVVVASTNRVDAIDPALRRAGRFDALVEVSTPNEEDRLKILQLYTKKVNLDPSVDLQAIAISCNGYVGADLEALCREATISASKRSSDSLILTSQDFKIAKSVVGPSINRGITVEIPKVTWDDVGGLKDLKKKLQQAVEWPIKHSAAFVKMGISPMRGILLHGPPGCSKTTLAKAAANAAQASFFSLSCAELFSMYVGEGEALLRNTFQRARLASPSIIFFDEADVVACKRGDESSSNSSTVGERLLSTLLTEMDGLEEAKGILVLAATNRPYAIDAALMRPGRFDLVLYVPPPDLEARFEILQVHTRNMTLGDDVDLRKIAEETDLFTGAELEGLCRESGTVSLRENIAATAVFNRHFQTAKSSLKPALTIEEVETYSSFRKAAKRSDSKPIPINKKKATSTVFGFSWQLGVLSLLLLATGNYYFNHTKHELLVASAT

SEQ ID NO: 38725 - protein, 603 aa, Arabidopsis thaliana
  peptide (1)..(603): Ceres Seq. ID no. 12482194
  misc_feature (58)..(248): Pfam Name: ATPase family associated with various cellular Pfam Description: ATPase family associated with various cellular
  misc_feature (23)..(542): Homolog of NCBI NO: 15679634 NR Description: cell division control protein Cdc48
  misc_feature (24)..(534): Homolog of NCBI NO: 21624654 NR Description: spermatogenesis associated factor SPAF [Homo
  misc_feature (23)..(215): Homolog of NCBI NO: 11499681 NR Description: cell division control protein 48, AAA family
  misc_feature (220)..(547): Homolog of NCBI NO: 11499681 NR Description: cell division control protein 48, AAA family
  misc_feature (23)..(542): Homolog of NCBI NO: 11498895 NR Description: cell division control protein 48, AAA family
  misc_feature (1)..(534): Homolog of NCBI NO: 12847023 NR Description: unnamed protein product [Mus musculus]
  misc_feature (1)..(534): Homolog of NCBI NO: 10946660 NR Description: spermatogenesis associated factor [Mus musculus]
  misc_feature (23)..(551): Homolog of NCBI NO: 14602090 NR Description: transitional endoplasmic reticulum ATPase
  misc_feature (17)..(544): Homolog of NCBI NO: 38345020 NR Description: OSJNBa0029H02.4 [Oryza sativa (japonica
  misc_feature (1)..(603): Homolog of NCBI NO: 15227690 NR Description: putative AAA-type ATPase
MLETESSVCDNIAGNEKWRAEAEIGGNERALQALRELIIFPFRYPLEARTLGLKWPRGLLLYGPPGTGKTSLVRAVVQECDAHLIVLSPHSVHRAHAGESEKVLREAFAEASSHAVSDKPSVIFIDEIDVLCPRRDARREQDVRIASQLFTLMDSNKPSSSAPRVVVVASTNRVDAIDPALRRAGRFDALVEVSTPNEEDRLKILQLYTKKVNLDPSVDLQAIAISCNGYVGADLEALCREATISASKRSSDSLILTSQDFKIAKSVVGPSINRGITVEIPKVTWDDVGGLKDLKKKLQQAVEWPIKHSAAFVKMGISPMRGILLHGPPGCSKTTLAKAAANAAQASFFSLSCAELFSMYVGEGEALLRNTFQRARLASPSIIFFDEADVVACKRGDESSSNSSTVGERLLSTLLTEMDGLEEAKGILVLAATNRPYAIDAALMRPGRFDLVLYVPPPDLEARFEILQVHTRNMTLGDDVDLRKIAEETDLFTGAELEGLCRESGTVSLRENIAATAVFNRHFQTAKSSLKPALTIEEVETYSSFRKAAKRSDSKPIPINKKKATSTVFGFSWQLGVLSLLLLATGNYYFNHTKHELLVASAT

SEQ ID NO: 38726 - protein, 451 aa, Arabidopsis thaliana
  peptide (1)..(451): Ceres Seq. ID no. 12482195
  misc_feature (1)..(96): Pfam Name: ATPase family associated with various cellular Pfam Description: ATPase family associated with various cellular
  misc_feature (1)..(390): Homolog of NCBI NO: 15679634 NR Description: cell division control protein Cdc48
  misc_feature (1)..(382): Homolog of NCBI NO: 21624654 NR Description: spermatogenesis associated factor SPAF [Homo
  misc_feature (1)..(63): Homolog of NCBI NO: 11499681 NR Description: cell division control protein 48, AAA family
  misc_feature (68)..(395): Homolog of NCBI NO: 11499681 NR Description: cell division control protein 48, AAA family
  misc_feature (1)..(390): Homolog of NCBI NO: 11498895 NR Description: cell division control protein 48, AAA family
  misc_feature (1)..(382): Homolog of NCBI NO: 12847023 NR Description: unnamed protein product [Mus musculus]
  misc_feature (1)..(382): Homolog of NCBI NO: 10946660 NR Description: spermatogenesis associated factor [Mus musculus]
  misc_feature (1)..(399): Homolog of NCBI NO: 14602090 NR Description: transitional endoplasmic reticulum ATPase
  misc_feature (1)..(392): Homolog of NCBI NO: 38345020 NR Description: OSJNBa0029H02.4 [Oryza sativa (japonica
  misc_feature (1)..(451): Homolog of NCBI NO: 15227690 NR Description: putative AAA-type ATPase
MDSNKPSSSAPRVVVVASTNRVDAIDPALRRAGRFDALVEVSTPNEEDRLKILQLYTKKVNLDPSVDLQAIAISCNGYVGADLEALCREATISASKRSSDSLILTSQDFKIAKSVVGPSINRGITVEIPKVTWDDVGGLKDLKKKLQQAVEWPIKHSAAFVKMGISPMRGILLHGPPGCSKTTLAKAAANAAQASFFSLSCAELFSMYVGEGEALLRNTFQRARLASPSIIFFDEADVVACKRGDESSSNSSTVGERLLSTLLTEMDGLEEAKGILVLAATNRPYAIDAALMRPGRFDLVLYVPPPDLEARFEILQVHTRNMTLGDDVDLRKIAEETDLFTGAELEGLCRESGTVSLRENIAATAVFNRHFQTAKSSLKPALTIEEVETYSSFRKAAKRSDSKPIPINKKKATSTVFGFSWQLGVLSLLLLATGNYYFNHTKHELLVASAT

SEQ ID NO: 38727 - DNA, 1208 bp, Arabidopsis thaliana
  misc_feature (1)..(1208): Ceres Seq. ID no. 12422009
  misc_feature: MA Experiment ID: 108573 Result: Up-regulated in Transcription
  misc_feature: MA Experiment 108573 PARAMETER Experiment Name: At_Drought_cDNA_P Parameter: Timepoint (hr) Value: 6
  misc_feature: MA Experiment 108573 PARAMETER Experiment Name: At_Drought_cDNA_P Parameter: Tissue Value: Aerial
  misc_feature: MA Experiment 108573 PARAMETER Experiment Name: At_Drought_cDNA_P Parameter: Treatment Value: Drought vs. No Drought
  misc_feature: MA Experiment ID: 108595 Result: Down-regulated in Transcription
  misc_feature: MA Experiment 108595 PARAMETER Experiment Name: At_Ler-pi_Ovule_cDNA_P Parameter: Plant Line Value: null
  misc_feature: MA Experiment ID: 20000224 Result: Down-regulated in Transcription
  misc_feature: MA Experiment ID: 20001558 Result: Down-regulated in Transcription
  misc_feature: MA Experiment 20001558 PARAMETER Experiment Name: At_Drought_Soil_Dry_P Parameter: Age (day) Value: 27
  misc_feature: MA Experiment 20001558 PARAMETER Experiment Name: At_Drought_Soil_Dry_P Parameter: Organism Value: A. thaliana
  misc_feature: MA Experiment 20001558 PARAMETER Experiment Name: At_Drought_Soil_Dry_P Parameter: Plant Line Value: WS
  misc_feature: MA Experiment 20001558 PARAMETER Experiment Name: At_Drought_Soil_Dry_P Parameter: Post Timepoint (hr) Value: 6
  misc_feature: MA Experiment 20001558 PARAMETER Experiment Name: At_Drought_Soil_Dry_P Parameter: Post-Treatment Value: Re-Water vs. No Drought
  misc_feature: MA Experiment 20001558 PARAMETER Experiment Name: At_Drought_Soil_Dry_P Parameter: Timepoint (day) Value: 13
  misc_feature: MA Experiment 20001558 PARAMETER Experiment Name: At_Drought_Soil_Dry_P Parameter: Treatment Value: Drought vs. No Drought
  misc_feature: Phenotype: ROSETTE LEAVES Shape-Lanceolate
  misc_feature: Phenotype: INFLORESCENCE Height-Short
  misc_feature: Phenotype: INFLORESCENCE Other
  misc_feature: Phenotype: FERTILITY Fertility-Reduced
  misc_feature: Phenotype: FERTILITY Fertility-Sterile
  misc_feature: Phenotype: WHOLE PLANT Size-Small
  misc_feature: Phenotype: INFLORESCENCE Height-Tall
  misc_feature: Phenotype: FERTILITY Fertility-Reduced
  misc_feature: Phenotype: ROSETTE LEAVES Shape-Lanceolate
  misc_feature: Phenotype: INFLORESCENCE Other
  misc_feature: Phenotype: SILIQUES Length-Short
  misc_feature: Phenotype: FERTILITY Fertility-Reduced
  misc_feature: Phenotype: ROSETTE LEAVES Shape-Lanceolate
  misc_feature: Phenotype: FLOWERS Other
  misc_feature: Phenotype: FERTILITY Fertility-Reduced
  misc_feature: Phenotype: FERTILITY Fertility-Sterile
aaaaatcgaatcaagcatcttcttctttcacgtacgaaacaaaaagctcagagcagagtcgaatcgcgatgaagcatcgagttcggtgttcatgaaggtcagagagttaagtattagcagaactggttaggtcttagtgacaaacaaggtattcatgttatccatccctgatactagaatgtggaatctagcatcgagttatcttacgggaaacattggaccgaaaaacgatatcagaagaccggtccatgctcatgcggagtgttcagatgacgatgtatcttctgtaggtagtaaagacgaaggtctcgagtgtcctatatgctgggaatcatttaatatagttgaaaacgttccgtatgtgttatggtgtggacatacgatgtgtaaaaactgcattttgggacttcaatgggctattgtgaaattgcctactcacccggttcagcttcctctcttcatttcatgcccctggtgcaaccttttgtctttccgtctggtcttcagaggaacactcagattccctcacaagaactactttgtgctttggatggtcgagaggatgaatggagagagacgtaactcacctggtggagctcaaacagatggaaacaatgatcatacaagggaaactccatctccatgtctccacaatcgccatcatcgcagtcaacctgaaccatcacgttctgttaatgatcatcgcattccaagggacaacatacaaacttcactgaggaagtctctggttttctttgtccagttgacagcaaagttcccattagttgtcatatttctgctgataatactctatgcaataccgaccagtgcagccatattggcgatgtacattctagtcactctcttgctggctctaccgtcgtttctcatcctctacttcgcttatccttgtctcgactggcttgttcgagagattgtcacatgaactttctaaggatgcgttcagaaacttcccattcctaatttgacgacttttcttcaacaactgagacccaagatcggtcagtccttcatgtaagtataacaatttcataattaccgtcttctttatctatatatggatgtagttttggattgcattgttgctctacgaagctggacgtatgtgttgtaagggctcttgcagaaacttattagtatttgtggatttgtttgtgagtgtttgagtgtctcaataagatttatgt

SEQ ID NO: 38728 - protein, 263 aa, Arabidopsis thaliana
  peptide (1)..(263): Ceres Seq. ID no. 12422010
  misc_feature (54)..(108): Pfam Name: Zinc finger, C3HC4 type (RING finger) Pfam Description: Zinc finger, C3HC4 type (RING finger)
  misc_feature (9)..(263): Homolog of NCBI NO: 21592563 NR Description: putative RING zinc finger protein [Arabidopsis
  misc_feature (9)..(263): Homolog of NCBI NO: 15221223 NR Description: putative RING zinc finger protein
  misc_feature (9)..(263): Homolog of NCBI NO: 21594048 NR Description: unknown [Arabidopsis thaliana]
  misc_feature (9)..(263): Homolog of NCBI NO: 18409246 NR Description: expressed protein
  misc_feature (9)..(263): Homolog of NCBI NO: 11994767 NR Description: RING zinc finger protein-like [Arabidopsis
  misc_feature (1)..(263): Homolog of NCBI NO: 15228658 NR Description: unknown protein; protein id: At3g29270.1
MLSIPDTRMWNLASSYLTGNIGPKNDIRRPVHAHAECSDDDVSSVGSKDEGLECPICWESFNIVENVPYVLWCGHTMCKNCILGLQWAIVKLPTHPVQLPLFISCPWCNLLSFRLVFRGTLRFPHKNYFVLWMVERMNGERRNSPGGAQTDGNNDHTRETPSPCLHNRHHRSQPEPSRSVNDHRIPRDNIQTSLRKSLVFFVQLTAKFPLVVIFLLIILYAIPTSAAILAMYILVTLLLALPSFLILYFAYPCLDWLVREIVT

SEQ ID NO: 38729 - protein, 255 aa, Arabidopsis thaliana
  peptide (1)..(255): Ceres Seq. ID no. 12422011
  misc_feature (46)..(100): Pfam Name: Zinc finger, C3HC4 type (RING finger) Pfam Description: Zinc finger, C3HC4 type (RING finger)
  misc_feature (1)..(255): Homolog of NCBI NO: 21592563 NR Description: putative RING zinc finger protein [Arabidopsis
  misc_feature (1)..(255): Homolog of NCBI NO: 15221223 NR Description: putative RING zinc finger protein
  misc_feature (1)..(255): Homolog of NCBI NO: 21594048 NR Description: unknown [Arabidopsis thaliana]
  misc_feature (1)..(255): Homolog of NCBI NO: 18409246 NR Description: expressed protein
  misc_feature (1)..(255): Homolog of NCBI NO: 11994767 NR Description: RING zinc finger protein-like [Arabidopsis
  misc_feature (1)..(255): Homolog of NCBI NO: 15228658 NR Description: unknown protein; protein id: At3g29270.1
MWNLASSYLTGNIGPKNDIRRPVHAHAECSDDDVSSVGSKDEGLECPICWESFNIVENVPYVLWCGHTMCKNCILGLQWAIVKLPTHPVQLPLFISCPWCNLLSFRLVFRGTLRFPHKNYFVLWMVERMNGERRNSPGGAQTDGNNDHTRETPSPCLHNRHHRSQPEPSRSVNDHRIPRDNIQTSLRKSLVFFVQLTAKFPLVVIFLLIILYAIPTSAAILAMYILVTLLLALPSFLILYFAYPCLDWLVREIVT

SEQ ID NO: 38730 - protein, 187 aa, Arabidopsis thaliana
  peptide (1)..(187): Ceres Seq. ID no. 12422012
  misc_feature (1)..(187): Homolog of NCBI NO: 21592563 NR Description: putative RING zinc finger protein [Arabidopsis
  misc_feature (1)..(187): Homolog of NCBI NO: 15221223 NR Description: putative RING zinc finger protein
  misc_feature (1)..(187): Homolog of NCBI NO: 21594048 NR Description: unknown [Arabidopsis thaliana]
  misc_feature (1)..(187): Homolog of NCBI NO: 18409246 NR Description: expressed protein
  misc_feature (1)..(187): Homolog of NCBI NO: 11994767 NR Description: RING zinc finger protein-like [Arabidopsis
  misc_feature (1)..(187): Homolog of NCBI NO: 15228658 NR Description: unknown protein; protein id: At3g29270.1
MCKNCILGLQWAIVKLPTHPVQLPLFISCPWCNLLSFRLVFRGTLRFPHKNYFVLWMVERMNGERRNSPGGAQTDGNNDHTRETPSPCLHNRHHRSQPEPSRSVNDHRIPRDNIQTSLRKSLVFFVQLTAKFPLVVIFLLIILYAIPTSAAILAMYILVTLLLALPSFLILYFAYPCLDWLVREIVT

SEQ ID NO: 38731 - DNA, 1563 bp, Arabidopsis thaliana
  misc_feature (1)..(1563): Ceres Seq. ID no. 12329827
  misc_feature: MA Experiment ID: 108462 Result: Down-regulated in Transcription
  misc_feature: MA Experiment 108462 PARAMETER Experiment Name: At_Germinating_Seeds_cDNA_P Parameter: Age (day) Value: 2 vs. 0
  misc_feature: MA Experiment 108462 PARAMETER Experiment Name: At_Germinating_Seeds_cDNA_P Parameter: Tissue Value: Germinating Seeds
  misc_feature: MA Experiment ID: 108463 Result: Down-regulated in Transcription
  misc_feature: MA Experiment 108463 PARAMETER Experiment Name: At_Germinating_Seeds_cDNA_P Parameter: Age (day) Value: 3 vs. 0
  misc_feature: MA Experiment 108463 PARAMETER Experiment Name: At_Germinating_Seeds_cDNA_P Parameter: Tissue Value: Germinating Seeds
  misc_feature: MA Experiment ID: 108473 Result: Up-regulated in Transcription
  misc_feature: MA Experiment 108473 PARAMETER Experiment Name: At_Drought_Flowers_cDNA_P Parameter: Timepoint (hr) Value: 7 d
  misc_feature: MA Experiment 108473 PARAMETER Experiment Name: At_Drought_Flowers_cDNA_P Parameter: Tissue Value: Flower
  misc_feature: MA Experiment 108473 PARAMETER Experiment Name: At_Drought_Flowers_cDNA_P Parameter: Treatment Value: Drought vs. No Drought
  misc_feature: MA Experiment ID: 108579 Result: Down-regulated in Transcription
  misc_feature: MA Experiment 108579 PARAMETER Experiment Name: At_4deg_Cold_cDNA_P Parameter: Temperature (deg C) Value: 4 vs. 22
  misc_feature: MA Experiment 108579 PARAMETER Experiment Name: At_4deg_Cold_cDNA_P Parameter: Timepoint (hr) Value: 6
  misc_feature: MA Experiment 108579 PARAMETER Experiment Name: At_4deg_Cold_cDNA_P Parameter: Tissue Value: Aerial
  misc_feature: MA Experiment ID: 108595 Result: Up-regulated in Transcription
  misc_feature: MA Experiment 108595 PARAMETER Experiment Name: At_Ler-pi_Ovule_cDNA_P Parameter: Plant Line Value: null
  misc_feature: MA Experiment ID: 20000179 Result: Up-regulated in Transcription
  misc_feature: MA Experiment 20000179 PARAMETER Experiment Name: At_Germinating_Seeds_P Parameter: Age (hr) Value: 6 vs. 0
  misc_feature: MA Experiment 20000179 PARAMETER Experiment Name: At_Germinating_Seeds_P Parameter: Tissue Value: Germinating Seeds
  misc_feature: MA Experiment ID: 20000180 Result: Up-regulated in Transcription
  misc_feature: MA Experiment 20000180 PARAMETER Experiment Name: At_Germinating_Seeds_P Parameter: Age (hr) Value: 24 vs. 0
  misc_feature: MA Experiment 20000180 PARAMETER Experiment Name: At_Germinating_Seeds_P Parameter: Tissue Value: Germinating Seeds
  misc_feature: MA Experiment ID: 20000184 Result: Down-regulated in Transcription
  misc_feature: MA Experiment 20000184 PARAMETER Experiment Name: At_Shoots__P Parameter: Age (day) Value: 7
  misc_feature: MA Experiment 20000184 PARAMETER Experiment Name: At_Shoots__P Parameter: Tissue Value: Shoots vs. Whole Plant
  misc_feature: MA Experiment ID: 20000234 Result: Up-regulated in Transcription
  misc_feature: MA Experiment 20000234 PARAMETER Experiment Name: At_Siliques_P Parameter: Age (day) Value: 21
  misc_feature: MA Experiment 20000234 PARAMETER Experiment Name: At_Siliques_P Parameter: Organism Value: A. thaliana
  misc_feature: MA Experiment 20000234 PARAMETER Experiment Name: At_Siliques_P Parameter: Plant Line Value: WS
  misc_feature: MA Experiment 20000234 PARAMETER Experiment Name: At_Siliques_P Parameter: Tissue Value: Less Than 5mm Siliques vs. Whole Plant
  misc_feature: MA Experiment ID: 20000265 Result: Down-regulated in Transcription
  misc_feature: MA Experiment 20000265 PARAMETER Experiment Name: At_Open_Flower_P Parameter: Age (day) Value: 21
  misc_feature: MA Experiment 20000265 PARAMETER Experiment Name: At_Open_Flower_P Parameter: Plant Line Value: WS
  misc_feature: MA Experiment 20000265 PARAMETER Experiment Name: At_Open_Flower_P Parameter: Tissue Value: Closed Flower vs. Whole Plant
  misc_feature: MA Experiment ID: 20000437 Result: Up-regulated in Transcription
  misc_feature: MA Experiment 20000437 PARAMETER Experiment Name: At_Drought_P Parameter: Age (day) Value: 8
  misc_feature: MA Experiment 20000437 PARAMETER Experiment Name: At_Drought_P Parameter: Organism Value: A. thaliana
  misc_feature: MA Experiment 20000437 PARAMETER Experiment Name: At_Drought_P Parameter: Plant Line Value: WS
  misc_feature: MA Experiment 20000437 PARAMETER Experiment Name: At_Drought_P Parameter: Timepoint (hr) Value: 24
  misc_feature: MA Experiment 20000437 PARAMETER Experiment Name: At_Drought_P Parameter: Tissue Value: Whole Plant
  misc_feature: MA Experiment 20000437 PARAMETER Experiment Name: At_Drought_P Parameter: Treatment Value: Drought vs. No Drought
  misc_feature: MA Experiment ID: 20000438 Result: Down-regulated in Transcription
  misc_feature: MA Experiment 20000438 PARAMETER Experiment Name: At_Shoots__P Parameter: Age (day) Value: 14
  misc_feature: MA Experiment 20000438 PARAMETER Experiment Name: At_Shoots__P Parameter: Tissue Value: Shoots vs. Whole Plant
  misc_feature: MA Experiment ID: 20001760 Result: Up-regulated in Transcription
  misc_feature: MA Experiment 20001760 PARAMETER Experiment Name: At_50mM_NH4NO3_L-to-H_P Parameter: Timepoint (hr) Value: 2
  misc_feature: MA Experiment 20001760 PARAMETER Experiment Name: At_50mM_NH4NO3_L-to-H_P Parameter: Tissue Value: Siliques
  misc_feature: MA Experiment 20001760 PARAMETER Experiment Name: At_50mM_NH4NO3_L-to-H_P Parameter: Treatment Value: 50mM NH4NO3 vs 100mM Mannitol
  misc_feature: MA Experiment ID: 20001906 Result: Up-regulated in Transcription
  misc_feature: MA Experiment 20001906 PARAMETER Experiment Name: At_Drought_Reproduction_P Parameter: Age (day) Value: 35
  misc_feature: MA Experiment 20001906 PARAMETER Experiment Name: At_Drought_Reproduction_P Parameter: Organism Value: A. thaliana
  misc_feature: MA Experiment 20001906 PARAMETER Experiment Name: At_Drought_Reproduction_P Parameter: Plant Line Value: WS
  misc_feature: MA Experiment 20001906 PARAMETER Experiment Name: At_Drought_Reproduction_P Parameter: Timepoint (day) Value: 5
  misc_feature: MA Experiment 20001906 PARAMETER Experiment Name: At_Drought_Reproduction_P Parameter: Tissue Value: Siliques
  misc_feature: MA Experiment 20001906 PARAMETER Experiment Name: At_Drought_Reproduction_P Parameter: Treatment Value: Drought vs. No Drought
  misc_feature: MA Experiment ID: 20001908 Result: Up-regulated in Transcription
  misc_feature: MA Experiment 20001908 PARAMETER Experiment Name: At_Drought_Reproduction_P Parameter: Age (day) Value: 40
  misc_feature: MA Experiment 20001908 PARAMETER Experiment Name: At_Drought_Reproduction_P Parameter: Organism Value: A. thaliana
  misc_feature: MA Experiment 20001908 PARAMETER Experiment Name: At_Drought_Reproduction_P Parameter: Plant Line Value: WS
  misc_feature: MA Experiment 20001908 PARAMETER Experiment Name: At_Drought_Reproduction_P Parameter: Timepoint (day) Value: 10
  misc_feature: MA Experiment 20001908 PARAMETER Experiment Name: At_Drought_Reproduction_P Parameter: Tissue Value: Siliques
  misc_feature: MA Experiment 20001908 PARAMETER Experiment Name: At_Drought_Reproduction_P Parameter: Treatment Value: Drought vs. No Drought
  misc_feature: MA Experiment ID: 20001910 Result: Up-regulated in Transcription
  misc_feature: MA Experiment 20001910 PARAMETER Experiment Name: At_Drought_Reproduction_P Parameter: Age (day) Value: 37
  misc_feature: MA Experiment 20001910 PARAMETER Experiment Name: At_Drought_Reproduction_P Parameter: Organism Value: A. thaliana
  misc_feature: MA Experiment 20001910 PARAMETER Experiment Name: At_Drought_Reproduction_P Parameter: Plant Line Value: WS
  misc_feature: MA Experiment 20001910 PARAMETER Experiment Name: At_Drought_Reproduction_P Parameter: Timepoint (day) Value: 7
  misc_feature: MA Experiment 20001910 PARAMETER Experiment Name: At_Drought_Reproduction_P Parameter: Tissue Value: Flowers
  misc_feature: MA Experiment 20001910 PARAMETER Experiment Name: At_Drought_Reproduction_P Parameter: Treatment Value: Drought vs. No Drought
  misc_feature: MA Experiment ID: 20001911 Result: Up-regulated in Transcription
  misc_feature: MA Experiment 20001911 PARAMETER Experiment Name: At_Drought_Reproduction_P Parameter: Age (day) Value: 40
  misc_feature: MA Experiment 20001911 PARAMETER Experiment Name: At_Drought_Reproduction_P Parameter: Organism Value: A. thaliana
  misc_feature: MA Experiment 20001911 PARAMETER Experiment Name: At_Drought_Reproduction_P Parameter: Plant Line Value: WS
  misc_feature: MA Experiment 20001911 PARAMETER Experiment Name: At_Drought_Reproduction_P Parameter: Timepoint (day) Value: 10
  misc_feature: MA Experiment 20001911 PARAMETER Experiment Name: At_Drought_Reproduction_P Parameter: Tissue Value: Flowers
  misc_feature: MA Experiment 20001911 PARAMETER Experiment Name: At_Drought_Reproduction_P Parameter: Treatment Value: Drought vs. No Drought
aatcatcatccaaaaacattcttctcacaagaatcagattcaagatagaagtttttcaaacaatgtctagtcctcttggtcactttcagattcttgtttttcttcatgctttgcttatcttctcagctgagtcccgcaaaacccaattgctgaacgataatgatgttgaatctagcgacaagagtgcaaaaggcacacgatgggctgttttagttgctggatcaaatgaatattataactacaggcatcaggctgacatatgccacgcgtatcagatactccgaaaaggcggtttaaaagatgaaaacatcattgtgtttatgtatgatgatatcgcgttttcctcggagaatcctaggcctggagttatcattaataaaccagatggagaagatgtttataaaggagttcctaaggactacactaaagaagctgttaatgttcaaaacttctacaatgtgttacttggaaatgaaagtggcgtcacaggaggaaatggcaaagttgtgaaaagtggtcctaatgataatatcttcatctattatgctgaccatggagctcctggcttaatagcgatgcccactggtgatgaagttatggcaaaagatttcaatgaagtcttggagaagatgcataagagaaaaaaatacaacaagatggtgatctatgttgaagcatgtgaatcaggaagtatgtttgaagggattttaaagaaaaatctcaacatatacgcagtgactgctgctaattctaaagagagcagctggggagtttactgtcctgagtcatatcctcctcctccttctgagattggaacttgtctcggcgatacatttagcatctcttggcttgaggacagtgaccttcatgacatgagcaaagagactttggagcaacaataccacgttgtaaagagaagagtaggatctgatgtaccagagacttctcatgtatgccgtttcggaacagagaagatgcttaaagattatctttcctcttacattggaagaaatcctgaaaacgataacttcactttcacggaatccttttcctcaccaatctctaattctggcttggtcaatccgcgcgatattcctctgctatacctccagagaaagattcaaaaagctccaatgggatcacttgaaagcaaagaagctcagaagaaattgcttgacgaaaagaatcataggaaacaaatcgatcagagcattacagacattctgcggctttcagttaaacaaaccaatgtcttaaatctcttaacttccacaagaacaacaggacagcctcttgtagacgattgggattgcttcaagactctagttaatagcttcaagaatcactgcggtgcaacggtgcattacggattgaagtatacaggagcgcttgccaatatctgcaatatgggagtggatgtgaagcaaactgtttcagccattgaacaagcttgttcgatgtaatgatttgcaaaacaatgtgatattcgactttaaaaatatcaaagttaatttcaataaaactcgatgtagagatggttggttcatgatactacttttacat

SEQ ID NO: 38732 - protein, 486 aa, Arabidopsis thaliana
  peptide (1)..(486): Ceres Seq. ID no. 12329828
  misc_feature (31)..(382): Pfam Name: Peptidase C13 family Pfam Description: Peptidase C13 family
  misc_feature (59)..(484): Homolog of NCBI NO: 27544010 NR Description: vacuolar processing enzyme-2 [Nicotiana tabacum]
  misc_feature (31)..(484): Homolog of NCBI NO: 4589398 NR Description: asparaginyl endopeptidase (VmPE-1A) [Vigna mungo]
  misc_feature (58)..(484): Homolog of NCBI NO: 13183095 NR Description: asparaginyl endopeptidase [Vigna radiata]
  misc_feature (57)..(484): Homolog of NCBI NO: 1351408 NR Description: Vacuolar processing enzyme precursor (VPE)
  misc_feature (58)..(485): Homolog of NCBI NO: 1351411 NR Description: Vacuolar processing enzyme precursor (VPE)
  misc_feature (57)..(484): Homolog of NCBI NO: 4589396 NR Description: asparaginyl endopeptidase (VmPE-1) [Vigna mungo]
  misc_feature (51)..(484): Homolog of NCBI NO: 27544008 NR Description: vacuolar processing enzyme-1b [Nicotiana tabacum]
  misc_feature (56)..(484): Homolog of NCBI NO: 27544006 NR Description: vacuolar processing enzyme-1a [Nicotiana tabacum]
  misc_feature (21)..(486): Homolog of NCBI NO: 21536495 NR Description: vacuolar processing enzyme/asparaginyl
  misc_feature (21)..(486): Homolog of NCBI NO: 15231080 NR Description: vacuolar processing enzyme/asparaginyl
SSSKNILLTRIRFKIEVFQTMSSPLGHFQILVFLHALLIFSAESRKTQLLNDNDVESSDKSAKGTRWAVLVAGSNEYYNYRHQADICHAYQILRKGGLKDENIIVFMYDDIAFSSENPRPGVIINKPDGEDVYKGVPKDYTKEAVNVQNFYNVLLGNESGVTGGNGKVVKSGPNDNIFIYYADHGAPGLIAMPTGDEVMAKDFNEVLEKMHKRKKYNKMVIYVEACESGSMFEGILKKNLNIYAVTAANSKESSWGVYCPESYPPPPSEIGTCLGDTFSISWLEDSDLHDMSKETLEQQYHVVKRRVGSDVPETSHVCRFGTEKMLKDYLSSYIGRNPENDNFTFTESFSSPISNSGLVNPRDIPLLYLQRKIQKAPMGSLESKEAQKKLLDEKNHRKQIDQSITDILRLSVKQTNVLNLLTSTRTTGQPLVDDWDCFKTLVNSFKNHCGATVHYGLKYTGALANICNMGVDVKQTVSAIEQACSM

SEQ ID NO: 38733 - protein, 466 aa, Arabidopsis thaliana
  peptide (1)..(466): Ceres Seq. ID no. 12329829
  misc_feature (11)..(362): Pfam Name: Peptidase C13 family Pfam Description: Peptidase C13 family
  misc_feature (39)..(464): Homolog of NCBI NO: 27544010 NR Description: vacuolar processing enzyme-2 [Nicotiana tabacum]
  misc_feature (11)..(464): Homolog of NCBI NO: 4589398 NR Description: asparaginyl endopeptidase (VmPE-1A) [Vigna mungo]
  misc_feature (38)..(464): Homolog of NCBI NO: 13183095 NR Description: asparaginyl endopeptidase [Vigna radiata]
  misc_feature (37)..(464): Homolog of NCBI NO: 1351408 NR Description: Vacuolar processing enzyme precursor (VPE)
  misc_feature (38)..(465): Homolog of NCBI NO: 1351411 NR Description: Vacuolar processing enzyme precursor (VPE)
  misc_feature (37)..(464): Homolog of NCBI NO: 4589396 NR Description: asparaginyl endopeptidase (VmPE-1) [Vigna mungo]
  misc_feature (31)..(464): Homolog of NCBI NO: 27544008 NR Description: vacuolar processing enzyme-1b [Nicotiana tabacum]
  misc_feature (36)..(464): Homolog of NCBI NO: 27544006 NR Description: vacuolar processing enzyme-1a [Nicotiana tabacum]
  misc_feature (1)..(466): Homolog of NCBI NO: 21536495 NR Description: vacuolar processing enzyme/asparaginyl
  misc_feature (1)..(466): Homolog of NCBI NO: 15231080 NR Description: vacuolar processing enzyme/asparaginyl
MSSPLGHFQILVFLHALLIFSAESRKTQLLNDNDVESSDKSAKGTRWAVLVAGSNEYYNYRHQADICHAYQILRKGGLKDENIIVFMYDDIAFSSENPRPGVIINKPDGEDVYKGVPKDYTKEAVNVQNFYNVLLGNESGVTGGNGKVVKSGPNDNIFIYYADHGAPGLIAMPTGDEVMAKDFNEVLEKMHKRKKYNKMVIYVEACESGSMFEGILKKNLNIYAVTAANSKESSWGVYCPESYPPPPSEIGTCLGDTFSISWLEDSDLHDMSKETLEQQYHVVKRRVGSDVPETSHVCRFGTEKMLKDYLSSYIGRNPENDNFTFTESFSSPISNSGLVNPRDIPLLYLQRKIQKAPMGSLESKEAQKKLLDEKNHRKQIDQSITDILRLSVKQTNVLNLLTSTRTTGQPLVDDWDCFKTLVNSFKNHCGATVHYGLKYTGALANICNMGVDVKQTVSAIEQACSM

SEQ ID NO: 38734 - protein, 380 aa, Arabidopsis thaliana
  peptide (1)..(380): Ceres Seq. ID no. 12329830
  misc_feature (1)..(276): Pfam Name: Peptidase C13 family Pfam Description: Peptidase C13 family
  misc_feature (1)..(378): Homolog of NCBI NO: 27544010 NR Description: vacuolar processing enzyme-2 [Nicotiana tabacum]
  misc_feature (1)..(378): Homolog of NCBI NO: 4589398 NR Description: asparaginyl endopeptidase (VmPE-1A) [Vigna mungo]
  misc_feature (1)..(378): Homolog of NCBI NO: 13183095 NR Description: asparaginyl endopeptidase [Vigna radiata]
  misc_feature (1)..(378): Homolog of NCBI NO: 1351408 NR Description: Vacuolar processing enzyme precursor (VPE)
  misc_feature (1)..(379): Homolog of NCBI NO: 1351411 NR Description: Vacuolar processing enzyme precursor (VPE)
  misc_feature (1)..(378): Homolog of NCBI NO: 4589396 NR Description: asparaginyl endopeptidase (VmPE-1) [Vigna mungo]
  misc_feature (1)..(378): Homolog of NCBI NO: 27544008 NR Description: vacuolar processing enzyme-1b [Nicotiana tabacum]
  misc_feature (1)..(378): Homolog of NCBI NO: 27544006 NR Description: vacuolar processing enzyme-1a [Nicotiana tabacum]
  misc_feature (1)..(380): Homolog of NCBI NO: 21536495 NR Description: vacuolar processing enzyme/asparaginyl
  misc_feature (1)..(380): Homolog of NCBI NO: 15231080 NR Description: vacuolar processing enzyme/asparaginyl
MYDDIAFSSENPRPGVIINKPDGEDVYKGVPKDYTKEAVNVQNFYNVLLGNESGVTGGNGKVVKSGPNDNIFIYYADHGAPGLIAMPTGDEVMAKDFNEVLEKMHKRKKYNKMVIYVEACESGSMFEGILKKNLNIYAVTAANSKESSWGVYCPESYPPPPSEIGTCLGDTFSISWLEDSDLHDMSKETLEQQYHVVKRRVGSDVPETSHVCRFGTEKMLKDYLSSYIGRNPENDNFTFTESFSSPISNSGLVNPRDIPLLYLQRKIQKAPMGSLESKEAQKKLLDEKNHRKQIDQSITDILRLSVKQTNVLNLLTSTRTTGQPLVDDWDCFKTLVNSFKNHCGATVHYGLKYTGALANICNMGVDVKQTVSAIEQACSM

SEQ ID NO: 38735 - DNA, 1604 bp, Arabidopsis thaliana
  misc_feature (1)..(1604): Ceres Seq. ID no. 12330926
  misc_feature: MA Experiment ID: 108434 Result: Up-regulated in Transcription
  misc_feature: MA Experiment 108434 PARAMETER Experiment Name: At_Root_Tips_cDNA_P Parameter: Tissue Value: Root Tips
  misc_feature: MA Experiment ID: 108461 Result: Down-regulated in Transcription
  misc_feature: MA Experiment 108461 PARAMETER Experiment Name: At_Germinating_Seeds_cDNA_P Parameter: Age (day) Value: 1 vs. 0
  misc_feature: MA Experiment 108461 PARAMETER Experiment Name: At_Germinating_Seeds_cDNA_P Parameter: Tissue Value: Germinating Seeds
  misc_feature: MA Experiment ID: 108462 Result: Down-regulated in Transcription
  misc_feature: MA Experiment 108462 PARAMETER Experiment Name: At_Germinating_Seeds_cDNA_P Parameter: Age (day) Value: 2 vs. 0
  misc_feature: MA Experiment 108462 PARAMETER Experiment Name: At_Germinating_Seeds_cDNA_P Parameter: Tissue Value: Germinating Seeds
  misc_feature: MA Experiment ID: 108463 Result: Down-regulated in Transcription
  misc_feature: MA Experiment 108463 PARAMETER Experiment Name: At_Germinating_Seeds_cDNA_P Parameter: Age (day) Value: 3 vs. 0
  misc_feature: MA Experiment 108463 PARAMETER Experiment Name: At_Germinating_Seeds_cDNA_P Parameter: Tissue Value: Germinating Seeds
  misc_feature: MA Experiment ID: 108464 Result: Down-regulated in Transcription
  misc_feature: MA Experiment 108464 PARAMETER Experiment Name: At_Germinating_Seeds_cDNA_P Parameter: Age (day) Value: 4 vs. 0
  misc_feature: MA Experiment 108464 PARAMETER Experiment Name: At_Germinating_Seeds_cDNA_P Parameter: Tissue Value: Germinating Seeds
  misc_feature: MA Experiment ID: 108573 Result: Up-regulated in Transcription
  misc_feature: MA Experiment 108573 PARAMETER Experiment Name: At_Drought_cDNA_P Parameter: Timepoint (hr) Value: 6
  misc_feature: MA Experiment 108573 PARAMETER Experiment Name: At_Drought_cDNA_P Parameter: Tissue Value: Aerial
  misc_feature: MA Experiment 108573 PARAMETER Experiment Name: At_Drought_cDNA_P Parameter: Treatment Value: Drought vs. No Drought
  misc_feature: MA Experiment ID: 20000087 Result: Down-regulated in Transcription
  misc_feature: MA Experiment 20000087 PARAMETER Experiment Name: At_100uM_ABA_Mutants_cDNA_P Parameter: Plant Line Value: WS
  misc_feature: MA Experiment 20000087 PARAMETER Experiment Name: At_100uM_ABA_Mutants_cDNA_P Parameter: Timepoint (hr) Value: 6
  misc_feature: MA Experiment 20000087 PARAMETER Experiment Name: At_100uM_ABA_Mutants_cDNA_P Parameter: Tissue Value: Aerial
  misc_feature: MA Experiment 20000087 PARAMETER Experiment Name: At_100uM_ABA_Mutants_cDNA_P Parameter: Treatment Value: 100uM ABA vs. No Treatment
  misc_feature: MA Experiment ID: 20000111 Result: Up-regulated in Transcription
  misc_feature: MA Experiment 20000111 PARAMETER Experiment Name: At_42deg_Heat_cDNA_P Parameter: Temperature (deg C) Value: 42 vs. 22
  misc_feature: MA Experiment 20000111 PARAMETER Experiment Name: At_42deg_Heat_cDNA_P Parameter: Timepoint (hr) Value: 6
  misc_feature: MA Experiment 20000111 PARAMETER Experiment Name: At_42deg_Heat_cDNA_P Parameter: Tissue Value: Aerial
  misc_feature: MA Experiment ID: 20000224 Result: Down-regulated in Transcription
atctacgacagtcgtaccttttgctaggttatcgtcgtcatgatgcagcagccacctccagcttccaacggtgctgcaacagggccagggcagattccttccgaccaacaagcttacctccagcagcagcagtcgtggatgatgcagcaccagcagcaacaacaaggtcagccgcctgcaggatggaatcagcagtctgcaccgtcttctggtcaaccacagcagcagcagtatggtggtggtggatctcagaatccaggatcagctggtgagatccggtccctgtggatcggtgacttgcagccatggatggatgagaactatctcatgaacgtctttggtcttactggcgaggctacagcagctaaagttattcgcaataaacagaacggatattcagaaggttatggctttattgagtttgtgaaccatgctacagctgagaggaatttacagacttacaatggtgctccgatgccgagcagtgagcaggccttcaggttgaactgggctcagcttggagctggagagagacgccaggctgaagggcctgagcacacagtttttgttggagacttggcacctgatgttaccgaccacatgcttactgaaacgtttaaagctgtgtattcctctgtcaagggagctaaagttgtgaatgataggactactggacggtccaagggttatggatttgtcaggtttgcggatgaaagtgagcagattcgtgccatgactgaaatgaatggtcaatactgctcatcaaggcctatgcgtactggtcctgctgccaacaagaagcctcttacaatgcaaccagcttcatatcagaacactcaaggaaattcaggagaaagtgatccaactaacacaacaatttttgttggagctgtggatcaaagtgtaacagaagatgatttgaagtcagtttttggtcaatttggtgaactagttcatgtgaaaatacccgcaggaaaacgttgcggatttgttcaatacgccaatagggcatgtgctgagcaagcactttctgtgttgaacggaacacaacttgggggacaaagcattcgtctttcatggggtcgcagtccttccaacaaacagactcaacctgatcaagcccagtatggtggtggtggaggatactatgggtatcctcctcaaggatatgaagcatacggatatgcacctcctcctcaggaccctaacgcctactacggtggttatgctgggggcggctatggaaactaccagcagcctggtggataccagcagcaacagcagtgaagcatgatgtgtaagtcgtgatcgagctgaagttgtagaaagctgtaaccgtttgacaatggtgaatgaattattgaagtggatgtgtattagctcttcttgtctcagattctctcttcaactcttttttttttcttttggattatttttctttcgcgtggctattgttgagtgtccttgcaagtcataacaaaaagcttaaacacaagtgttttttttttttttttttgctgtaccatttcttcttgtatcacctatgacttccaattattcagtagtaccctcataatttttcaataatactcgttttgtgatcc

SEQ ID NO: 38736 - protein, 415 aa, Arabidopsis thaliana
  peptide (1)..(415): Ceres Seq. ID no. 12330927
  misc_feature (175)..(247): Pfam Name: RNA recognition motif. (a.k.a. RRM, RBD, or RNP domain) Pfam Description: RNA recognition motif. (a.k.a. RRM, RBD, or RNP
  misc_feature (2)..(413): Homolog of NCBI NO: 39545835 NR Description: OSJNBb0060E08.6 [Oryza sativa (japonica
  misc_feature (2)..(415): Homolog of NCBI NO: 40253807 NR Description: putative RNA Binding Protein 45
  misc_feature (39)..(415): Homolog of NCBI NO: 21592583 NR Description: putative DNA binding protein [Arabidopsis
  misc_feature (39)..(415): Homolog of NCBI NO: 15221071 NR Description: RNA binding protein 45 (RBP45), putative
  misc_feature (1)..(415): Homolog of NCBI NO: 34896988 NR Description: putative RNA binding protein [Oryza sativa]
  misc_feature (10)..(407): Homolog of NCBI NO: 9663767 NR Description: RNA Binding Protein 45 [Nicotiana plumbaginifolia]
  misc_feature (7)..(406): Homolog of NCBI NO: 18423684 NR Description: RNA binding protein 45 (RBP45), putative
  misc_feature (7)..(406): Homolog of NCBI NO: 9758270 NR Description: contains similarity to polyadenylate-binding
  misc_feature (1)..(415): Homolog of NCBI NO: 18416906 NR Description: RNA binding protein 45 (RBP45), putative
  misc_feature (1)..(415): Homolog of NCBI NO: 7485342 NR Description: hypothetical protein F10M23.340 - Arabidopsis
MMQQPPPASNGAATGPGQIPSDQQAYLQQQQSWMMQHQQQQQGQPPAGWNQQSAPSSGQPQQQQYGGGGSQNPGSAGEIRSLWIGDLQPWMDENYLMNVFGLTGEATAAKVIRNKQNGYSEGYGFIEFVNHATAERNLQTYNGAPMPSSEQAFRLNWAQLGAGERRQAEGPEHTVFVGDLAPDVTDHMLTETFKAVYSSVKGAKVVNDRTTGRSKGYGFVRFADESEQIRAMTEMNGQYCSSRPMRTGPAANKKPLTMQPASYQNTQGNSGESDPTNTTIFVGAVDQSVTEDDLKSVFGQFGELVHVKIPAGKRCGFVQYANRACAEQALSVLNGTQLGGQSIRLSWGRSPSNKQTQPDQAQYGGGGGYYGYPPQGYEAYGYAPPPQDPNAYYGGYAGGGYGNYQQPGGYQQQQQ

SEQ ID NO: 38737 - protein, 414 aa, Arabidopsis thaliana
  peptide (1)..(414): Ceres Seq. ID no. 12330928
  misc_feature (174)..(246): Pfam Name: RNA recognition motif. (a.k.a. RRM, RBD, or RNP domain) Pfam Description: RNA recognition motif. (a.k.a. RRM, RBD, or RNP
  misc_feature (1)..(412): Homolog of NCBI NO: 39545835 NR Description: OSJNBb0060E08.6 [Oryza sativa (japonica
  misc_feature (1)..(414): Homolog of NCBI NO: 40253807 NR Description: putative RNA Binding Protein 45
  misc_feature (38)..(414): Homolog of NCBI NO: 21592583 NR Description: putative DNA binding protein [Arabidopsis
  misc_feature (38)..(414): Homolog of NCBI NO: 15221071 NR Description: RNA binding protein 45 (RBP45), putative
  misc_feature (1)..(414): Homolog of NCBI NO: 34896988 NR Description: putative RNA binding protein [Oryza sativa]
  misc_feature (9)..(406): Homolog of NCBI NO: 9663767 NR Description: RNA Binding Protein 45 [Nicotiana plumbaginifolia]
  misc_feature (6)..(405): Homolog of NCBI NO: 18423684 NR Description: RNA binding protein 45 (RBP45), putative
  misc_feature (6)..(405): Homolog of NCBI NO: 9758270 NR Description: contains similarity to polyadenylate-binding
  misc_feature (1)..(414): Homolog of NCBI NO: 18416906 NR Description: RNA binding protein 45 (RBP45), putative
  misc_feature (1)..(414): Homolog of NCBI NO: 7485342 NR Description: hypothetical protein F10M23.340 - Arabidopsis
MQQPPPASNGAATGPGQIPSDQQAYLQQQQSWMMQHQQQQQGQPPAGWNQQSAPSSGQPQQQQYGGGGSQNPGSAGEIRSLWIGDLQPWMDENYLMNVFGLTGEATAAKVIRNKQNGYSEGYGFIEFVNHATAERNLQTYNGAPMPSSEQAFRLNWAQLGAGERRQAEGPEHTVFVGDLAPDVTDHMLTETFKAVYSSVKGAKVVNDRTTGRSKGYGFVRFADESEQIRAMTEMNGQYCSSRPMRTGPAANKKPLTMQPASYQNTQGNSGESDPTNTTIFVGAVDQSVTEDDLKSVFGQFGELVHVKIPAGKRCGFVQYANRACAEQALSVLNGTQLGGQSIRLSWGRSPSNKQTQPDQAQYGGGGGYYGYPPQGYEAYGYAPPPQDPNAYYGGYAGGGYGNYQQPGGYQQQQQ

SEQ ID NO: 38738 - protein, 382 aa, Arabidopsis thaliana
  peptide (1)..(382): Ceres Seq. ID no. 12330929
  misc_feature (142)..(214): Pfam Name: RNA recognition motif. (a.k.a. RRM, RBD, or RNP domain) Pfam Description: RNA recognition motif. (a.k.a. RRM, RBD, or RNP
  misc_feature (1)..(380): Homolog of NCBI NO: 39545835 NR Description: OSJNBb0060E08.6 [Oryza sativa (japonica
  misc_feature (1)..(382): Homolog of NCBI NO: 40253807 NR Description: putative RNA Binding Protein 45
  misc_feature (6)..(382): Homolog of NCBI NO: 21592583 NR Description: putative DNA binding protein [Arabidopsis
  misc_feature (6)..(382): Homolog of NCBI NO: 15221071 NR Description: RNA binding protein 45 (RBP45), putative
  misc_feature (1)..(382): Homolog of NCBI NO: 34896988 NR Description: putative RNA binding protein [Oryza sativa]
  misc_feature (1)..(374): Homolog of NCBI NO: 9663767 NR Description: RNA Binding Protein 45 [Nicotiana plumbaginifolia]
  misc_feature (1)..(373): Homolog of NCBI NO: 18423684 NR Description: RNA binding protein 45 (RBP45), putative
  misc_feature (1)..(373): Homolog of NCBI NO: 9758270 NR Description: contains similarity to polyadenylate-binding
  misc_feature (1)..(382): Homolog of NCBI NO: 18416906 NR Description: RNA binding protein 45 (RBP45), putative
  misc_feature (1)..(382): Homolog of NCBI NO: 7485342 NR Description: hypothetical protein F10M23.340 - Arabidopsis
MMQHQQQQQGQPPAGWNQQSAPSSGQPQQQQYGGGGSQNPGSAGEIRSLWIGDLQPWMDENYLMNVFGLTGEATAAKVIRNKQNGYSEGYGFIEFVNHATAERNLQTYNGAPMPSSEQAFRLNWAQLGAGERRQAEGPEHTVFVGDLAPDVTDHMLTETFKAVYSSVKGAKVVNDRTTGRSKGYGFVRFADESEQIRAMTEMNGQYCSSRPMRTGPAANKKPLTMQPASYQNTQGNSGESDPTNTTIFVGAVDQSVTEDDLKSVFGQFGELVHVKIPAGKRCGFVQYANRACAEQALSVLNGTQLGGQSIRLSWGRSPSNKQTQPDQAQYGGGGGYYGYPPQGYEAYGYAPPPQDPNAYYGGYAGGGYGNYQQPGGYQQQQQ

SEQ ID NO: 38739 - DNA, 2010 bp, Arabidopsis thaliana
  misc_feature (1)..(2010): Ceres Seq. ID no. 12329837
  misc_feature: MA Experiment ID: 108573 Result: Up-regulated in Transcription
  misc_feature: MA Experiment 108573 PARAMETER Experiment Name: At_Drought_cDNA_P Parameter: Timepoint (hr) Value: 6
  misc_feature: MA Experiment 108573 PARAMETER Experiment Name: At_Drought_cDNA_P Parameter: Tissue Value: Aerial
  misc_feature: MA Experiment 108573 PARAMETER Experiment Name: At_Drought_cDNA_P Parameter: Treatment Value: Drought vs. No Drought
  misc_feature: MA Experiment ID: 108595 Result: Down-regulated in Transcription
  misc_feature: MA Experiment 108595 PARAMETER Experiment Name: At_Ler-pi_Ovule_cDNA_P Parameter: Plant Line Value: null
  misc_feature: MA Experiment ID: 20000087 Result: Down-regulated in Transcription
  misc_feature: MA Experiment 20000087 PARAMETER Experiment Name: At_100uM_ABA_Mutants_cDNA_P Parameter: Plant Line Value: WS
  misc_feature: MA Experiment 20000087 PARAMETER Experiment Name: At_100uM_ABA_Mutants_cDNA_P Parameter: Timepoint (hr) Value: 6
  misc_feature: MA Experiment 20000087 PARAMETER Experiment Name: At_100uM_ABA_Mutants_cDNA_P Parameter: Tissue Value: Aerial
  misc_feature: MA Experiment 20000087 PARAMETER Experiment Name: At_100uM_ABA_Mutants_cDNA_P Parameter: Treatment Value: 100uM ABA vs. No Treatment
  misc_feature: MA Experiment ID: 20000224 Result: Down-regulated in Transcription
atccgccattacagacgaagaagaatttcaactgcaatctctctctgaaccatgagaggtcacgatcggattaacaattgtttgccggaggaacttatcctcgagatattccggcgacttgaatcgaaaccgaatcgcgacgcatgctccctcgtctgcaagcgatggttatctctcgagcgatttagccgcaccacgcttcgtatcggcgcttcgttttctcccgacgacttcatctccctcctatctcgtcgctttctctatattacctctatccatgtcgacgaacgtatctccgtctcccttccttccctctctccttccccaaaaagaaaacgtgggagggacagttcgtcgccatcgtcgagtaagcggaagaaattgactgataagacacattctggagctgagaacgtcgagtcttccagcttgactgatacgggcttgactgctctagcgaatggatttccaagaatagaaaacttgagcttgatatggtgccctaacgtttcaagtgtgggtttgtgttcccttgctcagaaatgcacttcacttaaatctcttgatttacagggttgctatgttggagatcaaggcttagcagctgttggaaagttttgtaagcaacttgaagaactaaatttgcgcttttgcgaaggcttaactgatgttggagttattgatcttgttgttggttgttccaagtctttaaagtctatcggtgttgctgcgtcagcaaaaataacagatttatctctggaagcagttggttctcactgtaaattactagaagttttgtatttggattctgaatacatccatgataaaggattgatagcggtggctcagggatgccaccgtttgaaaaatctgaagcttcaatgtgttagtgtgacggatgtggcttttgctgcagtgggagagttgtgtacttcgttggagcgattggcattgtatagctttcagcattttactgacaagggcatgcgagccatcggtaaagggtctaagaagttgaaagatcttactttaagtgattgttactttgtgagttgcaaaggtttagaagctattgctcatggttgtaaggaacttgagcgtgtggaaattaacggatgccacaacattggtacacgtggaatagaggcaattggaaaatcttgcccgcgcctcaaagagttagctttgttgtattgccaaaggattggtaattcggctcttcaagaaattggaaaaggctgtaaatccctagaaatacttcacttagtagactgctctggcattggagacatcgctatgtgcagtattgctaaaggctgtcgcaacctcaagaaacttcatatccgcagatgctatgagataggaaacaaaggaattatatctattggaaagcattgcaaatcactaaccgagcttagtctccggttttgcgataaagttggaaataaagcattaatcgccattggaaaaggttgctccttacaacaactaaacgtaagtggttgtaatcaaatcagcgatgctggaataacagcaatcgccagaggctgtcctcaactcactcacctcgacattagtgttcttcagaacattggagacatgccgttggctgagcttggagaaggatgtccaatgctgaaagacttggtcttgtctcattgccaccatataacagacaatggtctgaaccatcttgtacagaagtgcaaacttctggagacttgtcacatggtttactgcccagggatcacttccgctggagtggctacagtcgtctcgagctgtccacacatcaaaaaggtgttgatagagaaatggaaagtgactgagaggacgacaaggagagctggatcggttatctcttatctatgcatggatctctagatcgtaatttcaaggtcagtttctaagatttatgtttatgttttcttaataaaagtaataacttatagtccaaacttatggtgagtcatggttgtttattgtatgtttatgtgaactggttgtacg

SEQ ID NO: 38740 - protein, 610 aa, Arabidopsis thaliana
  peptide (1)..(610): Ceres Seq. ID no. 12329838
  misc_feature (126)..(584): Homolog of NCBI NO: 18421172 NR Description: F-box protein family; protein id: At5g27920.1
  misc_feature (142)..(578): Homolog of NCBI NO: 18421172 NR Description: F-box protein family; protein id: At5g27920.1
  misc_feature (11)..(526): Homolog of NCBI NO: 15239399 NR Description: leucine-rich repeats containing protein; protein
  misc_feature (11)..(555): Homolog of NCBI NO: 18400846 NR Description: F-box protein family, AtFBL6
  misc_feature (127)..(588): Homolog of NCBI NO: 30679379 NR Description: F-box protein family (FBL3) [Arabidopsis
  misc_feature (228)..(610): Homolog of NCBI NO: 7485070 NR Description: hypothetical protein - Arabidopsis thaliana
  misc_feature (7)..(596): Homolog of NCBI NO: 37531066 NR Description: putative leucine-rich repeats containing protein
  misc_feature (93)..(475): Homolog of NCBI NO: 7485070 NR Description: hypothetical protein - Arabidopsis thaliana
MRGHDRINNCLPEELILEIFRRLESKPNRDACSLVCKRWLSLERFSRTTLRIGASFSPDDFISLLSRRFLYITSIHVDERISVSLPSLSPSPKRKRGRDSSSPSSSKRKKLTDKTHSGAENVESSSLTDTGLTALANGFPRIENLSLIWCPNVSSVGLCSLAQKCTSLKSLDLQGCYVGDQGLAAVGKFCKQLEELNLRFCEGLTDVGVIDLVVGCSKSLKSIGVAASAKITDLSLEAVGSHCKLLEVLYLDSEYIHDKGLIAVAQGCHRLKNLKLQCVSVTDVAFAAVGELCTSLERLALYSFQHFTDKGMRAIGKGSKKLKDLTLSDCYFVSCKGLEAIAHGCKELERVEINGCHNIGTRGIEAIGKSCPRLKELALLYCQRIGNSALQEIGKGCKSLEILHLVDCSGIGDIAMCSIAKGCRNLKKLHIRRCYEIGNKGIISIGKHCKSLTELSLRFCDKVGNKALIAIGKGCSLQQLNVSGCNQISDAGITAIARGCPQLTHLDISVLQNIGDMPLAELGEGCPMLKDLVLSHCHHITDNGLNHLVQKCKLLETCHMVYCPGITSAGVATVVSSCPHIKKVLIEKWKVTERTTRRAGSVISYLCMDL

SEQ ID NO: 38741 - DNA, 1831 bp, Arabidopsis thaliana
  misc_feature (1)..(1831): Ceres Seq. ID no. 13489239
  misc_feature: MA Experiment ID: 108433 Result: Up-regulated in Transcription
  misc_feature: MA Experiment 108433 PARAMETER Experiment Name: At_rhl_Mutant2_cDNA_P Parameter: Age (day) Value: 7
  misc_feature: MA Experiment 108433 PARAMETER Experiment Name: At_rhl_Mutant2_cDNA_P Parameter: Organism Value: A. thaliana
  misc_feature: MA Experiment 108433 PARAMETER Experiment Name: At_rhl_Mutant2_cDNA_P Parameter: Plant Line Value: rhl Mutant vs. wt landsburg
  misc_feature: MA Experiment 108433 PARAMETER Experiment Name: At_rhl_Mutant2_cDNA_P Parameter: Tissue Value: Roots
  misc_feature: MA Experiment ID: 108572 Result: Up-regulated in Transcription
  misc_feature: MA Experiment 108572 PARAMETER Experiment Name: At_Drought_cDNA_P Parameter: Timepoint (hr) Value: 1
  misc_feature: MA Experiment 108572 PARAMETER Experiment Name: At_Drought_cDNA_P Parameter: Tissue Value: Aerial
  misc_feature: MA Experiment 108572 PARAMETER Experiment Name: At_Drought_cDNA_P Parameter: Treatment Value: Drought vs. No Drought
  misc_feature: MA Experiment ID: 108573 Result: Up-regulated in Transcription
  misc_feature: MA Experiment 108573 PARAMETER Experiment Name: At_Drought_cDNA_P Parameter: Timepoint (hr) Value: 6
  misc_feature: MA Experiment 108573 PARAMETER Experiment Name: At_Drought_cDNA_P Parameter: Tissue Value: Aerial
  misc_feature: MA Experiment 108573 PARAMETER Experiment Name: At_Drought_cDNA_P Parameter: Treatment Value: Drought vs. No Drought
  misc_feature: MA Experiment ID: 108579 Result: Up-regulated in Transcription
  misc_feature: MA Experiment 108579 PARAMETER Experiment Name: At_4deg_Cold_cDNA_P Parameter: Temperature (deg C) Value: 4 vs. 22
  misc_feature: MA Experiment 108579 PARAMETER Experiment Name: At_4deg_Cold_cDNA_P Parameter: Timepoint (hr) Value: 6
  misc_feature: MA Experiment 108579 PARAMETER Experiment Name: At_4deg_Cold_cDNA_P Parameter: Tissue Value: Aerial
  misc_feature: MA Experiment ID: 108607 Result: Up-regulated in Transcription
  misc_feature: MA Experiment 108607 PARAMETER Experiment Name: At_100uM_ABA_cDNA_P Parameter: Timepoint (hr) Value: 4
  misc_feature: MA Experiment 108607 PARAMETER Experiment Name: At_100uM_ABA_cDNA_P Parameter: Tissue Value: Aerial
  misc_feature: MA Experiment 108607 PARAMETER Experiment Name: At_100uM_ABA_cDNA_P Parameter: Treatment Value: 100uM ABA vs. No Treatment
  misc_feature: MA Experiment ID: 20000030 Result: Down-regulated in Transcription
  misc_feature: MA Experiment 20000030 PARAMETER Experiment Name: At_CS6630_Roots_cDNA_P Parameter: Plant Line Value: CS6630 vs. WS
  misc_feature: MA Experiment 20000030 PARAMETER Experiment Name: At_CS6630_Roots_cDNA_P Parameter: Tissue Value: Roots
  misc_feature: MA Experiment ID: 20000072 Result: Up-regulated in Transcription
  misc_feature: MA Experiment 20000072 PARAMETER Experiment Name: At_100uM_ABA_Mutants_cDNA_P Parameter: Plant Line Value: CS8105
  misc_feature: MA Experiment 20000072 PARAMETER Experiment Name: At_100uM_ABA_Mutants_cDNA_P Parameter: Timepoint (hr) Value: 6
  misc_feature: MA Experiment 20000072 PARAMETER Experiment Name: At_100uM_ABA_Mutants_cDNA_P Parameter: Tissue Value: Aerial
  misc_feature: MA Experiment 20000072 PARAMETER Experiment Name: At_100uM_ABA_Mutants_cDNA_P Parameter: Treatment Value: 100uM ABA vs. No Treatment
  misc_feature: MA Experiment ID: 20000111 Result: Down-regulated in Transcription
  misc_feature: MA Experiment 20000111 PARAMETER Experiment Name: At_42deg_Heat_cDNA_P Parameter: Temperature (deg C) Value: 42 vs. 22
  misc_feature: MA Experiment 20000111 PARAMETER Experiment Name: At_42deg_Heat_cDNA_P Parameter: Timepoint (hr) Value: 6
  misc_feature: MA Experiment 20000111 PARAMETER Experiment Name: At_42deg_Heat_cDNA_P Parameter: Tissue Value: Aerial
  misc_feature: MA Experiment ID: 20000112 Result: Down-regulated in Transcription
  misc_feature: MA Experiment 20000112 PARAMETER Experiment Name: At_42deg_Heat_cDNA_P Parameter: Temperature (deg C) Value: 42 vs. 22
  misc_feature: MA Experiment 20000112 PARAMETER Experiment Name: At_42deg_Heat_cDNA_P Parameter: Timepoint (hr) Value: 2
  misc_feature: MA Experiment 20000112 PARAMETER Experiment Name: At_42deg_Heat_cDNA_P Parameter: Tissue Value: Aerial
  misc_feature: MA Experiment ID: 20000144 Result: Down-regulated in Transcription
  misc_feature: MA Experiment 20000144 PARAMETER Experiment Name: At_42deg_Heat_cDNA_P Parameter: Temperature (deg C) Value: 42 vs. 22
  misc_feature: MA Experiment 20000144 PARAMETER Experiment Name: At_42deg_Heat_cDNA_P Parameter: Timepoint (hr) Value: 1
  misc_feature: MA Experiment 20000144 PARAMETER Experiment Name: At_42deg_Heat_cDNA_P Parameter: Tissue Value: Aerial
  misc_feature: MA Experiment ID: 20000171 Result: Down-regulated in Transcription
  misc_feature: MA Experiment 20000171 PARAMETER Experiment Name: At_42deg_Heat_P Parameter: Age (day) Value: 14
  misc_feature: MA Experiment 20000171 PARAMETER Experiment Name: At_42deg_Heat_P Parameter: Organism Value: A. thaliana
  misc_feature: MA Experiment 20000171 PARAMETER Experiment Name: At_42deg_Heat_P Parameter: Plant Line Value: WS
  misc_feature: MA Experiment 20000171 PARAMETER Experiment Name: At_42deg_Heat_P Parameter: Temperature (deg C) Value: 42 vs. 22
  misc_feature: MA Experiment 20000171 PARAMETER Experiment Name: At_42deg_Heat_P Parameter: Timepoint (hr) Value: 1
  misc_feature: MA Experiment 20000171 PARAMETER Experiment Name: At_42deg_Heat_P Parameter: Tissue Value: Aerial
  misc_feature: MA Experiment ID: 20000173 Result: Down-regulated in Transcription
  misc_feature: MA Experiment 20000173 PARAMETER Experiment Name: At_42deg_Heat_P Parameter: Age (day) Value: 14
  misc_feature: MA Experiment 20000173 PARAMETER Experiment Name: At_42deg_Heat_P Parameter: Organism Value: A. thaliana
  misc_feature: MA Experiment 20000173 PARAMETER Experiment Name: At_42deg_Heat_P Parameter: Plant Line Value: WS
  misc_feature: MA Experiment 20000173 PARAMETER Experiment Name: At_42deg_Heat_P Parameter: Temperature (deg C) Value: 42 vs. 22
  misc_feature: MA Experiment 20000173 PARAMETER Experiment Name: At_42deg_Heat_P Parameter: Timepoint (hr) Value: 6
  misc_feature: MA Experiment 20000173 PARAMETER Experiment Name: At_42deg_Heat_P Parameter: Tissue Value: Aerial
  misc_feature: MA Experiment ID: 20000184 Result: Up-regulated in Transcription
  misc_feature: MA Experiment 20000184 PARAMETER Experiment Name: At_Shoots__P Parameter: Age (day) Value: 7
  misc_feature: MA Experiment 20000184 PARAMETER Experiment Name: At_Shoots__P Parameter: Tissue Value: Shoots vs. Whole Plant
  misc_feature: MA Experiment ID: 20000235 Result: Up-regulated in Transcription
  misc_feature: MA Experiment 20000235 PARAMETER Experiment Name: At_Siliques_P Parameter: Age (day) Value: 21
  misc_feature: MA Experiment 20000235 PARAMETER Experiment Name: At_Siliques_P Parameter: Organism Value: A. thaliana
  misc_feature: MA Experiment 20000235 PARAMETER Experiment Name: At_Siliques_P Parameter: Plant Line Value: WS
  misc_feature: MA Experiment 20000235 PARAMETER Experiment Name: At_Siliques_P Parameter: Tissue Value: 5-10mm Siliques vs. Whole Plant
  misc_feature: MA Experiment ID: 20000286 Result: Up-regulated in Transcription
  misc_feature: MA Experiment 20000286 PARAMETER Experiment Name: At_Open_Flower_P Parameter: Age (day) Value: 21
  misc_feature: MA Experiment 20000286 PARAMETER Experiment Name: At_Open_Flower_P Parameter: Plant Line Value: WS
  misc_feature: MA Experiment 20000286 PARAMETER Experiment Name: At_Open_Flower_P Parameter: Tissue Value: Half Open vs. Whole Plant
  misc_feature: MA Experiment ID: 20000437 Result: Up-regulated in Transcription
  misc_feature: MA Experiment 20000437 PARAMETER Experiment Name: At_Drought_P Parameter: Age (day) Value: 8
  misc_feature: MA Experiment 20000437 PARAMETER Experiment Name: At_Drought_P Parameter: Organism Value: A. thaliana
  misc_feature: MA Experiment 20000437 PARAMETER Experiment Name: At_Drought_P Parameter: Plant Line Value: WS
  misc_feature: MA Experiment 20000437 PARAMETER Experiment Name: At_Drought_P Parameter: Timepoint (hr) Value: 24
  misc_feature: MA Experiment 20000437 PARAMETER Experiment Name: At_Drought_P Parameter: Tissue Value: Whole Plant
  misc_feature: MA Experiment 20000437 PARAMETER Experiment Name: At_Drought_P Parameter: Treatment Value: Drought vs. No Drought
  misc_feature: MA Experiment ID: 20000573 Result: Down-regulated in Transcription
  misc_feature: MA Experiment 20000573 PARAMETER Experiment Name: At_100uM_ABA_Mutants__P Parameter: Organism Value: A. thaliana
  misc_feature: MA Experiment 20000573 PARAMETER Experiment Name: At_100uM_ABA_Mutants__P Parameter: Plant Line Value: CS22 vs. Ler wt
  misc_feature: MA Experiment 20000573 PARAMETER Experiment Name: At_100uM_ABA_Mutants__P Parameter: Timepoint (hr) Value: N/A
  misc_feature: MA Experiment 20000573 PARAMETER Experiment Name: At_100uM_ABA_Mutants__P Parameter: Tissue Value: Whole Plant
  misc_feature: MA Experiment 20000573 PARAMETER Experiment Name: At_100uM_ABA_Mutants__P Parameter: Treatment Value: None
  misc_feature: MA Experiment ID: 20000574 Result: Down-regulated in Transcription
  misc_feature: MA Experiment 20000574 PARAMETER Experiment Name: At_100uM_ABA_Mutants__P Parameter: Organism Value: A. thaliana
  misc_feature: MA Experiment 20000574 PARAMETER Experiment Name: At_100uM_ABA_Mutants__P Parameter: Plant Line Value: CS23 vs. Ler wt
  misc_feature: MA Experiment 20000574 PARAMETER Experiment Name: At_100uM_ABA_Mutants__P Parameter: Timepoint (hr) Value: N/A
  misc_feature: MA Experiment 20000574 PARAMETER Experiment Name: At_100uM_ABA_Mutants__P Parameter: Tissue Value: Whole Plant
  misc_feature: MA Experiment 20000574 PARAMETER Experiment Name: At_100uM_ABA_Mutants__P Parameter: Treatment Value: None
  misc_feature: MA Experiment ID: 20000794 Result: Up-regulated in Transcription
  misc_feature: MA Experiment 20000794 PARAMETER Experiment Name: At_Petals_P Parameter: Age (day) Value: 23-25 days
  misc_feature: MA Experiment 20000794 PARAMETER Experiment Name: At_Petals_P Parameter: Plant Line Value: WS
  misc_feature: MA Experiment 20000794 PARAMETER Experiment Name: At_Petals_P Parameter: Tissue Value: Petals vs. Whole plant
  misc_feature: MA Experiment ID: 20001247 Result: Up-regulated in Transcription
  misc_feature: MA Experiment 20001247 PARAMETER Experiment Name: At_Far-red-induction_P Parameter: Age (day) Value: 7
  misc_feature: MA Experiment 20001247 PARAMETER Experiment Name: At_Far-red-induction_P Parameter: Light Value: Far-red vs. White
  misc_feature: MA Experiment 20001247 PARAMETER Experiment Name: At_Far-red-induction_P Parameter: Organism Value: A. thaliana
  misc_feature: MA Experiment 20001247 PARAMETER Experiment Name: At_Far-red-induction_P Parameter: Plant Line Value: Columbia
  misc_feature: MA Experiment 20001247 PARAMETER Experiment Name: At_Far-red-induction_P Parameter: Timepoint (hr) Value: 1
  misc_feature: MA Experiment 20001247 PARAMETER Experiment Name: At_Far-red-induction_P Parameter: Tissue Value: Whole Plant
  misc_feature: MA Experiment ID: 20001557 Result: Up-regulated in Transcription
  misc_feature: MA Experiment 20001557 PARAMETER Experiment Name: At_Drought_Soil_Dry_P Parameter: Age (day) Value: 27
  misc_feature: MA Experiment 20001557 PARAMETER Experiment Name: At_Drought_Soil_Dry_P Parameter: Organism Value: A. thaliana
  misc_feature: MA Experiment 20001557 PARAMETER Experiment Name: At_Drought_Soil_Dry_P Parameter: Plant Line Value: WS
  misc_feature: MA Experiment 20001557 PARAMETER Experiment Name: At_Drought_Soil_Dry_P Parameter: Post Timepoint (hr) Value: 3
  misc_feature: MA Experiment 20001557 PARAMETER Experiment Name: At_Drought_Soil_Dry_P Parameter: Post-Treatment Value: Re-Water vs. No Drought
  misc_feature: MA Experiment 20001557 PARAMETER Experiment Name: At_Drought_Soil_Dry_P Parameter: Timepoint (day) Value: 13
  misc_feature: MA Experiment 20001557 PARAMETER Experiment Name: At_Drought_Soil_Dry_P Parameter: Treatment Value: Drought vs. No Drought
  misc_feature: MA Experiment ID: 20001558 Result: Up-regulated in Transcription
  misc_feature: MA Experiment 20001558 PARAMETER Experiment Name: At_Drought_Soil_Dry_P Parameter: Age (day) Value: 27
  misc_feature: MA Experiment 20001558 PARAMETER Experiment Name: At_Drought_Soil_Dry_P Parameter: Organism Value: A. thaliana
  misc_feature: MA Experiment 20001558 PARAMETER Experiment Name: At_Drought_Soil_Dry_P Parameter: Plant Line Value: WS
  misc_feature: MA Experiment 20001558 PARAMETER Experiment Name: At_Drought_Soil_Dry_P Parameter: Post Timepoint (hr) Value: 6
  misc_feature: MA Experiment 20001558 PARAMETER Experiment Name: At_Drought_Soil_Dry_P Parameter: Post-Treatment Value: Re-Water vs. No Drought
  misc_feature: MA Experiment 20001558 PARAMETER Experiment Name: At_Drought_Soil_Dry_P Parameter: Timepoint (day) Value: 13
  misc_feature: MA Experiment 20001558 PARAMETER Experiment Name: At_Drought_Soil_Dry_P Parameter: Treatment Value: Drought vs. No Drought
  misc_feature: MA Experiment ID: 20001906 Result: Down-regulated in Transcription
  misc_feature: MA Experiment 20001906 PARAMETER Experiment Name: At_Drought_Reproduction_P Parameter: Age (day) Value: 35
  misc_feature: MA Experiment 20001906 PARAMETER Experiment Name: At_Drought_Reproduction_P Parameter: Organism Value: A. thaliana
  misc_feature: MA Experiment 20001906 PARAMETER Experiment Name: At_Drought_Reproduction_P Parameter: Plant Line Value: WS
  misc_feature: MA Experiment 20001906 PARAMETER Experiment Name: At_Drought_Reproduction_P Parameter: Timepoint (day) Value: 5
  misc_feature: MA Experiment 20001906 PARAMETER Experiment Name: At_Drought_Reproduction_P Parameter: Tissue Value: Siliques
  misc_feature: MA Experiment 20001906 PARAMETER Experiment Name: At_Drought_Reproduction_P Parameter: Treatment Value: Drought vs. No Drought
  misc_feature: MA Experiment ID: 20001908 Result: Down-regulated in Transcription
  misc_feature: MA Experiment 20001908 PARAMETER Experiment Name: At_Drought_Reproduction_P Parameter: Age (day) Value: 40
  misc_feature: MA Experiment 20001908 PARAMETER Experiment Name: At_Drought_Reproduction_P Parameter: Organism Value: A. thaliana
  misc_feature: MA Experiment 20001908 PARAMETER Experiment Name: At_Drought_Reproduction_P Parameter: Plant Line Value: WS
  misc_feature: MA Experiment 20001908 PARAMETER Experiment Name: At_Drought_Reproduction_P Parameter: Timepoint (day) Value: 10
  misc_feature: MA Experiment 20001908 PARAMETER Experiment Name: At_Drought_Reproduction_P Parameter: Tissue Value: Siliques
  misc_feature: MA Experiment 20001908 PARAMETER Experiment Name: At_Drought_Reproduction_P Parameter: Treatment Value: Drought vs. No Drought
  misc_feature: MA Experiment ID: 20001911 Result: Down-regulated in Transcription
  misc_feature: MA Experiment 20001911 PARAMETER Experiment Name: At_Drought_Reproduction_P Parameter: Age (day) Value: 40
  misc_feature: MA Experiment 20001911 PARAMETER Experiment Name: At_Drought_Reproduction_P Parameter: Organism Value: A. thaliana
  misc_feature: MA Experiment 20001911 PARAMETER Experiment Name: At_Drought_Reproduction_P Parameter: Plant Line Value: WS
  misc_feature: MA Experiment 20001911 PARAMETER Experiment Name: At_Drought_Reproduction_P Parameter: Timepoint (day) Value: 10
  misc_feature: MA Experiment 20001911 PARAMETER Experiment Name: At_Drought_Reproduction_P Parameter: Tissue Value: Flowers
  misc_feature: MA Experiment 20001911 PARAMETER Experiment Name: At_Drought_Reproduction_P Parameter: Treatment Value: Drought vs. No Drought
tgaggccattctcttttctcctctctctctctctcacacaacacaaacaactcttgagagagagaaacaaatctttcacttgacacttctctccaaatcctcatctcattcttcatcctaaacatttgctcattctcacgatgagccataaccaaaaccaacctcaccggccagtcccggtccatgtcacaaacgccgagccaaaccctaacccaaacaacctcccaaactttctattatccgtccgtctcaaatacgtaaaactcggttaccactacctaatctccaacgctctctacatcctcctccttcctctcctcgccgcaacaatcgctaacctctcttctttcaccatcaacgacctctctctcctctacaacacactccgtttccatttcctctccgccacactcgccaccgcactcttaatctctctctccaccgcttacttcaccacccgtccccgccgtgtcttcctcctcgacttctcgtgttacaaaccagacccttcactgatctgcactcgtgaaacattcatggacagatctcaacgtgtaggcatcttcacagaagacaacttagctttccaacaaaagatcctcgaaagatccggtctaggtcagaaaacttacttccctgaagctcttcttcgtgttcctcctaatccttgtatggaagaagcgagaaaagaggcagaaacagttatgttcggagctattgacgcggttcttgagaagaccggtgtgaaacctaaagatattggaatccttgtggtgaattgtagcttgtttaatccaacaccgtcactttctgctatgattgtgaataagtataagcttagaggcaacattttgagctataatcttggtggaatgggatgtagtgctggccttatctccattgatctcgctaaacagatgcttcaggtgcaaccaaactcatacgcactagtggtgagcacagagaacataaccctaaactggtacttaggcaacgaccgatcaatgcttctatctaactgtatcttccgtatgggcggagccgcggtacttctctcgaaccgctcctctgatcgcagccgttcaaaatatcagctcatccataccgtccgtacccacaaaggagctgatgacaacgcatttggctgtgtttaccaacgagaagacaacaacgcagaagaaaccggcaaaatcggagtgtccctctctaaaaacctaatggcgatagctggagaagctctcaagacaaacatcacaactctcggaccactagttctaccaatgtccgaacaacttctctttttcgcgactcttgtggcccgaaaagtcttcaaagtcaagaaaataaagccttacattcctgatttcaagctagctttcgagcatttctgtatccacgcgggaggtagagccgtgctcgacgagattgagaagaacttggatttatccgaatggcacatggagccatcgaggatgacgttgaaccggtttggtaacacttcgagtagctcactttggtatgagcttgcgtatagtgaagctaaaggaaggattaagagaggagataggacttggcagattgcttttggatcgggttttaagtgtaatagtgcagtttggaaagctttgagaacgattgatccaatggacgagaagactaatccatggattgatgagattgatgactttcctgttcaagttcctaggatcactcccattacatcgtcgtagtgttttaaattcttttggagaactaatttgttatgttttattaaatgtaataacttacgtgatttgatatttttttattatcttaatatatatgattgccg

SEQ ID NO: 38742 - protein, 529 aa, Arabidopsis thaliana [sequence omitted]

SEQ ID NO: 38743 - protein, 397 aa, Arabidopsis thaliana; identical to SEQ ID NO: 30634
  peptide (1)..(397): Ceres Seq. ID no. 13489241
  misc_feature (218)..(365): Pfam Name: Chalcone and stilbene synthases, C-terminal domain Pfam Description: Chalcone and stilbene synthases, C-terminal
  misc_feature (1)..(389): Homolog of NCBI NO: 19908404 NR Description: putative fatty acid elongase [Tropaeolum majus]
  misc_feature (1)..(392): Homolog of NCBI NO: 29417540 NR Description: beta-ketoacyl-CoA-synthase [Marchantia polymorpha]
  misc_feature (1)..(388): Homolog of NCBI NO: 11066477 NR Description: fatty acid elongase 1-like protein [Limnanthes
  misc_feature (1)..(396): Homolog of NCBI NO: 1045614 NR Description: beta-ketoacyl-CoA synthase
  misc_feature (1)..(394): Homolog of NCBI NO: 15225767 NR Description: beta-ketoacyl-CoA synthase, putative [Arabidopsis
  misc_feature (1)..(394): Homolog of NCBI NO: 9714501 NR Description: putative fatty acid elongase [Zea mays]
  misc_feature (1)..(397): Homolog of NCBI NO: 18377979 NR Description: putative beta-ketoacyl-CoA synthase [Arabidopsis
  misc_feature (1)..(397): Homolog of NCBI NO: 15219676 NR Description: beta-ketoacyl-CoA synthase, putative [Arabidopsis
  misc_feature (1)..(397): Homolog of NCBI NO: 14334714 NR Description: putative beta-ketoacyl-CoA synthase [Arabidopsis
  misc_feature (1)..(397): Homolog of NCBI NO: 15239981 NR Description: beta-ketoacyl-CoA synthase, putative [Arabidopsis

SEQ ID NO: 38744 - protein, 352 aa, Arabidopsis thaliana; identical to SEQ ID NO: 30635
  peptide (1)..(352): Ceres Seq. ID no. 13489242
  misc_feature (173)..(320): Pfam Name: Chalcone and stilbene synthases, C-terminal domain Pfam Description: Chalcone and stilbene synthases, C-terminal
  misc_feature (1)..(344): Homolog of NCBI NO: 19908404 NR Description: putative fatty acid elongase [Tropaeolum majus]
  misc_feature (1)..(347): Homolog of NCBI NO: 29417540 NR Description: beta-ketoacyl-CoA-synthase [Marchantia polymorpha]
  misc_feature (1)..(343): Homolog of NCBI NO: 11066477 NR Description: fatty acid elongase 1-like protein [Limnanthes
  misc_feature (1)..(351): Homolog of NCBI NO: 1045614 NR Description: beta-ketoacyl-CoA synthase
  misc_feature (1)..(349): Homolog of NCBI NO: 15225767 NR Description: beta-ketoacyl-CoA synthase, putative [Arabidopsis
  misc_feature (1)..(349): Homolog of NCBI NO: 9714501 NR Description: putative fatty acid elongase [Zea mays]
  misc_feature (1)..(352): Homolog of NCBI NO: 18377979 NR Description: putative beta-ketoacyl-CoA synthase [Arabidopsis
  misc_feature (1)..(352): Homolog of NCBI NO: 15219676 NR Description: beta-ketoacyl-CoA synthase, putative [Arabidopsis
  misc_feature (1)..(352): Homolog of NCBI NO: 14334714 NR Description: putative beta-ketoacyl-CoA synthase [Arabidopsis
  misc_feature (1)..(352): Homolog of NCBI NO: 15239981 NR Description: beta-ketoacyl-CoA synthase, putative [Arabidopsis

SEQ ID NO: 38745 - DNA, 1688 bp, Arabidopsis thaliana
  misc_feature (1)..(1688): Ceres Seq. ID no. 12395594
  misc_feature: MA Experiment ID: 108434 Result: Up-regulated in Transcription
  misc_feature: MA Experiment 108434 PARAMETER Experiment Name: At_Root_Tips_cDNA_P Parameter: Tissue Value: Root Tips
  misc_feature: MA Experiment ID: 108463 Result: Down-regulated in Transcription
  misc_feature: MA Experiment 108463 PARAMETER Experiment Name: At_Germinating_Seeds_cDNA_P Parameter: Age (day) Value: 3 vs. 0
  misc_feature: MA Experiment 108463 PARAMETER Experiment Name: At_Germinating_Seeds_cDNA_P Parameter: Tissue Value: Germinating Seeds
  misc_feature: MA Experiment ID: 108572 Result: Down-regulated in Transcription
  misc_feature: MA Experiment 108572 PARAMETER Experiment Name: At_Drought_cDNA_P Parameter: Timepoint (hr) Value: 1
  misc_feature: MA Experiment 108572 PARAMETER Experiment Name: At_Drought_cDNA_P Parameter: Tissue Value: Aerial
  misc_feature: MA Experiment 108572 PARAMETER Experiment Name: At_Drought_cDNA_P Parameter: Treatment Value: Drought vs. No Drought
  misc_feature: MA Experiment ID: 108573 Result: Up-regulated in Transcription
  misc_feature: MA Experiment 108573 PARAMETER Experiment Name: At_Drought_cDNA_P Parameter: Timepoint (hr) Value: 6
  misc_feature: MA Experiment 108573 PARAMETER Experiment Name: At_Drought_cDNA_P Parameter: Tissue Value: Aerial
  misc_feature: MA Experiment 108573 PARAMETER Experiment Name: At_Drought_cDNA_P Parameter: Treatment Value: Drought vs. No Drought
  misc_feature: MA Experiment ID: 108594 Result: Down-regulated in Transcription
  misc_feature: MA Experiment 108594 PARAMETER Experiment Name: At_Ler-rhl_Root_cDNA_P Parameter: Plant Line Value: null
  misc_feature: MA Experiment ID: 108595 Result: Down-regulated in Transcription
  misc_feature: MA Experiment 108595 PARAMETER Experiment Name: At_Ler-pi_Ovule_cDNA_P Parameter: Plant Line Value: null
  misc_feature: MA Experiment ID: 108607 Result: Down-regulated in Transcription
  misc_feature: MA Experiment 108607 PARAMETER Experiment Name: At_100uM_ABA_cDNA_P Parameter: Timepoint (hr) Value: 4
  misc_feature: MA Experiment 108607 PARAMETER Experiment Name: At_100uM_ABA_cDNA_P Parameter: Tissue Value: Aerial
  misc_feature: MA Experiment 108607 PARAMETER Experiment Name: At_100uM_ABA_cDNA_P Parameter: Treatment Value: 100uM ABA vs. No Treatment
  misc_feature: MA Experiment ID: 108668 Result: Down-regulated in Transcription
  misc_feature: MA Experiment 108668 PARAMETER Experiment Name: At_2mM_SA_cDNA_P Parameter: Plant Line Value: WS
  misc_feature: MA Experiment 108668 PARAMETER Experiment Name: At_2mM_SA_cDNA_P Parameter: Timepoint (hr) Value: 6
  misc_feature: MA Experiment 108668 PARAMETER Experiment Name: At_2mM_SA_cDNA_P Parameter: Treatment Value: 2mM SA vs. No Treatment
  misc_feature: MA Experiment ID: 20000087 Result: Down-regulated in Transcription
  misc_feature: MA Experiment 20000087 PARAMETER Experiment Name: At_100uM_ABA_Mutants_cDNA_P Parameter: Plant Line Value: WS
  misc_feature: MA Experiment 20000087 PARAMETER Experiment Name: At_100uM_ABA_Mutants_cDNA_P Parameter: Timepoint (hr) Value: 6
  misc_feature: MA Experiment 20000087 PARAMETER Experiment Name: At_100uM_ABA_Mutants_cDNA_P Parameter: Tissue Value: Aerial
  misc_feature: MA Experiment 20000087 PARAMETER Experiment Name: At_100uM_ABA_Mutants_cDNA_P Parameter: Treatment Value: 100uM ABA vs. No Treatment
  misc_feature: MA Experiment ID: 20000224 Result: Down-regulated in Transcription
  misc_feature: MA Experiment ID: 20000347 Result: Down-regulated in Transcription
  misc_feature: MA Experiment 20000347 PARAMETER Experiment Name: At_2mM_SA_Sub_P Parameter: Age (day) Value: 14
  misc_feature: MA Experiment 20000347 PARAMETER Experiment Name: At_2mM_SA_Sub_P Parameter: Organism Value: A. thaliana
  misc_feature: MA Experiment 20000347 PARAMETER Experiment Name: At_2mM_SA_Sub_P Parameter: Plant Line Value: WS
  misc_feature: MA Experiment 20000347 PARAMETER Experiment Name: At_2mM_SA_Sub_P Parameter: Timepoint (hr) Value: 6
  misc_feature: MA Experiment 20000347 PARAMETER Experiment Name: At_2mM_SA_Sub_P Parameter: Tissue Value: Aerial
  misc_feature: MA Experiment 20000347 PARAMETER Experiment Name: At_2mM_SA_Sub_P Parameter: Treatment Value: 2mM SA vs. No Treatment
  misc_feature: MA Experiment ID: 20000355 Result: Down-regulated in Transcription
  misc_feature: MA Experiment 20000355 PARAMETER Experiment Name: At_Siliques_Sub_P Parameter: Age (day) Value: 21
  misc_feature: MA Experiment 20000355 PARAMETER Experiment Name: At_Siliques_Sub_P Parameter: Organism Value: A. thaliana
  misc_feature: MA Experiment 20000355 PARAMETER Experiment Name: At_Siliques_Sub_P Parameter: Plant Line Value: WS
  misc_feature: MA Experiment 20000355 PARAMETER Experiment Name: At_Siliques_Sub_P Parameter: Tissue Value: Less Than 5mm Siliques vs. Whole Plant
ataaacctaatttgccaacgaagttaaaccaaaaaaagaagatctcactctcaccgccttcatttcctcgatctccgtcttcctccttctccgtctgtcgcagagcatcgctcgaattagggtttctgctgagagaagatgagggaaattattagcattcatatcggacaagccgggatccaagtcggaaattcctgctgggagctttactgtctcgaacatggaatccagcccgacggaatgatgccgagtgatactacagttggtgttgcacacgatgcgttcaatactttctttagcgagactggagctgggaagcatgttcctagggctgtcttcgttgatctcgagcctaccgttatcgacgaagttcgtactggtacttaccgtcaacttttccatccagagcagctcatttctgggaaagaagatgctgctaacaacttcgctagaggacattacactgttggaaaggaaattgtggatctatgtcttgaccgtgtgaggaagcttgccgacaactgtactggcttacaagggtttttggtgttcaatgctgttggtggtggaactggttctggattgggttctctgttgctagagcgtttgtctgtagattacggaaagaagtctaagcttggttttaccatatacccttctcctcaggtttctactgctgttgtagagccttacaacagtgtgctttcaacgcattcccttcttgaacataccgatgtagctgtcctcttggataacgaagccatctatgacatttgccgcagatccctagatatcgagaggccaacctacacaaacttgaacaggttgatatcacagatcatttcatccttgacaacatctttgaggtttgatggtgccatcaacgtggatatcactgagttccagaccaatcttgtcccatatccccgtatccatttcatgctgtcatcttatgcaccagtcatctcagccgccaaggcttaccacgagcagctatcagtccctgagatcaccaatgccgtgtttgagccagcgagcatgatggcaaagtgtgacccaaggcacggaaagtacatggcatgttgtttgatgtaccgaggagatgttgttcccaaagatgttaatgctgccgttggcaccatcaagacaaagaggactgttcagtttgttgactggtgcccaactgggttcaaatgtggaatcaactaccaacctccaacagttgttccaggtggtgacctcgctaaggttcagagagctgtatgcatgatcagtaacaacacagcagttgcagaggtgttctcacggatcgaccacaagtttgatctcatgtatgcgaagagggcattcgtgcactggtacgttggtgaaggaatggaggaaggtgaattctctgaggcacgtgaagacttggccgcactggagaaagactacgaagaagttggtgctgaaggtggagacgatgaagaagatgaaggtgaagactattgacaccttttctcaagcaatgtgctaccaaaaagttttttcgtttatctgttttcattaatgattcttgttgattacatgtttgttttaatcctgtacaatattcgatcctccttcgtgtttcatctcggttagatacattttcattggtagagcgaccattggggaagatcccgagttcattatcaagcttttgttgt

SEQ ID NO: 38746 - protein, 450 aa, Arabidopsis thaliana
  peptide (1)..(450): Ceres Seq. ID no. 12395595
  misc_feature (49)..(246): Pfam Name: Tubulin/FtsZ family, GTPase domain Pfam Description: Tubulin/FtsZ family, GTPase domain
  misc_feature (1)..(449): Homolog of NCBI NO: 7271241 NR Description: alpha-tubulin [Miscanthus sinensis]
  misc_feature (1)..(450): Homolog of NCBI NO: 15233627 NR Description: tubulin alpha-6 chain (TUA6)
  misc_feature (1)..(450): Homolog of NCBI NO: 15220329 NR Description: tubulin alpha-2/alpha-4 chain
  misc_feature (1)..(445): Homolog of NCBI NO: 25396545 NR Description: alpha tubulin [Physcomitrella patens]
  misc_feature (1)..(450): Homolog of NCBI NO: 401161 NR Description: Tubulin alpha-5 chain (Alpha-5 tubulin)
  misc_feature (1)..(450): Homolog of NCBI NO: 8928419 NR Description: Tubulin alpha-1 chain
  misc_feature (1)..(450): Homolog of NCBI NO: 464846 NR Description: Tubulin alpha-6 chain (Alpha-6 tubulin)
  misc_feature (1)..(450): Homolog of NCBI NO: 6094431 NR Description: Tubulin alpha-3 chain (Alpha-3 tubulin)
  misc_feature (1)..(450): Homolog of NCBI NO: 135399 NR Description: Tubulin alpha-1 chain
  misc_feature (1)..(450): Homolog of NCBI NO: 15241168 NR Description: tubulin alpha-5 chain-like protein
MREIISIHIGQAGIQVGNSCWELYCLEHGIQPDGMMPSDTTVGVAHDAFNTFFSETGAGKHVPRAVFVDLEPTVIDEVRTGTYRQLFHPEQLISGKEDAANNFARGHYTVGKEIVDLCLDRVRKLADNCTGLQGFLVFNAVGGGTGSGLGSLLLERLSVDYGKKSKLGFTIYPSPQVSTAVVEPYNSVLSTHSLLEHTDVAVLLDNEAIYDICRRSLDIERPTYTNLNRLISQIISSLTTSLRFDGAINVDITEFQTNLVPYPRIHFMLSSYAPVISAAKAYHEQLSVPEITNAVFEPASMMAKCDPRHGKYMACCLMYRGDVVPKDVNAAVGTIKTKRTVQFVDWCPTGFKCGINYQPPTVVPGGDLAKVQRAVCMISNNTAVAEVFSRIDHKFDLMYAKRAFVHWYVGEGMEEGEFSEAREDLAALEKDYEEVGAEGGDDEEDEGEDY

SEQ ID NO: 38747 - protein, 416 aa, Arabidopsis thaliana
  peptide (1)..(416): Ceres Seq. ID no. 12395596
  misc_feature (15)..(212): Pfam Name: Tubulin/FtsZ family, GTPase domain Pfam Description: Tubulin/FtsZ family, GTPase domain
  misc_feature (1)..(415): Homolog of NCBI NO: 7271241 NR Description: alpha-tubulin [Miscanthus sinensis]
  misc_feature (1)..(416): Homolog of NCBI NO: 15233627 NR Description: tubulin alpha-6 chain (TUA6)
  misc_feature (1)..(416): Homolog of NCBI NO: 15220329 NR Description: tubulin alpha-2/alpha-4 chain
  misc_feature (1)..(411): Homolog of NCBI NO: 25396545 NR Description: alpha tubulin [Physcomitrella patens]
  misc_feature (1)..(416): Homolog of NCBI NO: 401161 NR Description: Tubulin alpha-5 chain (Alpha-5 tubulin)
  misc_feature (1)..(416): Homolog of NCBI NO: 8928419 NR Description: Tubulin alpha-1 chain
  misc_feature (1)..(416): Homolog of NCBI NO: 464846 NR Description: Tubulin alpha-6 chain (Alpha-6 tubulin)
  misc_feature (1)..(416): Homolog of NCBI NO: 6094431 NR Description: Tubulin alpha-3 chain (Alpha-3 tubulin)
  misc_feature (1)..(416): Homolog of NCBI NO: 135399 NR Description: Tubulin alpha-1 chain
  misc_feature (1)..(416): Homolog of NCBI NO: 15241168 NR Description: tubulin alpha-5 chain-like protein
MMPSDTTVGVAHDAFNTFFSETGAGKHVPRAVFVDLEPTVIDEVRTGTYRQLFHPEQLISGKEDAANNFARGHYTVGKEIVDLCLDRVRKLADNCTGLQGFLVFNAVGGGTGSGLGSLLLERLSVDYGKKSKLGFTIYPSPQVSTAVVEPYNSVLSTHSLLEHTDVAVLLDNEAIYDICRRSLDIERPTYTNLNRLISQIISSLTTSLRFDGAINVDITEFQTNLVPYPRIHFMLSSYAPVISAAKAYHEQLSVPEITNAVFEPASMMAKCDPRHGKYMACCLMYRGDVVPKDVNAAVGTIKTKRTVQFVDWCPTGFKCGINYQPPTVVPGGDLAKVQRAVCMISNNTAVAEVFSRIDHKFDLMYAKRAFVHWYVGEGMEEGEFSEAREDLAALEKDYEEVGAEGGDDEEDEGEDY

SEQ ID NO: 38748 - protein, 415 aa, Arabidopsis thaliana
  peptide (1)..(415): Ceres Seq. ID no. 12395597
  misc_feature (14)..(211): Pfam Name: Tubulin/FtsZ family, GTPase domain Pfam Description: Tubulin/FtsZ family, GTPase domain
  misc_feature (1)..(414): Homolog of NCBI NO: 7271241 NR Description: alpha-tubulin [Miscanthus sinensis]
  misc_feature (1)..(415): Homolog of NCBI NO: 15233627 NR Description: tubulin alpha-6 chain (TUA6)
  misc_feature (1)..(415): Homolog of NCBI NO: 15220329 NR Description: tubulin alpha-2/alpha-4 chain
  misc_feature (1)..(410): Homolog of NCBI NO: 25396545 NR Description: alpha tubulin [Physcomitrella patens]
  misc_feature (1)..(415): Homolog of NCBI NO: 401161 NR Description: Tubulin alpha-5 chain (Alpha-5 tubulin)
  misc_feature (1)..(415): Homolog of NCBI NO: 8928419 NR Description: Tubulin alpha-1 chain
  misc_feature (1)..(415): Homolog of NCBI NO: 464846 NR Description: Tubulin alpha-6 chain (Alpha-6 tubulin)
  misc_feature (1)..(415): Homolog of NCBI NO: 6094431 NR Description: Tubulin alpha-3 chain (Alpha-3 tubulin)
  misc_feature (1)..(415): Homolog of NCBI NO: 135399 NR Description: Tubulin alpha-1 chain
  misc_feature (1)..(415): Homolog of NCBI NO: 15241168 NR Description: tubulin alpha-5 chain-like protein
MPSDTTVGVAHDAFNTFFSETGAGKHVPRAVFVDLEPTVIDEVRTGTYRQLFHPEQLISGKEDAANNFARGHYTVGKEIVDLCLDRVRKLADNCTGLQGFLVFNAVGGGTGSGLGSLLLERLSVDYGKKSKLGFTIYPSPQVSTAVVEPYNSVLSTHSLLEHTDVAVLLDNEAIYDICRRSLDIERPTYTNLNRLISQIISSLTTSLRFDGAINVDITEFQTNLVPYPRIHFMLSSYAPVISAAKAYHEQLSVPEITNAVFEPASMMAKCDPRHGKYMACCLMYRGDVVPKDVNAAVGTIKTKRTVQFVDWCPTGFKCGINYQPPTVVPGGDLAKVQRAVCMISNNTAVAEVFSRIDHKFDLMYAKRAFVHWYVGEGMEEGEFSEAREDLAALEKDYEEVGAEGGDDEEDEGEDY

SEQ ID NO: 38749 - DNA, 1154 bp, Arabidopsis thaliana
  misc_feature (1)..(1154): Ceres Seq. ID no. 12327520
  misc_feature: MA Experiment ID: 108434 Result: Down-regulated in Transcription
  misc_feature: MA Experiment 108434 PARAMETER Experiment Name: At_Root_Tips_cDNA_P Parameter: Tissue Value: Root Tips
  misc_feature: MA Experiment ID: 108464 Result: Up-regulated in Transcription
  misc_feature: MA Experiment 108464 PARAMETER Experiment Name: At_Germinating_Seeds_cDNA_P Parameter: Age (day) Value: 4 vs. 0
  misc_feature: MA Experiment 108464 PARAMETER Experiment Name: At_Germinating_Seeds_cDNA_P Parameter: Tissue Value: Germinating Seeds
  misc_feature: MA Experiment ID: 108573 Result: Up-regulated in Transcription
  misc_feature: MA Experiment 108573 PARAMETER Experiment Name: At_Drought_cDNA_P Parameter: Timepoint (hr) Value: 6
  misc_feature: MA Experiment 108573 PARAMETER Experiment Name: At_Drought_cDNA_P Parameter: Tissue Value: Aerial
  misc_feature: MA Experiment 108573 PARAMETER Experiment Name: At_Drought_cDNA_P Parameter: Treatment Value: Drought vs. No Drought
  misc_feature: MA Experiment ID: 108577 Result: Down-regulated in Transcription
  misc_feature: MA Experiment 108577 PARAMETER Experiment Name: At_42deg_Heat_cDNA_P Parameter: Temperature (deg C) Value: 42 vs. 22
  misc_feature: MA Experiment 108577 PARAMETER Experiment Name: At_42deg_Heat_cDNA_P Parameter: Timepoint (hr) Value: 6
  misc_feature: MA Experiment 108577 PARAMETER Experiment Name: At_42deg_Heat_cDNA_P Parameter: Tissue Value: Aerial
  misc_feature: MA Experiment ID: 108595 Result: Up-regulated in Transcription
  misc_feature: MA Experiment 108595 PARAMETER Experiment Name: At_Ler-pi_Ovule_cDNA_P Parameter: Plant Line Value: null
  misc_feature: MA Experiment ID: 20000179 Result: Up-regulated in Transcription
  misc_feature: MA Experiment 20000179 PARAMETER Experiment Name: At_Germinating_Seeds_P Parameter: Age (hr) Value: 6 vs. 0
  misc_feature: MA Experiment 20000179 PARAMETER Experiment Name: At_Germinating_Seeds_P Parameter: Tissue Value: Germinating Seeds
  misc_feature: MA Experiment ID: 20000180 Result: Up-regulated in Transcription
  misc_feature: MA Experiment 20000180 PARAMETER Experiment Name: At_Germinating_Seeds_P Parameter: Age (hr) Value: 24 vs. 0
  misc_feature: MA Experiment 20000180 PARAMETER Experiment Name: At_Germinating_Seeds_P Parameter: Tissue Value: Germinating Seeds
  misc_feature: MA Experiment ID: 20000185 Result: Up-regulated in Transcription
  misc_feature: MA Experiment 20000185 PARAMETER Experiment Name: At_Roots__P Parameter: Age (day) Value: 7 vs. 21
  misc_feature: MA Experiment 20000185 PARAMETER Experiment Name: At_Roots__P Parameter: Organism Value: A. thaliana
  misc_feature: MA Experiment 20000185 PARAMETER Experiment Name: At_Roots__P Parameter: Tissue Value: Roots vs. Whole Plant
  misc_feature: MA Experiment ID: 20000234 Result: Down-regulated in Transcription
  misc_feature: MA Experiment 20000234 PARAMETER Experiment Name: At_Siliques_P Parameter: Age (day) Value: 21
  misc_feature: MA Experiment 20000234 PARAMETER Experiment Name: At_Siliques_P Parameter: Organism Value: A. thaliana
  misc_feature: MA Experiment 20000234 PARAMETER Experiment Name: At_Siliques_P Parameter: Plant Line Value: WS
  misc_feature: MA Experiment 20000234 PARAMETER Experiment Name: At_Siliques_P Parameter: Tissue Value: Less Than 5mm Siliques vs. Whole Plant
  misc_feature: MA Experiment ID: 20000235 Result: Down-regulated in Transcription
  misc_feature: MA Experiment 20000235 PARAMETER Experiment Name: At_Siliques_P Parameter: Age (day) Value: 21
  misc_feature: MA Experiment 20000235 PARAMETER Experiment Name: At_Siliques_P Parameter: Organism Value: A. thaliana
  misc_feature: MA Experiment 20000235 PARAMETER Experiment Name: At_Siliques_P Parameter: Plant Line Value: WS
  misc_feature: MA Experiment 20000235 PARAMETER Experiment Name: At_Siliques_P Parameter: Tissue Value: 5-10mm Siliques vs. Whole Plant
  misc_feature: MA Experiment ID: 20000265 Result: Down-regulated in Transcription
  misc_feature: MA Experiment 20000265 PARAMETER Experiment Name: At_Open_Flower_P Parameter: Age (day) Value: 21
  misc_feature: MA Experiment 20000265 PARAMETER Experiment Name: At_Open_Flower_P Parameter: Plant Line Value: WS
  misc_feature: MA Experiment 20000265 PARAMETER Experiment Name: At_Open_Flower_P Parameter: Tissue Value: Closed Flower vs. Whole Plant
  misc_feature: MA Experiment ID: 20000286 Result: Down-regulated in Transcription
  misc_feature: MA Experiment 20000286 PARAMETER Experiment Name: At_Open_Flower_P Parameter: Age (day) Value: 21
  misc_feature: MA Experiment 20000286 PARAMETER Experiment Name: At_Open_Flower_P Parameter: Plant Line Value: WS
  misc_feature: MA Experiment 20000286 PARAMETER Experiment Name: At_Open_Flower_P Parameter: Tissue Value: Half Open vs. Whole Plant
  misc_feature: MA Experiment ID: 20000438 Result: Down-regulated in Transcription
  misc_feature: MA Experiment 20000438 PARAMETER Experiment Name: At_Shoots__P Parameter: Age (day) Value: 14
  misc_feature: MA Experiment 20000438 PARAMETER Experiment Name: At_Shoots__P Parameter: Tissue Value: Shoots vs. Whole Plant
  misc_feature: MA Experiment ID: 20000439 Result: Up-regulated in Transcription
  misc_feature: MA Experiment 20000439 PARAMETER Experiment Name: At_Roots__P Parameter: Age (day) Value: 14 vs. 21
  misc_feature: MA Experiment 20000439 PARAMETER Experiment Name: At_Roots__P Parameter: Organism Value: A. thaliana
  misc_feature: MA Experiment 20000439 PARAMETER Experiment Name: At_Roots__P Parameter: Tissue Value: Roots vs. Whole Plant
  misc_feature: MA Experiment ID: 20000495 Result: Up-regulated in Transcription
  misc_feature: MA Experiment 20000495 PARAMETER Experiment Name: At_Guard_Cells_P Parameter: Harvest Date Value: 8/2/2002
  misc_feature: MA Experiment 20000495 PARAMETER Experiment Name: At_Guard_Cells_P Parameter: Organism Value: A. thaliana
  misc_feature: MA Experiment 20000495 PARAMETER Experiment Name: At_Guard_Cells_P Parameter: Tissue Value: Guard Cells vs. Leaves
  misc_feature: MA Experiment ID: 20001451 Result: Up-regulated in Transcription
  misc_feature: MA Experiment 20001451 PARAMETER Experiment Name: At_Far-red-induction_P Parameter: Age (day) Value: 7
  misc_feature: MA Experiment 20001451 PARAMETER Experiment Name: At_Far-red-induction_P Parameter: Light Value: Far-red vs. White
  misc_feature: MA Experiment 20001451 PARAMETER Experiment Name: At_Far-red-induction_P Parameter: Organism Value: A. thaliana
  misc_feature: MA Experiment 20001451 PARAMETER Experiment Name: At_Far-red-induction_P Parameter: Plant Line Value: Columbia
  misc_feature: MA Experiment 20001451 PARAMETER Experiment Name: At_Far-red-induction_P Parameter: Timepoint (hr) Value: 24
  misc_feature: MA Experiment 20001451 PARAMETER Experiment Name: At_Far-red-induction_P Parameter: Tissue Value: Whole Plant
  misc_feature: Phenotype: WHOLE PLANT Size-Small
  misc_feature: Phenotype: INFLORESCENCE Strength-Weak
  misc_feature: Phenotype: WHOLE PLANT Size-Small
  misc_feature: Phenotype: INFLORESCENCE Strength-Weak
  misc_feature: Phenotype: WHOLE PLANT Size-Small
  misc_feature: Phenotype: INFLORESCENCE Strength-Weak
  misc_feature: Phenotype: WHOLE PLANT Size-Small
  misc_feature: Phenotype: INFLORESCENCE Strength-Weak
  misc_feature: Phenotype: WHOLE PLANT Size-Small
  misc_feature: Phenotype: INFLORESCENCE Strength-Weak
  misc_feature: Phenotype: WHOLE PLANT Size-Small
  misc_feature: Phenotype: INFLORESCENCE Strength-Weak
  misc_feature: Phenotype: WHOLE PLANT Size-Small
  misc_feature: Phenotype: INFLORESCENCE Strength-Weak
  misc_feature: Phenotype: WHOLE PLANT Size-Small
  misc_feature: Phenotype: INFLORESCENCE Strength-Weak
  misc_feature: Phenotype: WHOLE PLANT Size-Small
  misc_feature: Phenotype: INFLORESCENCE Strength-Weak
  misc_feature: Phenotype: WHOLE PLANT Color-Dark Green
  misc_feature: Phenotype: WHOLE PLANT Size-Small
  misc_feature: Phenotype: WHOLE PLANT Color-Dark Green
  misc_feature: Phenotype: WHOLE PLANT Size-Small
  misc_feature: Phenotype: WHOLE PLANT Color-Dark Green
  misc_feature: Phenotype: WHOLE PLANT Size-Small
  misc_feature: Phenotype: WHOLE PLANT Color-Dark Green
  misc_feature: Phenotype: WHOLE PLANT Size-Small
  misc_feature: Phenotype: INFLORESCENCE Flowering Time-Late Flowering
  misc_feature: Phenotype: WHOLE PLANT Color-Dark Green
  misc_feature: Phenotype: WHOLE PLANT Size-Small
  misc_feature: Phenotype: WHOLE PLANT Color-Dark Green
  misc_feature: Phenotype: WHOLE PLANT Size-Small
  misc_feature: Phenotype: WHOLE PLANT Color-Dark Green
  misc_feature: Phenotype: WHOLE PLANT Size-Small
  misc_feature: Phenotype: WHOLE PLANT Color-Dark Green
  misc_feature: Phenotype: WHOLE PLANT Size-Small
aatacctttgatatttgcctgcacgtccccaaacaagtagagaataataatcacatcaagattgattaaaaccctctcactaatcaccttcttaatcaccaccctctccggctctcaacagaacaacaacaaaaaaacagcttccgttgtcctgttccggcgaaatcggacggtcgagatcaatcatgcatcgtagagcagcaattcaagaatcggatgacgaagaagatgagacttacaacgacgtcgttcctgaatctccttcttcttgtgaagactcaaagatctcaaaaccaactccaaagaaaagtaggaggaacgtagagaagagagttgtctcagttccgatagctgacgtggaaggatctaagagcagaggcgaagtatatccaccgtccgattcatgggcctggagaaagtacggacaaaaaccgatcaaaggctcgccttatcccaggggatattacagatgtagtagctcaaaaggatgtccggcgaggaagcaggtggagagaagccgtgtggacccttctaagcttatgattacttacgcctgcgaccacaatcaccctttcccttcctcctccgctaacaccaaatcccaccaccgctcctccgtcgtcctcaaaaccgcaaagaaagaggaagaatacgaagaggaggaagaagaactaaccgtcaccgccgcagaggaaccaccggcgggacttgatctaagccacgtagactcaccgttgctattaggcggctgctacagcgaaatcggagagttcgggtggttctacgacgcgtcgatctcatcatcatctggttcttcgaatttcctcgacgtaactctagagagaggtttttcagtaggccaagaggaagatgagtctttgttcggtgatctcggtgatttacctgattgcgcctccgtgttccgccgtgggactgttgcgacggaggagcaacatcgaagatgtgattttggcgccattcctttctgtgatagttctagatgagtttgtgtgtgtagccaaaaccaaaagaaaaaaacacaatttttttattttccactgtaaaggtgtatcaatggtggattcatttttttaaaaaaggaaacccaaataataaatttaatatcatttgagagaattcaagtacaattaaag

SEQ ID NO: 38750 - protein, 272 aa, Arabidopsis thaliana
  peptide (1)..(272): Ceres Seq. ID no. 12327521
  misc_feature (70)..(130): Pfam Name: WRKY DNA -binding domain Pfam Description: WRKY DNA -binding domain
  misc_feature (27)..(145): Homolog of NCBI NO: 15226838 NR Description: WRKY family transcription factor
  misc_feature (41)..(141): Homolog of NCBI NO: 38567968 NR Description: OSJNBa0093F12.9 [Oryza sativa (japonica
  misc_feature (225)..(248): Homolog of NCBI NO: 34910854 NR Description: P0435H01.23 [Oryza sativa (japonica
  misc_feature (22)..(219): Homolog of NCBI NO: 34910854 NR Description: P0435H01.23 [Oryza sativa (japonica
  misc_feature (1)..(172): Homolog of NCBI NO: 34909540 NR Description: P0481E12.40 [Oryza sativa (japonica
  misc_feature (14)..(251): Homolog of NCBI NO: 22329838 NR Description: WRKY family transcription factor
  misc_feature (1)..(92): Homolog of NCBI NO: 11357269 NR Description: DNA-binding WRKY-like protein - Arabidopsis
  misc_feature (92)..(272): Homolog of NCBI NO: 11357269 NR Description: DNA-binding WRKY-like protein - Arabidopsis
  misc_feature (1)..(272): Homolog of NCBI NO: 22331854 NR Description: WRKY family transcription factor
  misc_feature (1)..(272): Homolog of NCBI NO: 30694863 NR Description: WRKY family transcription factor [Arabidopsis
MHRRAAIQESDDEEDETYNDVVPESPSSCEDSKISKPTPKKSRRNVEKRVVSVPIADVEGSKSRGEVYPPSDSWAWRKYGQKPIKGSPYPRGYYRCSSSKGCPARKQVERSRVDPSKLMITYACDHNHPFPSSSANTKSHHRSSVVLKTAKKEEEYEEEEEELTVTAAEEPPAGLDLSHVDSPLLLGGCYSEIGEFGWFYDASISSSSGSSNFLDVTLERGFSVGQEEDESLFGDLGDLPDCASVFRRGTVATEEQHRRCDFGAIPFCDSSR

SEQ ID NO: 38751 - protein, 154 aa, Arabidopsis thaliana
  peptide (1)..(154): Ceres Seq. ID no. 12327522
  misc_feature (1)..(45): Homolog of NCBI NO: 29126352 NR Description: putative DNA -binding protein
  misc_feature (1)..(27): Homolog of NCBI NO: 15226838 NR Description: WRKY family transcription factor
  misc_feature (1)..(23): Homolog of NCBI NO: 38567968 NR Description: OSJNBa0093F12.9 [Oryza sativa (japonica
  misc_feature (107)..(130): Homolog of NCBI NO: 34910854 NR Description: P0435H01.23 [Oryza sativa (japonica
  misc_feature (1)..(101): Homolog of NCBI NO: 34910854 NR Description: P0435H01.23 [Oryza sativa (japonica
  misc_feature (1)..(54): Homolog of NCBI NO: 34909540 NR Description: P0481E12.40 [Oryza sativa (japonica
  misc_feature (1)..(133): Homolog of NCBI NO: 22329838 NR Description: WRKY family transcription factor
  misc_feature (1)..(154): Homolog of NCBI NO: 11357269 NR Description: DNA-binding WRKY-like protein - Arabidopsis
  misc_feature (1)..(154): Homolog of NCBI NO: 22331854 NR Description: WRKY family transcription factor
  misc_feature (1)..(154): Homolog of NCBI NO: 30694863 NR Description: WRKY family transcription factor [Arabidopsis
MITYACDHNHPFPSSSANTKSHHRSSVVLKTAKKEEEYEEEEEELTVTAAEEPPAGLDLSHVDSPLLLGGCYSEIGEFGWFYDASISSSSGSSNFLDVTLERGFSVGQEEDESLFGDLGDLPDCASVFRRGTVATEEQHRRCDFGAIPFCDSSR

SEQ ID NO: 38752 - DNA, 1448 bp, Arabidopsis thaliana
  misc_feature (1)..(1448): Ceres Seq. ID no. 12559926
  misc_feature: MA Experiment ID: 20000180 Result: Down-regulated in Transcription
  misc_feature: MA Experiment 20000180 PARAMETER Experiment Name: At_Germinating_Seeds_P Parameter: Age (hr) Value: 24 vs. 0
  misc_feature: MA Experiment 20000180 PARAMETER Experiment Name: At_Germinating_Seeds_P Parameter: Tissue Value: Germinating Seeds
  misc_feature: MA Experiment ID: 20000437 Result: Down-regulated in Transcription
  misc_feature: MA Experiment 20000437 PARAMETER Experiment Name: At_Drought_P Parameter: Age (day) Value: 8
  misc_feature: MA Experiment 20000437 PARAMETER Experiment Name: At_Drought_P Parameter: Organism Value: A. thaliana
  misc_feature: MA Experiment 20000437 PARAMETER Experiment Name: At_Drought_P Parameter: Plant Line Value: WS
  misc_feature: MA Experiment 20000437 PARAMETER Experiment Name: At_Drought_P Parameter: Timepoint (hr) Value: 24
  misc_feature: MA Experiment 20000437 PARAMETER Experiment Name: At_Drought_P Parameter: Tissue Value: Whole Plant
  misc_feature: MA Experiment 20000437 PARAMETER Experiment Name: At_Drought_P Parameter: Treatment Value: Drought vs. No Drought
  misc_feature: MA Experiment ID: 20000794 Result: Down-regulated in Transcription
  misc_feature: MA Experiment 20000794 PARAMETER Experiment Name: At_Petals_P Parameter: Age (day) Value: 23-25 days
  misc_feature: MA Experiment 20000794 PARAMETER Experiment Name: At_Petals_P Parameter: Plant Line Value: WS
  misc_feature: MA Experiment 20000794 PARAMETER Experiment Name: At_Petals_P Parameter: Tissue Value: Petals vs. Whole plant
  misc_feature: MA Experiment ID: 20001557 Result: Up-regulated in Transcription
  misc_feature: MA Experiment 20001557 PARAMETER Experiment Name: At_Drought_Soil_Dry_P Parameter: Age (day) Value: 27
  misc_feature: MA Experiment 20001557 PARAMETER Experiment Name: At_Drought_Soil_Dry_P Parameter: Organism Value: A. thaliana
  misc_feature: MA Experiment 20001557 PARAMETER Experiment Name: At_Drought_Soil_Dry_P Parameter: Plant Line Value: WS
  misc_feature: MA Experiment 20001557 PARAMETER Experiment Name: At_Drought_Soil_Dry_P Parameter: Post Timepoint (hr) Value: 3
  misc_feature: MA Experiment 20001557 PARAMETER Experiment Name: At_Drought_Soil_Dry_P Parameter: Post-Treatment Value: Re-Water vs. No Drought
  misc_feature: MA Experiment 20001557 PARAMETER Experiment Name: At_Drought_Soil_Dry_P Parameter: Timepoint (day) Value: 13
  misc_feature: MA Experiment 20001557 PARAMETER Experiment Name: At_Drought_Soil_Dry_P Parameter: Treatment Value: Drought vs. No Drought
  misc_feature: MA Experiment ID: 20001558 Result: Up-regulated in Transcription
  misc_feature: MA Experiment 20001558 PARAMETER Experiment Name: At_Drought_Soil_Dry_P Parameter: Age (day) Value: 27
  misc_feature: MA Experiment 20001558 PARAMETER Experiment Name: At_Drought_Soil_Dry_P Parameter: Organism Value: A. thaliana
  misc_feature: MA Experiment 20001558 PARAMETER Experiment Name: At_Drought_Soil_Dry_P Parameter: Plant Line Value: WS
  misc_feature: MA Experiment 20001558 PARAMETER Experiment Name: At_Drought_Soil_Dry_P Parameter: Post Timepoint (hr) Value: 6
  misc_feature: MA Experiment 20001558 PARAMETER Experiment Name: At_Drought_Soil_Dry_P Parameter: Post-Treatment Value: Re-Water vs. No Drought
  misc_feature: MA Experiment 20001558 PARAMETER Experiment Name: At_Drought_Soil_Dry_P Parameter: Timepoint (day) Value: 13
  misc_feature: MA Experiment 20001558 PARAMETER Experiment Name: At_Drought_Soil_Dry_P Parameter: Treatment Value: Drought vs. No Drought
  misc_feature: MA Experiment ID: 20001560 Result: Up-regulated in Transcription
  misc_feature: MA Experiment 20001560 PARAMETER Experiment Name: At_Drought_Soil_Dry_P Parameter: Age (day) Value: 28
  misc_feature: MA Experiment 20001560 PARAMETER Experiment Name: At_Drought_Soil_Dry_P Parameter: Organism Value: A. thaliana
  misc_feature: MA Experiment 20001560 PARAMETER Experiment Name: At_Drought_Soil_Dry_P Parameter: Plant Line Value: WS
  misc_feature: MA Experiment 20001560 PARAMETER Experiment Name: At_Drought_Soil_Dry_P Parameter: Post Timepoint (hr) Value: None
  misc_feature: MA Experiment 20001560 PARAMETER Experiment Name: At_Drought_Soil_Dry_P Parameter: Post-Treatment Value: None
  misc_feature: MA Experiment 20001560 PARAMETER Experiment Name: At_Drought_Soil_Dry_P Parameter: Timepoint (day) Value: 14
  misc_feature: MA Experiment 20001560 PARAMETER Experiment Name: At_Drought_Soil_Dry_P Parameter: Treatment Value: Drought vs. No Drought
agagacacaaaaagggttttgagtattgaccttcttctctcggccgctcgctgaggtttatcaagtgagagccttttctttcggagttttcaacgcaattcttcagagaagcagaagagatgttgtacattatagggttaggtttaggagatgaaaaagatataaccttgagaggactcgaggctgttaagaaatcacagaaagtatacatggaagcttacacttctcttttgtcctttggtctctctgctgatggactttccaatcttgaaaagttctatgggaaaccaattatacttgctgatagagaaatggtggaagaaaaggctggtgatatgattgatgaagccattgataatgatgtcgcttttctcgttgttggtgatcctttcggagctacaacgcatagtgatcttgttgttcgagctaagacactcggtgtaaaagtagaggtagtgcacaatgcatcggtgatgaatgctgttgggatttgtggattgcagctttaccattatggagagactgtttcgatcccattctttaccgagacttggagacctgatagtttttatgagaagatcaagaagaaccgctctcttggacttcacactctctgtttgctagatatccgagtgaaggagcctacttttgaatctctatgcagaggagggaagaaacagtatgaaccgccgaggtatatgagtgttaatacagcaatcgagcagcttctggaagttgagcaaaagcatggagattctgtttatggtgaagacacacagtgtgtgggctttgcccggcttggctctgaggaccagacgatagttgcagggacgatgaagcaactcgaaagcgttgattttggagcaccgttgcattgtcttgtgatagtaggcgagactcatcccgtggaagaagagatgttagagttttacaaatacaaaagtggaaactaaaagaccacaaaactaaagaagactcttcttatcattactcgcaaagcttcaaggcagagcaggaggaggaagagattgaaactaggaactgataggtgaaatactcttcttcatctctattgactttcgaggttttggtagtgaattttgtataagcatagttatggtgtgacttcgaattggaaaggtggatattgaaatattcatttggctatagattgaggtggattttgtatcaaagctttgtttcagagataattttattttggcttggtttggtttggtttgaggatttgaaaccaaactagaggtcgtttcggtttgtttttgttcggtctggttcttgagggttgattacccttcaaaagatcattgtttagtttatgattgtctccttaaaccaccacacgtccaaagattgtattttattattgcccctaagttagaactgagaaaactttgtaacgttcaaatataatgatgtttatagaaatg

SEQ ID NO: 38753 - protein, 277 aa, Arabidopsis thaliana
  peptide (1)..(277): Ceres Seq. ID no. 12559927
  misc_feature (1)..(214): Pfam Name: Tetrapyrrole (Corrin/Porphyrin) Methylases Pfam Description: Tetrapyrrole (Corrin/Porphyrin) Methylases
  misc_feature (1)..(271): Homolog of NCBI NO: 28572120 NR Description: Diphthamide methyltransferase CG31289-PA
  misc_feature (1)..(277): Homolog of NCBI NO: 19075941 NR Description: putative diphthine synthase [Schizosaccharomyces
  misc_feature (1)..(270): Homolog of NCBI NO: 6323201 NR Description: diphthamide biosynthesis; Dph5p [Saccharomyces
  misc_feature (1)..(271): Homolog of NCBI NO: 7706272 NR Description: CGI-30 protein [Homo sapiens]
  misc_feature (1)..(92): Homolog of NCBI NO: 34859873 NR Description: similar to RIKEN cDNA 2410012M04 [Rattus
  misc_feature (87)..(271): Homolog of NCBI NO: 34859873 NR Description: similar to RIKEN cDNA 2410012M04 [Rattus
  misc_feature (1)..(271): Homolog of NCBI NO: 12845949 NR Description: unnamed protein product [Mus musculus]
  misc_feature (1)..(271): Homolog of NCBI NO: 40254183 NR Description: RIKEN cDNA 2410012M04 [Mus musculus]
  misc_feature (1)..(274): Homolog of NCBI NO: 28829458 NR Description: similar to Arabidopsis thaliana (Mouse-ear Methyltransferase - like protein (Methyltransferase-like protein)
  misc_feature (1)..(277): Homolog of NCBI NO: 15236075 NR Description: methyltransferase - like protein
MLYIIGLGLGDEKDITLRGLEAVKKSQKVYMEAYTSLLSFGLSADGLSNLEKFYGKPIILADREMVEEKAGDMIDEAIDNDVAFLVVGDPFGATTHSDLVVRAKTLGVKVEVVHNASVMNAVGICGLQLYHYGETVSIPFFTETWRPDSFYEKIKKNRSLGLHTLCLLDIRVKEPTFESLCRGGKKQYEPPRYMSVNTAIEQLLEVEQKHGDSVYGEDTQCVGFARLGSEDQTIVAGTMKQLESVDFGAPLHCLVIVGETHPVEEEMLEFYKYKSGN

SEQ ID NO: 38754 - protein, 247 aa, Arabidopsis thaliana
  peptide (1)..(247): Ceres Seq. ID no. 12559928
  misc_feature (1)..(184): Pfam Name: Tetrapyrrole (Corrin/Porphyrin) Methylases Pfam Description: Tetrapyrrole (Corrin/Porphyrin) Methylases
  misc_feature (1)..(241): Homolog of NCBI NO: 28572120 NR Description: Diphthamide methyltransferase CG31289-PA
  misc_feature (1)..(247): Homolog of NCBI NO: 19075941 NR Description: putative diphthine synthase [Schizosaccharomyces
  misc_feature (1)..(240): Homolog of NCBI NO: 6323201 NR Description: diphthamide biosynthesis; Dph5p [Saccharomyces
  misc_feature (1)..(241): Homolog of NCBI NO: 7706272 NR Description: CGI-30 protein [Homo sapiens]
  misc_feature (1)..(62): Homolog of NCBI NO: 34859873 NR Description: similar to RIKEN cDNA 2410012M04 [Rattus
  misc_feature (57)..(241): Homolog of NCBI NO: 34859873 NR Description: similar to RIKEN cDNA 2410012M04 [Rattus
  misc_feature (1)..(241): Homolog of NCBI NO: 12845949 NR Description: unnamed protein product [Mus musculus]
  misc_feature (1)..(241): Homolog of NCBI NO: 40254183 NR Description: RIKEN cDNA 2410012M04 [Mus musculus]
  misc_feature (1)..(244): Homolog of NCBI NO: 28829458 NR Description: similar to Arabidopsis thaliana (Mouse-ear Methyltransferase - like protein (Methyltransferase-like protein)
  misc_feature (1)..(247): Homolog of NCBI NO: 15236075 NR Description: methyltransferase - like protein
MEAYTSLLSFGLSADGLSNLEKFYGKPIILADREMVEEKAGDMIDEAIDNDVAFLVVGDPFGATTHSDLVVRAKTLGVKVEVVHNASVMNAVGICGLQLYHYGETVSIPFFTETWRPDSFYEKIKKNRSLGLHTLCLLDIRVKEPTFESLCRGGKKQYEPPRYMSVNTAIEQLLEVEQKHGDSVYGEDTQCVGFARLGSEDQTIVAGTMKQLESVDFGAPLHCLVIVGETHPVEEEMLEFYKYKSGN

SEQ ID NO: 38755 - protein, 213 aa, Arabidopsis thaliana
  peptide (1)..(213): Ceres Seq. ID no. 12559929
  misc_feature (1)..(150): Pfam Name: Tetrapyrrole (Corrin/Porphyrin) Methylases Pfam Description: Tetrapyrrole (Corrin/Porphyrin) Methylases
  misc_feature (1)..(207): Homolog of NCBI NO: 28572120 NR Description: Diphthamide methyltransferase CG31289-PA
  misc_feature (1)..(213): Homolog of NCBI NO: 19075941 NR Description: putative diphthine synthase [Schizosaccharomyces
  misc_feature (1)..(206): Homolog of NCBI NO: 6323201 NR Description: diphthamide biosynthesis; Dph5p [Saccharomyces
  misc_feature (1)..(207): Homolog of NCBI NO: 7706272 NR Description: CGI-30 protein [Homo sapiens]
  misc_feature (1)..(28): Homolog of NCBI NO: 34859873 NR Description: similar to RIKEN cDNA 2410012M04 [Rattus
  misc_feature (23)..(207): Homolog of NCBI NO: 34859873 NR Description: similar to RIKEN cDNA 2410012M04 [Rattus
  misc_feature (1)..(207): Homolog of NCBI NO: 12845949 NR Description: unnamed protein product [Mus musculus]
  misc_feature (1)..(207): Homolog of NCBI NO: 40254183 NR Description: RIKEN cDNA 2410012M04 [Mus musculus]
  misc_feature (1)..(210): Homolog of NCBI NO: 28829458 NR Description: similar to Arabidopsis thaliana (Mouse-ear Methyltransferase - like protein (Methyltransferase-like protein)
  misc_feature (1)..(213): Homolog of NCBI NO: 15236075 NR Description: methyltransferase - like protein
MVEEKAGDMIDEAIDNDVAFLVVGDPFGATTHSDLVVRAKTLGVKVEVVHNASVMNAVGICGLQLYHYGETVSIPFFTETWRPDSFYEKIKKNRSLGLHTLCLLDIRVKEPTFESLCRGGKKQYEPPRYMSVNTAIEQLLEVEQKHGDSVYGEDTQCVGFARLGSEDQTIVAGTMKQLESVDFGAPLHCLVIVGETHPVEEEMLEFYKYKSGN

SEQ ID NO: 38756 - DNA, 2014 bp, Arabidopsis thaliana
  misc_feature (1)..(2014): Ceres Seq. ID no. 13497225
  misc_feature: MA Experiment ID: 108501 Result: Down-regulated in Transcription
  misc_feature: MA Experiment 108501 PARAMETER Experiment Name: At_ap2_floral_buds_cDNA_P Parameter: Plant Line Value: ap2 (Ler.)
  misc_feature: MA Experiment 108501 PARAMETER Experiment Name: At_ap2_floral_buds_cDNA_P Parameter: Tissue Value: Closed Flower
  misc_feature: MA Experiment ID: 108595 Result: Up-regulated in Transcription
  misc_feature: MA Experiment 108595 PARAMETER Experiment Name: At_Ler-pi_Ovule_cDNA_P Parameter: Plant Line Value: null
  misc_feature: MA Experiment ID: 20000117 Result: Down-regulated in Transcription
  misc_feature: MA Experiment 20000117 PARAMETER Experiment Name: At_100uM_ABA_Mutants_cDNA_P Parameter: Plant Line Value: Columbia
  misc_feature: MA Experiment 20000117 PARAMETER Experiment Name: At_100uM_ABA_Mutants_cDNA_P Parameter: Timepoint (hr) Value: 6
  misc_feature: MA Experiment 20000117 PARAMETER Experiment Name: At_100uM_ABA_Mutants_cDNA_P Parameter: Tissue Value: Aerial
  misc_feature: MA Experiment 20000117 PARAMETER Experiment Name: At_100uM_ABA_Mutants_cDNA_P Parameter: Treatment Value: 100uM ABA vs. No Treatment
  misc_feature: MA Experiment ID: 20000184 Result: Down-regulated in Transcription
  misc_feature: MA Experiment 20000184 PARAMETER Experiment Name: At_Shoots__P Parameter: Age (day) Value: 7
  misc_feature: MA Experiment 20000184 PARAMETER Experiment Name: At_Shoots__P Parameter: Tissue Value: Shoots vs. Whole Plant
  misc_feature: MA Experiment ID: 20000185 Result: Down-regulated in Transcription
  misc_feature: MA Experiment 20000185 PARAMETER Experiment Name: At_Roots__P Parameter: Age (day) Value: 7 vs. 21
  misc_feature: MA Experiment 20000185 PARAMETER Experiment Name: At_Roots__P Parameter: Organism Value: A. thaliana
  misc_feature: MA Experiment 20000185 PARAMETER Experiment Name: At_Roots__P Parameter: Tissue Value: Roots vs. Whole Plant
  misc_feature: MA Experiment ID: 20000234 Result: Up-regulated in Transcription
  misc_feature: MA Experiment 20000234 PARAMETER Experiment Name: At_Siliques_P Parameter: Age (day) Value: 21
  misc_feature: MA Experiment 20000234 PARAMETER Experiment Name: At_Siliques_P Parameter: Organism Value: A. thaliana
  misc_feature: MA Experiment 20000234 PARAMETER Experiment Name: At_Siliques_P Parameter: Plant Line Value: WS
  misc_feature: MA Experiment 20000234 PARAMETER Experiment Name: At_Siliques_P Parameter: Tissue Value: Less Than 5mm Siliques vs. Whole Plant
  misc_feature: MA Experiment ID: 20000235 Result: Up-regulated in Transcription
  misc_feature: MA Experiment 20000235 PARAMETER Experiment Name: At_Siliques_P Parameter: Age (day) Value: 21
  misc_feature: MA Experiment 20000235 PARAMETER Experiment Name: At_Siliques_P Parameter: Organism Value: A. thaliana
  misc_feature: MA Experiment 20000235 PARAMETER Experiment Name: At_Siliques_P Parameter: Plant Line Value: WS
  misc_feature: MA Experiment 20000235 PARAMETER Experiment Name: At_Siliques_P Parameter: Tissue Value: 5-10mm Siliques vs. Whole Plant
  misc_feature: MA Experiment ID: 20000265 Result: Up-regulated in Transcription
  misc_feature: MA Experiment 20000265 PARAMETER Experiment Name: At_Open_Flower_P Parameter: Age (day) Value: 21
  misc_feature: MA Experiment 20000265 PARAMETER Experiment Name: At_Open_Flower_P Parameter: Plant Line Value: WS
  misc_feature: MA Experiment 20000265 PARAMETER Experiment Name: At_Open_Flower_P Parameter: Tissue Value: Closed Flower vs. Whole Plant
  misc_feature: MA Experiment ID: 20000286 Result: Up-regulated in Transcription
  misc_feature: MA Experiment 20000286 PARAMETER Experiment Name: At_Open_Flower_P Parameter: Age (day) Value: 21
  misc_feature: MA Experiment 20000286 PARAMETER Experiment Name: At_Open_Flower_P Parameter: Plant Line Value: WS
  misc_feature: MA Experiment 20000286 PARAMETER Experiment Name: At_Open_Flower_P Parameter: Tissue Value: Half Open vs. Whole Plant
  misc_feature: MA Experiment ID: 20000438 Result: Down-regulated in Transcription
  misc_feature: MA Experiment 20000438 PARAMETER Experiment Name: At_Shoots__P Parameter: Age (day) Value: 14
  misc_feature: MA Experiment 20000438 PARAMETER Experiment Name: At_Shoots__P Parameter: Tissue Value: Shoots vs. Whole Plant
  misc_feature: MA Experiment ID: 20000439 Result: Down-regulated in Transcription
  misc_feature: MA Experiment 20000439 PARAMETER Experiment Name: At_Roots__P Parameter: Age (day) Value: 14 vs. 21
  misc_feature: MA Experiment 20000439 PARAMETER Experiment Name: At_Roots__P Parameter: Organism Value: A. thaliana
  misc_feature: MA Experiment 20000439 PARAMETER Experiment Name: At_Roots__P Parameter: Tissue Value: Roots vs. Whole Plant
  misc_feature: MA Experiment ID: 20000453 Result: Up-regulated in Transcription
  misc_feature: MA Experiment 20000453 PARAMETER Experiment Name: At_100uM_ABA_P Parameter: Age (day) Value: 15
  misc_feature: MA Experiment 20000453 PARAMETER Experiment Name: At_100uM_ABA_P Parameter: Organism Value: A. thaliana
  misc_feature: MA Experiment 20000453 PARAMETER Experiment Name: At_100uM_ABA_P Parameter: Plant Line Value: WS
  misc_feature: MA Experiment 20000453 PARAMETER Experiment Name: At_100uM_ABA_P Parameter: Timepoint (hr) Value: 24
  misc_feature: MA Experiment 20000453 PARAMETER Experiment Name: At_100uM_ABA_P Parameter: Tissue Value: Aerial
  misc_feature: MA Experiment 20000453 PARAMETER Experiment Name: At_100uM_ABA_P Parameter: Treatment Value: 100uM ABA vs. No Treatment
  misc_feature: MA Experiment ID: 20000573 Result: Down-regulated in Transcription
  misc_feature: MA Experiment 20000573 PARAMETER Experiment Name: At_100uM_ABA_Mutants__P Parameter: Organism Value: A. thaliana
  misc_feature: MA Experiment 20000573 PARAMETER Experiment Name: At_100uM_ABA_Mutants__P Parameter: Plant Line Value: CS22 vs. Ler wt
  misc_feature: MA Experiment 20000573 PARAMETER Experiment Name: At_100uM_ABA_Mutants__P Parameter: Timepoint (hr) Value: N/A
  misc_feature: MA Experiment 20000573 PARAMETER Experiment Name: At_100uM_ABA_Mutants__P Parameter: Tissue Value: Whole Plant
  misc_feature: MA Experiment 20000573 PARAMETER Experiment Name: At_100uM_ABA_Mutants__P Parameter: Treatment Value: None
  misc_feature: MA Experiment ID: 20000794 Result: Down-regulated in Transcription
  misc_feature: MA Experiment 20000794 PARAMETER Experiment Name: At_Petals_P Parameter: Age (day) Value: 23-25 days
  misc_feature: MA Experiment 20000794 PARAMETER Experiment Name: At_Petals_P Parameter: Plant Line Value: WS
  misc_feature: MA Experiment 20000794 PARAMETER Experiment Name: At_Petals_P Parameter: Tissue Value: Petals vs. Whole plant
  misc_feature: MA Experiment ID: 20001248 Result: Down-regulated in Transcription
  misc_feature: MA Experiment 20001248 PARAMETER Experiment Name: At_Far-red-induction_P Parameter: Age (day) Value: 7
  misc_feature: MA Experiment 20001248 PARAMETER Experiment Name: At_Far-red-induction_P Parameter: Light Value: Far-red vs. White
  misc_feature: MA Experiment 20001248 PARAMETER Experiment Name: At_Far-red-induction_P Parameter: Organism Value: A. thaliana
  misc_feature: MA Experiment 20001248 PARAMETER Experiment Name: At_Far-red-induction_P Parameter: Plant Line Value: Columbia
  misc_feature: MA Experiment 20001248 PARAMETER Experiment Name: At_Far-red-induction_P Parameter: Timepoint (hr) Value: 4
  misc_feature: MA Experiment 20001248 PARAMETER Experiment Name: At_Far-red-induction_P Parameter: Tissue Value: Whole Plant
  misc_feature: MA Experiment ID: 20001450 Result: Down-regulated in Transcription
  misc_feature: MA Experiment 20001450 PARAMETER Experiment Name: At_Far-red-induction_P Parameter: Age (day) Value: 7
  misc_feature: MA Experiment 20001450 PARAMETER Experiment Name: At_Far-red-induction_P Parameter: Light Value: Far-red vs. White
  misc_feature: MA Experiment 20001450 PARAMETER Experiment Name: At_Far-red-induction_P Parameter: Organism Value: A. thaliana
  misc_feature: MA Experiment 20001450 PARAMETER Experiment Name: At_Far-red-induction_P Parameter: Plant Line Value: Columbia
  misc_feature: MA Experiment 20001450 PARAMETER Experiment Name: At_Far-red-induction_P Parameter: Timepoint (hr) Value: 8
  misc_feature: MA Experiment 20001450 PARAMETER Experiment Name: At_Far-red-induction_P Parameter: Tissue Value: Whole Plant
  misc_feature: MA Experiment ID: 20001457 Result: Up-regulated in Transcription
  misc_feature: MA Experiment 20001457 PARAMETER Experiment Name: At_50mM_NH4NO3_L-to-H_P Parameter: Age (day) Value: Undefined
  misc_feature: MA Experiment 20001457 PARAMETER Experiment Name: At_50mM_NH4NO3_L-to-H_P Parameter: Organism Value: Undefined
  misc_feature: MA Experiment 20001457 PARAMETER Experiment Name: At_50mM_NH4NO3_L-to-H_P Parameter: Plant Line Value: Undefined
  misc_feature: MA Experiment 20001457 PARAMETER Experiment Name: At_50mM_NH4NO3_L-to-H_P Parameter: Timepoint (hr) Value: 0.5
  misc_feature: MA Experiment 20001457 PARAMETER Experiment Name: At_50mM_NH4NO3_L-to-H_P Parameter: Tissue Value: Siliques
  misc_feature: MA Experiment 20001457 PARAMETER Experiment Name: At_50mM_NH4NO3_L-to-H_P Parameter: Treatment Value: 50mM NH4NO3 vs. 100mM Manitol
  misc_feature: MA Experiment ID: 20001557 Result: Up-regulated in Transcription
  misc_feature: MA Experiment 20001557 PARAMETER Experiment Name: At_Drought_Soil_Dry_P Parameter: Age (day) Value: 27
  misc_feature: MA Experiment 20001557 PARAMETER Experiment Name: At_Drought_Soil_Dry_P Parameter: Organism Value: A. thaliana
  misc_feature: MA Experiment 20001557 PARAMETER Experiment Name: At_Drought_Soil_Dry_P Parameter: Plant Line Value: WS
  misc_feature: MA Experiment 20001557 PARAMETER Experiment Name: At_Drought_Soil_Dry_P Parameter: Post Timepoint (hr) Value: 3
  misc_feature: MA Experiment 20001557 PARAMETER Experiment Name: At_Drought_Soil_Dry_P Parameter: Post-Treatment Value: Re-Water vs. No Drought
  misc_feature: MA Experiment 20001557 PARAMETER Experiment Name: At_Drought_Soil_Dry_P Parameter: Timepoint (day) Value: 13
  misc_feature: MA Experiment 20001557 PARAMETER Experiment Name: At_Drought_Soil_Dry_P Parameter: Treatment Value: Drought vs. No Drought
  misc_feature: MA Experiment ID: 20001558 Result: Up-regulated in Transcription
  misc_feature: MA Experiment 20001558 PARAMETER Experiment Name: At_Drought_Soil_Dry_P Parameter: Age (day) Value: 27
  misc_feature: MA Experiment 20001558 PARAMETER Experiment Name: At_Drought_Soil_Dry_P Parameter: Organism Value: A. thaliana
  misc_feature: MA Experiment 20001558 PARAMETER Experiment Name: At_Drought_Soil_Dry_P Parameter: Plant Line Value: WS
  misc_feature: MA Experiment 20001558 PARAMETER Experiment Name: At_Drought_Soil_Dry_P Parameter: Post Timepoint (hr) Value: 6
  misc_feature: MA Experiment 20001558 PARAMETER Experiment Name: At_Drought_Soil_Dry_P Parameter: Post-Treatment Value: Re-Water vs. No Drought
  misc_feature: MA Experiment 20001558 PARAMETER Experiment Name: At_Drought_Soil_Dry_P Parameter: Timepoint (day) Value: 13
  misc_feature: MA Experiment 20001558 PARAMETER Experiment Name: At_Drought_Soil_Dry_P Parameter: Treatment Value: Drought vs. No Drought
  misc_feature: MA Experiment ID: 20001560 Result: Up-regulated in Transcription
  misc_feature: MA Experiment 20001560 PARAMETER Experiment Name: At_Drought_Soil_Dry_P Parameter: Age (day) Value: 28
  misc_feature: MA Experiment 20001560 PARAMETER Experiment Name: At_Drought_Soil_Dry_P Parameter: Organism Value: A. thaliana
  misc_feature: MA Experiment 20001560 PARAMETER Experiment Name: At_Drought_Soil_Dry_P Parameter: Plant Line Value: WS
  misc_feature: MA Experiment 20001560 PARAMETER Experiment Name: At_Drought_Soil_Dry_P Parameter: Post Timepoint (hr) Value: None
  misc_feature: MA Experiment 20001560 PARAMETER Experiment Name: At_Drought_Soil_Dry_P Parameter: Post-Treatment Value: None
  misc_feature: MA Experiment 20001560 PARAMETER Experiment Name: At_Drought_Soil_Dry_P Parameter: Timepoint (day) Value: 14
  misc_feature: MA Experiment 20001560 PARAMETER Experiment Name: At_Drought_Soil_Dry_P Parameter: Treatment Value: Drought vs. No Drought
  misc_feature: MA Experiment ID: 20001771 Result: Up-regulated in Transcription
  misc_feature: MA Experiment 20001771 PARAMETER Experiment Name: At_Far-red-enriched-adult_P Parameter: Age (day) Value: 28
  misc_feature: MA Experiment 20001771 PARAMETER Experiment Name: At_Far-red-enriched-adult_P Parameter: Light Value: Far-red enriched vs. White
  misc_feature: MA Experiment 20001771 PARAMETER Experiment Name: At_Far-red-enriched-adult_P Parameter: Organism Value: A. thaliana
  misc_feature: MA Experiment 20001771 PARAMETER Experiment Name: At_Far-red-enriched-adult_P Parameter: Plant Line Value: Columbia
  misc_feature: MA Experiment 20001771 PARAMETER Experiment Name: At_Far-red-enriched-adult_P Parameter: Timepoint (hr) Value: 16
  misc_feature: MA Experiment 20001771 PARAMETER Experiment Name: At_Far-red-enriched-adult_P Parameter: Tissue Value: Aerial
  misc_feature: MA Experiment ID: 20001906 Result: Down-regulated in Transcription
  misc_feature: MA Experiment 20001906 PARAMETER Experiment Name: At_Drought_Reproduction_P Parameter: Age (day) Value: 35
  misc_feature: MA Experiment 20001906 PARAMETER Experiment Name: At_Drought_Reproduction_P Parameter: Organism Value: A. thaliana
  misc_feature: MA Experiment 20001906 PARAMETER Experiment Name: At_Drought_Reproduction_P Parameter: Plant Line Value: WS
  misc_feature: MA Experiment 20001906 PARAMETER Experiment Name: At_Drought_Reproduction_P Parameter: Timepoint (day) Value: 5
  misc_feature: MA Experiment 20001906 PARAMETER Experiment Name: At_Drought_Reproduction_P Parameter: Tissue Value: Siliques
  misc_feature: MA Experiment 20001906 PARAMETER Experiment Name: At_Drought_Reproduction_P Parameter: Treatment Value: Drought vs. No Drought
accataggtcaccaaagactttataaataacccatacattatcatatacatataggcatacaaagtgagagaactctactctagattgtgctaaactcaatttgtattaatgatggatagattttggtcatggagattgtttgttgctctctctctttttctccattctccaatttgttcttctgacaaagctccgaactactccttcatgcgggacgcgacaggaagtcctacaacgtcgtactacgactatatcatcatcggtggtgggactgccgggtgccctctagccgcaacgctgtctcaaaacgccagcgttttgctgctcgaacgcggtgactcaccgtacaataaccccaacatcacgaggctctcggctttcggagccgctctctctgacctgtctgagtcctcaccatctcagcgttttgtatcagaagatggtgtcattaatgcacgtgctcgggttctcggtggcggaagcgctctcaacgccggcttctatacacgtgcgggcactaaatacgttaggaacatgggttgggacggagcgctagcgaacgagtcgtaccagtgggttgaagctaaggtggcgtttcagcctccgatggggcggtggcaaacggccgtgagagacggcttattggaggctgggattgtccctaataatggtttcacctatgatcatatcaatggcaccaaatttggcggtactatttttgaccgcaacggcaatagacacaccgccgccgatttgttagagtatgccgatcctaagggtattaccgtccttttgcatgccaccgtccaccggatcttgtttcgtactcgaggtacgaccaagccaatagccaacggagttgtgtaccgagaccggaccggtcaggctcatagagcttacctaaaggaaggcgccttgagtgagatcatcctatcggccggaaccctagggagcccacaacttcttatgctaagtggtgttggcccatcggctcaattacaggcccaaaacatcacggtggtgatggaccagcctcatgtgggtcaaggcatgtatgacaaccctatgaatgccgtgttcgttccttctccagtccccgttgaggtctcactcattgaggttgttgggattaccggggaaggaacatatgtcgaagccgccggtggtgaaaattttggcggaggtggtggtggttctagtggatcgtcctccactagagactactatgcaatgttttcaccaagggcaacattattagagtcaaattcaatgaccaaattatcatcagcccaaccttttcaaggaggcttccttttagagaaagtaatgggcccattatcaacgggtcatttagagctcaagacccgaaacccaaaagataacccgattgtgactttcaactatttccaacatcctgacgacctaaaacgttgtgttcgaggaatccaaaccatagagagagtcgtgcaatctaaagctttttcgaggtataagtacgcagatgtgtcatttgagtatttacttaacctcacggcgagtactcctgtcaatctaaggccgcctcgcagtggtcctggagcctcgttgcctccatccgcagaggaattttgccaacatacagttacaaccatttggcattaccatggaggatgcgttgtgggcagagtggtcgatggggattataaagttattggtatcgaccagcttagagtcattgatatgtcgaccgttggttattgtcccgggacaaatcctcaagccacggttatgatgcttggcaggtatatgggtgtgaagatcttgagagagagactcaccaagaagtagggttttgaatcggatcaggggttttgggaaaacgttatattaaaaatgaaatgaatcaagatattactaatcgatgttattaatagctgaatatgtattgttcttggtaatttctgtttggtacttattattagaccaaactgagatgtatacggaaatatatgtatagactcattcccaattttc

SEQ ID NO: 38757 - protein, 572 aa, Arabidopsis thaliana
  peptide (1)..(572): Ceres Seq. ID no. 13497226
  misc_feature (46)..(312): Pfam Name: GMC oxidoreductase Pfam Description: GMC oxidoreductase
  misc_feature (26)..(572): Homolog of NCBI NO: 11357159 NR Description: adhesion of calyx edges protein ACE
  misc_feature (12)..(571): Homolog of NCBI NO: 27452902 NR Description: Putative mandelonitrile lyase
  misc_feature (6)..(558): Homolog of NCBI NO: 10177730 NR Description: mandelonitrile lyase-like protein [Arabidopsis
  misc_feature (11)..(569): Homolog of NCBI NO: 18410417 NR Description: glucose-methanol-choline (GMC) oxidoreductase
  misc_feature (12)..(571): Homolog of NCBI NO: 11358959 NR Description: probable mandelonitrile lyase (EC 4.1.2.10)
  misc_feature (6)..(568): Homolog of NCBI NO: 15242236 NR Description: glucose-methanol-choline (GMC) oxidoreductase
  misc_feature (34)..(572): Homolog of NCBI NO: 8778640 NR Description: F5O11.31 [Arabidopsis thaliana]
  misc_feature (28)..(572): Homolog of NCBI NO: 9502391 NR Description: T12C24.11 [Arabidopsis thaliana]
  misc_feature (1)..(572): Homolog of NCBI NO: 22329512 NR Description: glucose-methanol-choline (GMC) oxidoreductase
  misc_feature (1)..(572): Homolog of NCBI NO: 17978954 NR Description: At1g12570/T12C24_9 [Arabidopsis thaliana]
MMDRFWSWRLFVALSLFLHSPICSSDKAPNYSFMRDATGSPTTSYYDYIIIGGGTAGCPLAATLSQNASVLLLERGDSPYNNPNITRLSAFGAALSDLSESSPSQRFVSEDGVINARARVLGGGSALNAGFYTRAGTKYVRNMGWDGALANESYQWVEAKVAFQPPMGRWQTAVRDGLLEAGIVPNNGFTYDHINGTKFGGTIFDRNGNRHTAADLLEYADPKGITVLLHATVHRILFRTRGTTKPIANGVVYRDRTGQAHRAYLKEGALSEIILSAGTLGSPQLLMLSGVGPSAQLQAQNITVVMDQPHVGQGMYDNPMNAVFVPSPVPVEVSLIEVVGITGEGTYVEAAGGENFGGGGGGSSGSSSTRDYYAMFSPRATLLESNSMTKLSSAQPFQGGFLLEKVMGPLSTGHLELKTRNPKDNPIVTFNYFQHPDDLKRCVRGIQTIERVVQSKAFSRYKYADVSFEYLLNLTASTPVNLRPPRSGPGASLPPSAEEFCQHTVTTIWHYHGGCVVGRVVDGDYKVIGIDQLRVIDMSTVGYCPGTNPQATVMMLGRYMGVKILRERLTKK

SEQ ID NO: 38758 - protein, 571 aa, Arabidopsis thaliana
  peptide (1)..(571): Ceres Seq. ID no. 13497227
  misc_feature (45)..(311): Pfam Name: GMC oxidoreductase Pfam Description: GMC oxidoreductase
  misc_feature (25)..(571): Homolog of NCBI NO: 11357159 NR Description: adhesion of calyx edges protein ACE
  misc_feature (11)..(570): Homolog of NCBI NO: 27452902 NR Description: Putative mandelonitrile lyase
  misc_feature (5)..(557): Homolog of NCBI NO: 10177730 NR Description: mandelonitrile lyase-like protein [Arabidopsis
  misc_feature (10)..(568): Homolog of NCBI NO: 18410417 NR Description: glucose-methanol-choline (GMC) oxidoreductase
  misc_feature (11)..(570): Homolog of NCBI NO: 11358959 NR Description: probable mandelonitrile lyase (EC 4.1.2.10)
  misc_feature (5)..(567): Homolog of NCBI NO: 15242236 NR Description: glucose-methanol-choline (GMC) oxidoreductase
  misc_feature (33)..(571): Homolog of NCBI NO: 8778640 NR Description: F5O11.31 [Arabidopsis thaliana]
  misc_feature (27)..(571): Homolog of NCBI NO: 9502391 NR Description: T12C24.11 [Arabidopsis thaliana]
  misc_feature (1)..(571): Homolog of NCBI NO: 22329512 NR Description: glucose-methanol-choline (GMC) oxidoreductase
  misc_feature (1)..(571): Homolog of NCBI NO: 17978954 NR Description: At1g12570/T12C24_9 [Arabidopsis thaliana]
MDRFWSWRLFVALSLFLHSPICSSDKAPNYSFMRDATGSPTTSYYDYIIIGGGTAGCPLAATLSQNASVLLLERGDSPYNNPNITRLSAFGAALSDLSESSPSQRFVSEDGVINARARVLGGGSALNAGFYTRAGTKYVRNMGWDGALANESYQWVEAKVAFQPPMGRWQTAVRDGLLEAGIVPNNGFTYDHINGTKFGGTIFDRNGNRHTAADLLEYADPKGITVLLHATVHRILFRTRGTTKPIANGVVYRDRTGQAHRAYLKEGALSEIILSAGTLGSPQLLMLSGVGPSAQLQAQNITVVMDQPHVGQGMYDNPMNAVFVPSPVPVEVSLIEVVGITGEGTYVEAAGGENFGGGGGGSSGSSSTRDYYAMFSPRATLLESNSMTKLSSAQPFQGGFLLEKVMGPLSTGHLELKTRNPKDNPIVTFNYFQHPDDLKRCVRGIQTIERVVQSKAFSRYKYADVSFEYLLNLTASTPVNLRPPRSGPGASLPPSAEEFCQHTVTTIWHYHGGCVVGRVVDGDYKVIGIDQLRVIDMSTVGYCPGTNPQATVMMLGRYMGVKILRERLTKK

SEQ ID NO: 38759 - protein, 539 aa, Arabidopsis thaliana
  peptide (1)..(539): Ceres Seq. ID no. 13497228
  misc_feature (13)..(279): Pfam Name: GMC oxidoreductase Pfam Description: GMC oxidoreductase
  misc_feature (1)..(539): Homolog of NCBI NO: 11357159 NR Description: adhesion of calyx edges protein ACE
  misc_feature (1)..(538): Homolog of NCBI NO: 27452902 NR Description: Putative mandelonitrile lyase
  misc_feature (1)..(525): Homolog of NCBI NO: 10177730 NR Description: mandelonitrile lyase-like protein [Arabidopsis
  misc_feature (1)..(536): Homolog of NCBI NO: 18410417 NR Description: glucose-methanol-choline (GMC) oxidoreductase
  misc_feature (1)..(538): Homolog of NCBI NO: 11358959 NR Description: probable mandelonitrile lyase (EC 4.1.2.10)
  misc_feature (1)..(535): Homolog of NCBI NO: 15242236 NR Description: glucose-methanol-choline (GMC) oxidoreductase
  misc_feature (1)..(539): Homolog of NCBI NO: 8778640 NR Description: F5O11.31 [Arabidopsis thaliana]
  misc_feature (1)..(539): Homolog of NCBI NO: 9502391 NR Description: T12C24.11 [Arabidopsis thaliana]
  misc_feature (1)..(539): Homolog of NCBI NO: 22329512 NR Description: glucose-methanol-choline (GMC) oxidoreductase
  misc_feature (1)..(539): Homolog of NCBI NO: 17978954 NR Description: At1g12570/T12C24_9 [Arabidopsis thaliana]
MRDATGSPTTSYYDYIIIGGGTAGCPLAATLSQNASVLLLERGDSPYNNPNITRLSAFGAALSDLSESSPSQRFVSEDGVINARARVLGGGSALNAGFYTRAGTKYVRNMGWDGALANESYQWVEAKVAFQPPMGRWQTAVRDGLLEAGIVPNNGFTYDHINGTKFGGTIFDRNGNRHTAADLLEYADPKGITVLLHATVHRILFRTRGTTKPIANGVVYRDRTGQAHRAYLKEGALSEIILSAGTLGSPQLLMLSGVGPSAQLQAQNITVVMDQPHVGQGMYDNPMNAVFVPSPVPVEVSLIEVVGITGEGTYVEAAGGENFGGGGGGSSGSSSTRDYYAMFSPRATLLESNSMTKLSSAQPFQGGFLLEKVMGPLSTGHLELKTRNPKDNPIVTFNYFQHPDDLKRCVRGIQTIERVVQSKAFSRYKYADVSFEYLLNLTASTPVNLRPPRSGPGASLPPSAEEFCQHTVTTIWHYHGGCVVGRVVDGDYKVIGIDQLRVIDMSTVGYCPGTNPQATVMMLGRYMGVKILRERLTKK

SEQ ID NO: 38760 - DNA, 1407 bp, Arabidopsis thaliana; identical to SEQ ID NO: 22506
  misc_feature (1)..(1407): Ceres Seq. ID no. 12371114
  misc_feature: MA Experiment ID: 108561 Result: Up-regulated in Transcription
  misc_feature: MA Experiment 108561 PARAMETER Experiment Name: At_100uM_ABA_cDNA_P Parameter: Timepoint (hr) Value: 6
  misc_feature: MA Experiment 108561 PARAMETER Experiment Name: At_100uM_ABA_cDNA_P Parameter: Tissue Value: Aerial
  misc_feature: MA Experiment 108561 PARAMETER Experiment Name: At_100uM_ABA_cDNA_P Parameter: Treatment Value: 100uM ABA vs. No Treatment
  misc_feature: MA Experiment ID: 108569 Result: Up-regulated in Transcription
  misc_feature: MA Experiment 108569 PARAMETER Experiment Name: At_0.001%_MeJA__cDNA_P Parameter: Timepoint (hr) Value: 6
  misc_feature: MA Experiment 108569 PARAMETER Experiment Name: At_0.001%_MeJA__cDNA_P Parameter: Tissue Value: Aerial
  misc_feature: MA Experiment 108569 PARAMETER Experiment Name: At_0.001%_MeJA__cDNA_P Parameter: Treatment Value: 0.001% MeJA vs. No Treatment
  misc_feature: MA Experiment ID: 108572 Result: Up-regulated in Transcription
  misc_feature: MA Experiment 108572 PARAMETER Experiment Name: At_Drought_cDNA_P Parameter: Timepoint (hr) Value: 1
  misc_feature: MA Experiment 108572 PARAMETER Experiment Name: At_Drought_cDNA_P Parameter: Tissue Value: Aerial
  misc_feature: MA Experiment 108572 PARAMETER Experiment Name: At_Drought_cDNA_P Parameter: Treatment Value: Drought vs. No Drought
  misc_feature: MA Experiment ID: 108573 Result: Up-regulated in Transcription
  misc_feature: MA Experiment 108573 PARAMETER Experiment Name: At_Drought_cDNA_P Parameter: Timepoint (hr) Value: 6
  misc_feature: MA Experiment 108573 PARAMETER Experiment Name: At_Drought_cDNA_P Parameter: Tissue Value: Aerial
  misc_feature: MA Experiment 108573 PARAMETER Experiment Name: At_Drought_cDNA_P Parameter: Treatment Value: Drought vs. No Drought
  misc_feature: MA Experiment ID: 108574 Result: Up-regulated in Transcription
  misc_feature: MA Experiment 108574 PARAMETER Experiment Name: At_Wounding__cDNA_P Parameter: Timepoint (hr) Value: 1
  misc_feature: MA Experiment 108574 PARAMETER Experiment Name: At_Wounding__cDNA_P Parameter: Tissue Value: Aerial
  misc_feature: MA Experiment 108574 PARAMETER Experiment Name: At_Wounding__cDNA_P Parameter: Treatment Value: Wounding vs. No Wounding
  misc_feature: MA Experiment ID: 108579 Result: Up-regulated in Transcription
  misc_feature: MA Experiment 108579 PARAMETER Experiment Name: At_4deg_Cold_cDNA_P Parameter: Temperature (deg C) Value: 4 vs. 22
  misc_feature: MA Experiment 108579 PARAMETER Experiment Name: At_4deg_Cold_cDNA_P Parameter: Timepoint (hr) Value: 6
  misc_feature: MA Experiment 108579 PARAMETER Experiment Name: At_4deg_Cold_cDNA_P Parameter: Tissue Value: Aerial
  misc_feature: MA Experiment ID: 108668 Result: Up-regulated in Transcription
  misc_feature: MA Experiment 108668 PARAMETER Experiment Name: At_2mM_SA_cDNA_P Parameter: Plant Line Value: WS
  misc_feature: MA Experiment 108668 PARAMETER Experiment Name: At_2mM_SA_cDNA_P Parameter: Timepoint (hr) Value: 6
  misc_feature: MA Experiment 108668 PARAMETER Experiment Name: At_2mM_SA_cDNA_P Parameter: Treatment Value: 2mM SA vs. No Treatment
  misc_feature: MA Experiment ID: 20000169 Result: Up-regulated in Transcription
  misc_feature: MA Experiment 20000169 PARAMETER Experiment Name: At_100uM_ABA_P Parameter: Age (day) Value: 14
  misc_feature: MA Experiment 20000169 PARAMETER Experiment Name: At_100uM_ABA_P Parameter: Organism Value: A. thaliana
  misc_feature: MA Experiment 20000169 PARAMETER Experiment Name: At_100uM_ABA_P Parameter: Plant Line Value: WS
  misc_feature: MA Experiment 20000169 PARAMETER Experiment Name: At_100uM_ABA_P Parameter: Timepoint (hr) Value: 6
  misc_feature: MA Experiment 20000169 PARAMETER Experiment Name: At_100uM_ABA_P Parameter: Tissue Value: Aerial
  misc_feature: MA Experiment 20000169 PARAMETER Experiment Name: At_100uM_ABA_P Parameter: Treatment Value: 100uM ABA vs. No Treatment
  misc_feature: MA Experiment ID: 20000182 Result: Up-regulated in Transcription
  misc_feature: MA Experiment 20000182 PARAMETER Experiment Name: At_2mM_SA_P Parameter: Age (day) Value: 14
  misc_feature: MA Experiment 20000182 PARAMETER Experiment Name: At_2mM_SA_P Parameter: Organism Value: A. thaliana
  misc_feature: MA Experiment 20000182 PARAMETER Experiment Name: At_2mM_SA_P Parameter: Plant Line Value: WS
  misc_feature: MA Experiment 20000182 PARAMETER Experiment Name: At_2mM_SA_P Parameter: Timepoint (hr) Value: 6
  misc_feature: MA Experiment 20000182 PARAMETER Experiment Name: At_2mM_SA_P Parameter: Tissue Value: Aerial
  misc_feature: MA Experiment 20000182 PARAMETER Experiment Name: At_2mM_SA_P Parameter: Treatment Value: 2mM SA vs. No Treatment
  misc_feature: MA Experiment ID: 20000265 Result: Up-regulated in Transcription
  misc_feature: MA Experiment 20000265 PARAMETER Experiment Name: At_Open_Flower_P Parameter: Age (day) Value: 21
  misc_feature: MA Experiment 20000265 PARAMETER Experiment Name: At_Open_Flower_P Parameter: Plant Line Value: WS
  misc_feature: MA Experiment 20000265 PARAMETER Experiment Name: At_Open_Flower_P Parameter: Tissue Value: Closed Flower vs. Whole Plant
  misc_feature: MA Experiment ID: 20000453 Result: Up-regulated in Transcription
  misc_feature: MA Experiment 20000453 PARAMETER Experiment Name: At_100uM_ABA_P Parameter: Age (day) Value: 15
  misc_feature: MA Experiment 20000453 PARAMETER Experiment Name: At_100uM_ABA_P Parameter: Organism Value: A. thaliana
  misc_feature: MA Experiment 20000453 PARAMETER Experiment Name: At_100uM_ABA_P Parameter: Plant Line Value: WS
  misc_feature: MA Experiment 20000453 PARAMETER Experiment Name: At_100uM_ABA_P Parameter: Timepoint (hr) Value: 24
  misc_feature: MA Experiment 20000453 PARAMETER Experiment Name: At_100uM_ABA_P Parameter: Tissue Value: Aerial
  misc_feature: MA Experiment 20000453 PARAMETER Experiment Name: At_100uM_ABA_P Parameter: Treatment Value: 100uM ABA vs. No Treatment
  misc_feature: MA Experiment ID: 20000495 Result: Down-regulated in Transcription
  misc_feature: MA Experiment 20000495 PARAMETER Experiment Name: At_Guard_Cells_P Parameter: Harvest Date Value: 8/2/2002
  misc_feature: MA Experiment 20000495 PARAMETER Experiment Name: At_Guard_Cells_P Parameter: Organism Value: A. thaliana
  misc_feature: MA Experiment 20000495 PARAMETER Experiment Name: At_Guard_Cells_P Parameter: Tissue Value: Guard Cells vs. Leaves
  misc_feature: MA Experiment ID: 20001556 Result: Up-regulated in Transcription
  misc_feature: MA Experiment 20001556 PARAMETER Experiment Name: At_Drought_Soil_Dry_P Parameter: Age (day) Value: 26
  misc_feature: MA Experiment 20001556 PARAMETER Experiment Name: At_Drought_Soil_Dry_P Parameter: Organism Value: A. thaliana
  misc_feature: MA Experiment 20001556 PARAMETER Experiment Name: At_Drought_Soil_Dry_P Parameter: Plant Line Value: WS
  misc_feature: MA Experiment 20001556 PARAMETER Experiment Name: At_Drought_Soil_Dry_P Parameter: Post Timepoint (hr) Value: None
  misc_feature: MA Experiment 20001556 PARAMETER Experiment Name: At_Drought_Soil_Dry_P Parameter: Post-Treatment Value: None
  misc_feature: MA Experiment 20001556 PARAMETER Experiment Name: At_Drought_Soil_Dry_P Parameter: Timepoint (day) Value: 12
  misc_feature: MA Experiment 20001556 PARAMETER Experiment Name: At_Drought_Soil_Dry_P Parameter: Treatment Value: Drought vs. No Drought
  misc_feature: MA Experiment ID: 20001560 Result: Up-regulated in Transcription
  misc_feature: MA Experiment 20001560 PARAMETER Experiment Name: At_Drought_Soil_Dry_P Parameter: Age (day) Value: 28
  misc_feature: MA Experiment 20001560 PARAMETER Experiment Name: At_Drought_Soil_Dry_P Parameter: Organism Value: A. thaliana
  misc_feature: MA Experiment 20001560 PARAMETER Experiment Name: At_Drought_Soil_Dry_P Parameter: Plant Line Value: WS
  misc_feature: MA Experiment 20001560 PARAMETER Experiment Name: At_Drought_Soil_Dry_P Parameter: Post Timepoint (hr) Value: None
  misc_feature: MA Experiment 20001560 PARAMETER Experiment Name: At_Drought_Soil_Dry_P Parameter: Post-Treatment Value: None
  misc_feature: MA Experiment 20001560 PARAMETER Experiment Name: At_Drought_Soil_Dry_P Parameter: Timepoint (day) Value: 14
  misc_feature: MA Experiment 20001560 PARAMETER Experiment Name: At_Drought_Soil_Dry_P Parameter: Treatment Value: Drought vs. No Drought
  misc_feature: MA Experiment ID: 20001905 Result: Up-regulated in Transcription
  misc_feature: MA Experiment 20001905 PARAMETER Experiment Name: At_Drought_Reproduction_P Parameter: Age (day) Value: 40
  misc_feature: MA Experiment 20001905 PARAMETER Experiment Name: At_Drought_Reproduction_P Parameter: Organism Value: A. thaliana
  misc_feature: MA Experiment 20001905 PARAMETER Experiment Name: At_Drought_Reproduction_P Parameter: Plant Line Value: WS
  misc_feature: MA Experiment 20001905 PARAMETER Experiment Name: At_Drought_Reproduction_P Parameter: Timepoint (day) Value: 10
  misc_feature: MA Experiment 20001905 PARAMETER Experiment Name: At_Drought_Reproduction_P Parameter: Tissue Value: Rosettes
  misc_feature: MA Experiment 20001905 PARAMETER Experiment Name: At_Drought_Reproduction_P Parameter: Treatment Value: Drought vs. No Drought

SEQ ID NO: 38761 - protein, 379 aa, Arabidopsis thaliana; identical to SEQ ID NO: 22507
  peptide (1)..(379): Ceres Seq. ID no. 12371115
  misc_feature (58)..(379): Pfam Name: SAM dependent carboxyl methyltransferase Pfam Description: SAM dependent carboxyl methyltransferase
  misc_feature (58)..(379): Pfam Name: SAM dependent carboxyl methyltransferase Pfam Description: SAM dependent carboxyl methyltransferase
  misc_feature (59)..(379): Homolog of NCBI NO: 15233213 NR Description: S-adenosyl-L-methionine:carboxyl
  misc_feature (31)..(379): Homolog of NCBI NO: 8885604 NR Description: S-adenosyl-L-methionine:salicylic acid carboxyl
  misc_feature (29)..(379): Homolog of NCBI NO: 15240823 NR Description: S-adenosyl-L-methionine:carboxyl
  misc_feature (31)..(379): Homolog of NCBI NO: 9279749 NR Description: S-adenosyl-L-methionine:salicylic acid carboxyl
  misc_feature (16)..(379): Homolog of NCBI NO: 15237696 NR Description: S-adenosyl-L-methionine:carboxyl
  misc_feature (59)..(379): Homolog of NCBI NO: 15233213 NR Description: S-adenosyl-L-methionine:carboxyl
  misc_feature (29)..(379): Homolog of NCBI NO: 15240823 NR Description: S-adenosyl-L-methionine:carboxyl
  misc_feature (16)..(379): Homolog of NCBI NO: 15237696 NR Description: S-adenosyl-L-methionine:carboxyl
  misc_feature (1)..(379): Homolog of NCBI NO: 22330992 NR Description: S-adenosyl-L-methionine:carboxyl
  misc_feature (1)..(379): Homolog of NCBI NO: 37904506 NR Description: methyl transferase [Arabidopsis lyrata subsp.
  misc_feature (53)..(379): Homolog of NCBI NO: 12322908 NR Description: hypothetical protein; 58431-59672 [Arabidopsis
  misc_feature (1)..(379): Homolog of NCBI NO: 15237695 NR Description: S-adenosyl-L-methionine:carboxyl
  misc_feature (31)..(379): Homolog of NCBI NO: 15239970 NR Description: S-adenosyl-L-methionine:carboxyl
  misc_feature (31)..(379): Homolog of NCBI NO: 9279749 NR Description: S-adenosyl-L-methionine:salicylic acid carboxyl
  misc_feature (31)..(379): Homolog of NCBI NO: 8885604 NR Description: S-adenosyl-L-methionine:salicylic acid carboxyl
  misc_feature (31)..(379): Homolog of NCBI NO: 15239970 NR Description: S-adenosyl-L-methionine:carboxyl
  misc_feature (1)..(379): Homolog of NCBI NO: 15237695 NR Description: S-adenosyl-L-methionine:carboxyl
  misc_feature (53)..(379): Homolog of NCBI NO: 12322908 NR Description: hypothetical protein; 58431-59672 [Arabidopsis
  misc_feature (1)..(379): Homolog of NCBI NO: 37904506 NR Description: methyl transferase [Arabidopsis lyrata subsp.
  misc_feature (1)..(379): Homolog of NCBI NO: 22330992 NR Description: S-adenosyl-L-methionine:carboxyl

SEQ ID NO: 38762 - protein, 349 aa, Arabidopsis thaliana; identical to SEQ ID NO: 22508
  peptide (1)..(349): Ceres Seq. ID no. 12371116
  misc_feature (28)..(349): Pfam Name: SAM dependent carboxyl methyltransferase Pfam Description: SAM dependent carboxyl methyltransferase
  misc_feature (28)..(349): Pfam Name: SAM dependent carboxyl methyltransferase Pfam Description: SAM dependent carboxyl methyltransferase
  misc_feature (29)..(349): Homolog of NCBI NO: 15233213 NR Description: S-adenosyl-L-methionine:carboxyl
  misc_feature (1)..(349): Homolog of NCBI NO: 8885604 NR Description: S-adenosyl-L-methionine:salicylic acid carboxyl
  misc_feature (1)..(349): Homolog of NCBI NO: 15240823 NR Description: S-adenosyl-L-methionine:carboxyl
  misc_feature (1)..(349): Homolog of NCBI NO: 9279749 NR Description: S-adenosyl-L-methionine:salicylic acid carboxyl
  misc_feature (1)..(349): Homolog of NCBI NO: 15237696 NR Description: S-adenosyl-L-methionine:carboxyl
  misc_feature (29)..(349): Homolog of NCBI NO: 15233213 NR Description: S-adenosyl-L-methionine:carboxyl
  misc_feature (1)..(349): Homolog of NCBI NO: 15240823 NR Description: S-adenosyl-L-methionine:carboxyl
  misc_feature (1)..(349): Homolog of NCBI NO: 15237696 NR Description: S-adenosyl-L-methionine:carboxyl
  misc_feature (1)..(349): Homolog of NCBI NO: 22330992 NR Description: S-adenosyl-L-methionine:carboxyl
  misc_feature (1)..(349): Homolog of NCBI NO: 37904506 NR Description: methyl transferase [Arabidopsis lyrata subsp.
  misc_feature (23)..(349): Homolog of NCBI NO: 12322908 NR Description: hypothetical protein; 58431-59672 [Arabidopsis
  misc_feature (1)..(349): Homolog of NCBI NO: 15237695 NR Description: S-adenosyl-L-methionine:carboxyl
  misc_feature (1)..(349): Homolog of NCBI NO: 15239970 NR Description: S-adenosyl-L-methionine:carboxyl
  misc_feature (1)..(349): Homolog of NCBI NO: 9279749 NR Description: S-adenosyl-L-methionine:salicylic acid carboxyl
  misc_feature (1)..(349): Homolog of NCBI NO: 8885604 NR Description: S-adenosyl-L-methionine:salicylic acid carboxyl
  misc_feature (1)..(349): Homolog of NCBI NO: 15239970 NR Description: S-adenosyl-L-methionine:carboxyl
  misc_feature (1)..(349): Homolog of NCBI NO: 15237695 NR Description: S-adenosyl-L-methionine:carboxyl
  misc_feature (23)..(349): Homolog of NCBI NO: 12322908 NR Description: hypothetical protein; 58431-59672 [Arabidopsis
  misc_feature (1)..(349): Homolog of NCBI NO: 37904506 NR Description: methyl transferase [Arabidopsis lyrata subsp.
  misc_feature (1)..(349): Homolog of NCBI NO: 22330992 NR Description: S-adenosyl-L-methionine:carboxyl

SEQ ID NO: 38763 - protein, 327 aa, Arabidopsis thaliana; identical to SEQ ID NO: 22509
  peptide (1)..(327): Ceres Seq. ID no. 12371117
  misc_feature (6)..(327): Pfam Name: SAM dependent carboxyl methyltransferase Pfam Description: SAM dependent carboxyl methyltransferase
  misc_feature (6)..(327): Pfam Name: SAM dependent carboxyl methyltransferase Pfam Description: SAM dependent carboxyl methyltransferase
  misc_feature (7)..(327): Homolog of NCBI NO: 15233213 NR Description: S-adenosyl-L-methionine:carboxyl
  misc_feature (1)..(327): Homolog of NCBI NO: 8885604 NR Description: S-adenosyl-L-methionine:salicylic acid carboxyl
  misc_feature (1)..(327): Homolog of NCBI NO: 15240823 NR Description: S-adenosyl-L-methionine:carboxyl
  misc_feature (1)..(327): Homolog of NCBI NO: 9279749 NR Description: S-adenosyl-L-methionine:salicylic acid carboxyl
  misc_feature (1)..(327): Homolog of NCBI NO: 15237696 NR Description: S-adenosyl-L-methionine:carboxyl
  misc_feature (7)..(327): Homolog of NCBI NO: 15233213 NR Description: S-adenosyl-L-methionine:carboxyl
  misc_feature (1)..(327): Homolog of NCBI NO: 15240823 NR Description: S-adenosyl-L-methionine:carboxyl
  misc_feature (1)..(327): Homolog of NCBI NO: 15237696 NR Description: S-adenosyl-L-methionine:carboxyl
  misc_feature (1)..(327): Homolog of NCBI NO: 22330992 NR Description: S-adenosyl-L-methionine:carboxyl
  misc_feature (1)..(327): Homolog of NCBI NO: 37904506 NR Description: methyl transferase [Arabidopsis lyrata subsp.
  misc_feature (1)..(327): Homolog of NCBI NO: 12322908 NR Description: hypothetical protein; 58431-59672 [Arabidopsis
  misc_feature (1)..(327): Homolog of NCBI NO: 15237695 NR Description: S-adenosyl-L-methionine:carboxyl
  misc_feature (1)..(327): Homolog of NCBI NO: 15239970 NR Description: S-adenosyl-L-methionine:carboxyl
  misc_feature (1)..(327): Homolog of NCBI NO: 9279749 NR Description: S-adenosyl-L-methionine:salicylic acid carboxyl
  misc_feature (1)..(327): Homolog of NCBI NO: 8885604 NR Description: S-adenosyl-L-methionine:salicylic acid carboxyl
  misc_feature (1)..(327): Homolog of NCBI NO: 15239970 NR Description: S-adenosyl-L-methionine:carboxyl
  misc_feature (1)..(327): Homolog of NCBI NO: 15237695 NR Description: S-adenosyl-L-methionine:carboxyl
  misc_feature (1)..(327): Homolog of NCBI NO: 12322908 NR Description: hypothetical protein; 58431-59672 [Arabidopsis
  misc_feature (1)..(327): Homolog of NCBI NO: 37904506 NR Description: methyl transferase [Arabidopsis lyrata subsp.
  misc_feature (1)..(327): Homolog of NCBI NO: 22330992 NR Description: S-adenosyl-L-methionine:carboxyl

SEQ ID NO: 38764 - DNA, 1052 bp, Arabidopsis thaliana
  misc_feature (1)..(1052): Ceres Seq. ID no. 12439723
  misc_feature: MA Experiment ID: 108464 Result: Down-regulated in Transcription
  misc_feature: MA Experiment 108464 PARAMETER Experiment Name: At_Germinating_Seeds_cDNA_P Parameter: Age (day) Value: 4 vs. 0
  misc_feature: MA Experiment 108464 PARAMETER Experiment Name: At_Germinating_Seeds_cDNA_P Parameter: Tissue Value: Germinating Seeds
  misc_feature: MA Experiment ID: 108594 Result: Up-regulated in Transcription
  misc_feature: MA Experiment 108594 PARAMETER Experiment Name: At_Ler-rhl_Root_cDNA_P Parameter: Plant Line Value: null
  misc_feature: MA Experiment ID: 108595 Result: Up-regulated in Transcription
  misc_feature: MA Experiment 108595 PARAMETER Experiment Name: At_Ler-pi_Ovule_cDNA_P Parameter: Plant Line Value: null
  misc_feature: MA Experiment ID: 20000173 Result: Up-regulated in Transcription
  misc_feature: MA Experiment 20000173 PARAMETER Experiment Name: At_42deg_Heat_P Parameter: Age (day) Value: 14
  misc_feature: MA Experiment 20000173 PARAMETER Experiment Name: At_42deg_Heat_P Parameter: Organism Value: A. thaliana
  misc_feature: MA Experiment 20000173 PARAMETER Experiment Name: At_42deg_Heat_P Parameter: Plant Line Value: WS
  misc_feature: MA Experiment 20000173 PARAMETER Experiment Name: At_42deg_Heat_P Parameter: Temperature (deg C) Value: 42 vs. 22
  misc_feature: MA Experiment 20000173 PARAMETER Experiment Name: At_42deg_Heat_P Parameter: Timepoint (hr) Value: 6
  misc_feature: MA Experiment 20000173 PARAMETER Experiment Name: At_42deg_Heat_P Parameter: Tissue Value: Aerial
  misc_feature: MA Experiment ID: 20000179 Result: Up-regulated in Transcription
  misc_feature: MA Experiment 20000179 PARAMETER Experiment Name: At_Germinating_Seeds_P Parameter: Age (hr) Value: 6 vs. 0
  misc_feature: MA Experiment 20000179 PARAMETER Experiment Name: At_Germinating_Seeds_P Parameter: Tissue Value: Germinating Seeds
  misc_feature: MA Experiment ID: 20000184 Result: Up-regulated in Transcription
  misc_feature: MA Experiment 20000184 PARAMETER Experiment Name: At_Shoots__P Parameter: Age (day) Value: 7
  misc_feature: MA Experiment 20000184 PARAMETER Experiment Name: At_Shoots__P Parameter: Tissue Value: Shoots vs. Whole Plant
  misc_feature: MA Experiment ID: 20000185 Result: Down-regulated in Transcription
  misc_feature: MA Experiment 20000185 PARAMETER Experiment Name: At_Roots__P Parameter: Age (day) Value: 7 vs. 21
  misc_feature: MA Experiment 20000185 PARAMETER Experiment Name: At_Roots__P Parameter: Organism Value: A. thaliana
  misc_feature: MA Experiment 20000185 PARAMETER Experiment Name: At_Roots__P Parameter: Tissue Value: Roots vs. Whole Plant
  misc_feature: MA Experiment ID: 20000264 Result: Up-regulated in Transcription
  misc_feature: MA Experiment 20000264 PARAMETER Experiment Name: At_Open_Flower_P Parameter: Age (day) Value: 21
  misc_feature: MA Experiment 20000264 PARAMETER Experiment Name: At_Open_Flower_P Parameter: Plant Line Value: WS
  misc_feature: MA Experiment 20000264 PARAMETER Experiment Name: At_Open_Flower_P Parameter: Tissue Value: Open Flower vs. Whole Plant
  misc_feature: MA Experiment ID: 20000451 Result: Up-regulated in Transcription
  misc_feature: MA Experiment 20000451 PARAMETER Experiment Name: At_CS6879_Shoots-Roots_P Parameter: Age (day) Value: 14
  misc_feature: MA Experiment 20000451 PARAMETER Experiment Name: At_CS6879_Shoots-Roots_P Parameter: Organism Value: A. thaliana
  misc_feature: MA Experiment 20000451 PARAMETER Experiment Name: At_CS6879_Shoots-Roots_P Parameter: Plant Line Value: CS6879 vs. WS
  misc_feature: MA Experiment 20000451 PARAMETER Experiment Name: At_CS6879_Shoots-Roots_P Parameter: Tissue Value: Roots
  misc_feature: MA Experiment ID: 20000527 Result: Down-regulated in Transcription
  misc_feature: MA Experiment 20000527 PARAMETER Experiment Name: At_10percent_PEG_P Parameter: Age (day) Value: 20
  misc_feature: MA Experiment 20000527 PARAMETER Experiment Name: At_10percent_PEG_P Parameter: Organism Value: A. thaliana
  misc_feature: MA Experiment 20000527 PARAMETER Experiment Name: At_10percent_PEG_P Parameter: Plant Line Value: WS
  misc_feature: MA Experiment 20000527 PARAMETER Experiment Name: At_10percent_PEG_P Parameter: Timepoint (day) Value: 20
  misc_feature: MA Experiment 20000527 PARAMETER Experiment Name: At_10percent_PEG_P Parameter: Tissue Value: Whole Plant
  misc_feature: MA Experiment 20000527 PARAMETER Experiment Name: At_10percent_PEG_P Parameter: Treatment Value: 10percent PEG vs. No Treatment
  misc_feature: MA Experiment ID: 20000794 Result: Up-regulated in Transcription
  misc_feature: MA Experiment 20000794 PARAMETER Experiment Name: At_Petals_P Parameter: Age (day) Value: 23-25 days
  misc_feature: MA Experiment 20000794 PARAMETER Experiment Name: At_Petals_P Parameter: Plant Line Value: WS
  misc_feature: MA Experiment 20000794 PARAMETER Experiment Name: At_Petals_P Parameter: Tissue Value: Petals vs. Whole plant
  misc_feature: MA Experiment ID: 20001451 Result: Up-regulated in Transcription
  misc_feature: MA Experiment 20001451 PARAMETER Experiment Name: At_Far-red-induction_P Parameter: Age (day) Value: 7
  misc_feature: MA Experiment 20001451 PARAMETER Experiment Name: At_Far-red-induction_P Parameter: Light Value: Far-red vs. White
  misc_feature: MA Experiment 20001451 PARAMETER Experiment Name: At_Far-red-induction_P Parameter: Organism Value: A. thaliana
  misc_feature: MA Experiment 20001451 PARAMETER Experiment Name: At_Far-red-induction_P Parameter: Plant Line Value: Columbia
  misc_feature: MA Experiment 20001451 PARAMETER Experiment Name: At_Far-red-induction_P Parameter: Timepoint (hr) Value: 24
  misc_feature: MA Experiment 20001451 PARAMETER Experiment Name: At_Far-red-induction_P Parameter: Tissue Value: Whole Plant
  misc_feature: MA Experiment ID: 20001459 Result: Down-regulated in Transcription
  misc_feature: MA Experiment 20001459 PARAMETER Experiment Name: At_50mM_NH4NO3_L-to-H_P Parameter: Age (day) Value: Undefined
  misc_feature: MA Experiment 20001459 PARAMETER Experiment Name: At_50mM_NH4NO3_L-to-H_P Parameter: Organism Value: Undefined
  misc_feature: MA Experiment 20001459 PARAMETER Experiment Name: At_50mM_NH4NO3_L-to-H_P Parameter: Plant Line Value: Undefined
  misc_feature: MA Experiment 20001459 PARAMETER Experiment Name: At_50mM_NH4NO3_L-to-H_P Parameter: Timepoint (hr) Value: 4
  misc_feature: MA Experiment 20001459 PARAMETER Experiment Name: At_50mM_NH4NO3_L-to-H_P Parameter: Tissue Value: Siliques
  misc_feature: MA Experiment 20001459 PARAMETER Experiment Name: At_50mM_NH4NO3_L-to-H_P Parameter: Treatment Value: 50mM NH4NO3 vs. 100mM Manitol
  misc_feature: MA Experiment ID: 20001906 Result: Up-regulated in Transcription
  misc_feature: MA Experiment 20001906 PARAMETER Experiment Name: At_Drought_Reproduction_P Parameter: Age (day) Value: 35
  misc_feature: MA Experiment 20001906 PARAMETER Experiment Name: At_Drought_Reproduction_P Parameter: Organism Value: A. thaliana
  misc_feature: MA Experiment 20001906 PARAMETER Experiment Name: At_Drought_Reproduction_P Parameter: Plant Line Value: WS
  misc_feature: MA Experiment 20001906 PARAMETER Experiment Name: At_Drought_Reproduction_P Parameter: Timepoint (day) Value: 5
  misc_feature: MA Experiment 20001906 PARAMETER Experiment Name: At_Drought_Reproduction_P Parameter: Tissue Value: Siliques
  misc_feature: MA Experiment 20001906 PARAMETER Experiment Name: At_Drought_Reproduction_P Parameter: Treatment Value: Drought vs. No Drought
  misc_feature: MA Experiment ID: 20001907 Result: Up-regulated in Transcription
  misc_feature: MA Experiment 20001907 PARAMETER Experiment Name: At_Drought_Reproduction_P Parameter: Age (day) Value: 37
  misc_feature: MA Experiment 20001907 PARAMETER Experiment Name: At_Drought_Reproduction_P Parameter: Organism Value: A. thaliana
  misc_feature: MA Experiment 20001907 PARAMETER Experiment Name: At_Drought_Reproduction_P Parameter: Plant Line Value: WS
  misc_feature: MA Experiment 20001907 PARAMETER Experiment Name: At_Drought_Reproduction_P Parameter: Timepoint (day) Value: 7
  misc_feature: MA Experiment 20001907 PARAMETER Experiment Name: At_Drought_Reproduction_P Parameter: Tissue Value: Siliques
  misc_feature: MA Experiment 20001907 PARAMETER Experiment Name: At_Drought_Reproduction_P Parameter: Treatment Value: Drought vs. No Drought
  misc_feature: MA Experiment ID: 20001911 Result: Up-regulated in Transcription
  misc_feature: MA Experiment 20001911 PARAMETER Experiment Name: At_Drought_Reproduction_P Parameter: Age (day) Value: 40
  misc_feature: MA Experiment 20001911 PARAMETER Experiment Name: At_Drought_Reproduction_P Parameter: Organism Value: A. thaliana
  misc_feature: MA Experiment 20001911 PARAMETER Experiment Name: At_Drought_Reproduction_P Parameter: Plant Line Value: WS
  misc_feature: MA Experiment 20001911 PARAMETER Experiment Name: At_Drought_Reproduction_P Parameter: Timepoint (day) Value: 10
  misc_feature: MA Experiment 20001911 PARAMETER Experiment Name: At_Drought_Reproduction_P Parameter: Tissue Value: Flowers
  misc_feature: MA Experiment 20001911 PARAMETER Experiment Name: At_Drought_Reproduction_P Parameter: Treatment Value: Drought vs. No Drought
gaaactgttcttttgccctcttctctcaattttaatccaccaaacaaatcgaacagtgttcgataacttttagattgcaagtcctgtttttgatttggtcgggagaaagaaaactagggttttgatgggaactgatacagttatgtctggacgagtaaggaaagatctatcaaaaacgaatccaaatgggaatattcctgagaatcgttctaattcacgtaagaagatccaacgacggagtaagaaaaccctaatctgtccggttcaaaaactattcgatacttgtaagaaagttttcgctgatggcaaatctggtaccgtcccttctcaagaaaacattgagatgcttcgagccgttttggatgaaatcaagcctgaggatgttggcgtaaatcctaagatgtcgtattttcgatctacagtgaccggacgatctccgttagtgacgtatcttcacatctatgcatgtcatagattctcgatttgcattttctgtttacctccatctggtgttatccctcttcacaatcacccggagatgactgtgtttagtaagctcttgtttggtacaatgcatatcaaatcctatgattgggtccctgattctccccagccgagttcagatactcgtttggcgaaagtgaaagtagattcggactttaccgcaccttgtgatacttctatactgtacccggctgatggagggaatatgcattgcttcaccgcgaaaacggcttgcgcggttcttgatgttattggtcctccatactctgatcccgcaggacgtcattgtacttactatttcgattatccgttctctagtttctcggtcgatggagtcgtggttgccgaggaggagaaggaaggctatgcatggttgaaggagagggaagagaagccagaggatttaacggttactgcattgatgtatagtggaccaaccatcaaagaatgaatgtggaagcatagcagaaaaaaaaaaccctttctttttctttgttctgttagagtattttcttgatttctggttgcatataaaaagaggtttttgg

SEQ ID NO: 38765 - protein, 276 aa, Arabidopsis thaliana
  peptide (1)..(276): Ceres Seq. ID no. 12439724
  misc_feature (47)..(276): Homolog of NCBI NO: 15231104 NR Description: putative protein
  misc_feature (79)..(275): Homolog of NCBI NO: 15451150 NR Description: Unknown protein [Arabidopsis thaliana]
  misc_feature (48)..(275): Homolog of NCBI NO: 18406030 NR Description: expressed protein
  misc_feature (48)..(275): Homolog of NCBI NO: 21536850 NR Description: unknown [Arabidopsis thaliana]
  misc_feature (48)..(275): Homolog of NCBI NO: 25370572 NR Description: hypothetical protein At2g42670 [imported] -
  misc_feature (31)..(274): Homolog of NCBI NO: 29244630 NR Description: hypothetical protein [Oryza sativa (japonica
  misc_feature (47)..(274): Homolog of NCBI NO: 34906308 NR Description: unnamed protein product [Oryza sativa (japonica
  misc_feature (13)..(276): Homolog of NCBI NO: 15242218 NR Description: putative protein; protein id: At5g15120.1
  misc_feature (7)..(276): Homolog of NCBI NO: 10176982 NR Description: contains similarity to unknown
  misc_feature (1)..(276): Homolog of NCBI NO: 15242505 NR Description: putative protein
MGTDTVMSGRVRKDLSKTNPNGNIPENRSNSRKKIQRRSKKTLICPVQKLFDTCKKVFADGKSGTVPSQENIEMLRAVLDEIKPEDVGVNPKMSYFRSTVTGRSPLVTYLHIYACHRFSICIFCLPPSGVIPLHNHPEMTVFSKLLFGTMHIKSYDWVPDSPQPSSDTRLAKVKVDSDFTAPCDTSILYPADGGNMHCFTAKTACAVLDVIGPPYSDPAGRHCTYYFDYPFSSFSVDGVVVAEEEKEGYAWLKEREEKPEDLTVTALMYSGPTIKE

SEQ ID NO: 38766 - protein, 270 aa, Arabidopsis thaliana
  peptide (1)..(270): Ceres Seq. ID no. 12439725
  misc_feature (41)..(270): Homolog of NCBI NO: 15231104 NR Description: putative protein
  misc_feature (73)..(269): Homolog of NCBI NO: 15451150 NR Description: Unknown protein [Arabidopsis thaliana]
  misc_feature (42)..(269): Homolog of NCBI NO: 18406030 NR Description: expressed protein
  misc_feature (42)..(269): Homolog of NCBI NO: 21536850 NR Description: unknown [Arabidopsis thaliana]
  misc_feature (42)..(269): Homolog of NCBI NO: 25370572 NR Description: hypothetical protein At2g42670 [imported] -
  misc_feature (25)..(268): Homolog of NCBI NO: 29244630 NR Description: hypothetical protein [Oryza sativa (japonica
  misc_feature (41)..(268): Homolog of NCBI NO: 34906308 NR Description: unnamed protein product [Oryza sativa (japonica
  misc_feature (7)..(270): Homolog of NCBI NO: 15242218 NR Description: putative protein; protein id: At5g15120.1
  misc_feature (1)..(270): Homolog of NCBI NO: 10176982 NR Description: contains similarity to unknown
  misc_feature (1)..(270): Homolog of NCBI NO: 15242505 NR Description: putative protein
MSGRVRKDLSKTNPNGNIPENRSNSRKKIQRRSKKTLICPVQKLFDTCKKVFADGKSGTVPSQENIEMLRAVLDEIKPEDVGVNPKMSYFRSTVTGRSPLVTYLHIYACHRFSICIFCLPPSGVIPLHNHPEMTVFSKLLFGTMHIKSYDWVPDSPQPSSDTRLAKVKVDSDFTAPCDTSILYPADGGNMHCFTAKTACAVLDVIGPPYSDPAGRHCTYYFDYPFSSFSVDGVVVAEEEKEGYAWLKEREEKPEDLTVTALMYSGPTIKE

SEQ ID NO: 38767 - protein, 203 aa, Arabidopsis thaliana
  peptide (1)..(203): Ceres Seq. ID no. 12439726
  misc_feature (1)..(203): Homolog of NCBI NO: 15231104 NR Description: putative protein
  misc_feature (6)..(202): Homolog of NCBI NO: 15451150 NR Description: Unknown protein [Arabidopsis thaliana]
  misc_feature (1)..(202): Homolog of NCBI NO: 18406030 NR Description: expressed protein
  misc_feature (1)..(202): Homolog of NCBI NO: 21536850 NR Description: unknown [Arabidopsis thaliana]
  misc_feature (1)..(202): Homolog of NCBI NO: 25370572 NR Description: hypothetical protein At2g42670 [imported] -
  misc_feature (1)..(201): Homolog of NCBI NO: 29244630 NR Description: hypothetical protein [Oryza sativa (japonica
  misc_feature (1)..(201): Homolog of NCBI NO: 34906308 NR Description: unnamed protein product [Oryza sativa (japonica
  misc_feature (1)..(203): Homolog of NCBI NO: 15242218 NR Description: putative protein; protein id: At5g15120.1
  misc_feature (1)..(203): Homolog of NCBI NO: 10176982 NR Description: contains similarity to unknown
  misc_feature (1)..(203): Homolog of NCBI NO: 15242505 NR Description: putative protein
MLRAVLDEIKPEDVGVNPKMSYFRSTVTGRSPLVTYLHIYACHRFSICIFCLPPSGVIPLHNHPEMTVFSKLLFGTMHIKSYDWVPDSPQPSSDTRLAKVKVDSDFTAPCDTSILYPADGGNMHCFTAKTACAVLDVIGPPYSDPAGRHCTYYFDYPFSSFSVDGVVVAEEEKEGYAWLKEREEKPEDLTVTALMYSGPTIKE

SEQ ID NO: 38768 - DNA, 1474 bp, Arabidopsis thaliana
  misc_feature (1)..(1474): Ceres Seq. ID no. 12331029
  misc_feature: MA Experiment ID: 108585 Result: Down-regulated in Transcription
  misc_feature: MA Experiment 108585 PARAMETER Experiment Name: At_5mM_NaNP_cDNA_P Parameter: Timepoint (hr) Value: 6
  misc_feature: MA Experiment 108585 PARAMETER Experiment Name: At_5mM_NaNP_cDNA_P Parameter: Tissue Value: Aerial
  misc_feature: MA Experiment 108585 PARAMETER Experiment Name: At_5mM_NaNP_cDNA_P Parameter: Treatment Value: null
  misc_feature: MA Experiment ID: 108595 Result: Down-regulated in Transcription
  misc_feature: MA Experiment 108595 PARAMETER Experiment Name: At_Ler-pi_Ovule_cDNA_P Parameter: Plant Line Value: null
  misc_feature: MA Experiment ID: 20000113 Result: Down-regulated in Transcription
  misc_feature: MA Experiment 20000113 PARAMETER Experiment Name: At_42deg_Heat_cDNA_P Parameter: Temperature (deg C) Value: 42 vs. 22
  misc_feature: MA Experiment 20000113 PARAMETER Experiment Name: At_42deg_Heat_cDNA_P Parameter: Timepoint (hr) Value: 8
  misc_feature: MA Experiment 20000113 PARAMETER Experiment Name: At_42deg_Heat_cDNA_P Parameter: Tissue Value: Aerial
  misc_feature: MA Experiment ID: 20000224 Result: Down-regulated in Transcription
  misc_feature: MA Experiment ID: 20000286 Result: Down-regulated in Transcription
  misc_feature: MA Experiment 20000286 PARAMETER Experiment Name: At_Open_Flower_P Parameter: Age (day) Value: 21
  misc_feature: MA Experiment 20000286 PARAMETER Experiment Name: At_Open_Flower_P Parameter: Plant Line Value: WS
  misc_feature: MA Experiment 20000286 PARAMETER Experiment Name: At_Open_Flower_P Parameter: Tissue Value: Half Open vs. Whole Plant
  misc_feature: MA Experiment ID: 20000439 Result: Down-regulated in Transcription
  misc_feature: MA Experiment 20000439 PARAMETER Experiment Name: At_Roots__P Parameter: Age (day) Value: 14 vs. 21
  misc_feature: MA Experiment 20000439 PARAMETER Experiment Name: At_Roots__P Parameter: Organism Value: A. thaliana
  misc_feature: MA Experiment 20000439 PARAMETER Experiment Name: At_Roots__P Parameter: Tissue Value: Roots vs. Whole Plant
  misc_feature: MA Experiment ID: 20000451 Result: Down-regulated in Transcription
  misc_feature: MA Experiment 20000451 PARAMETER Experiment Name: At_CS6879_Shoots-Roots_P Parameter: Age (day) Value: 14
  misc_feature: MA Experiment 20000451 PARAMETER Experiment Name: At_CS6879_Shoots-Roots_P Parameter: Organism Value: A. thaliana
  misc_feature: MA Experiment 20000451 PARAMETER Experiment Name: At_CS6879_Shoots-Roots_P Parameter: Plant Line Value: CS6879 vs. WS
  misc_feature: MA Experiment 20000451 PARAMETER Experiment Name: At_CS6879_Shoots-Roots_P Parameter: Tissue Value: Roots
atctattaatcatctaggtggcagaagcagcatcgttgagaacgaagaagcttgaaaaagttgcgagctcagagaatctggaagtagcaaaatttggcggctttaactcagcaatttgttctgtacatggtattttgagaagagagcattcagctcacagttacgctctgcctatccagcttctaaatctactcactttggtcgagtcatggcttcttctggatctgaggcaaaagctaattacgcacccatatctaccaatgaacctgttgtgtctgttgattggctccactctaatcttggagatgctgatataaaggttttggatgcctcatggtacatggcacatgagcaaagaaatccaatccaagagtatcaagttgctcatattccaggtgctctcttctttgatttgaatggaatagcagatcgaaaaacaaatagattcccattaatagctttggcaagccttctggctgtgagcttctatgtgtctgtatgcgcaacaaccaaaaagtattgtatattatttgaattacatgtgcagttacgacacatgctaccatctgaggaagcttttgctgctggttgttctgctcttggaatcgagaacaacgatggagtggttgtgtatgatggaatggggctctttagtgcagctcgtgtatggtggatgtttagagtctttggacatgacaaagtatgggtacttgatggaggcttgccgaaatggcgtgcttcaggctatgacgttgaatccagtgtttcaaatgatgccattttgaaagccagtgcagcaactgaggctatagagaagatctatcaaggacaaacaattagcccaataacttttcagacgaagttccggccacatcttgtattggcacttgatcaggtgaaggaaaacatcgaggataagacttatcagcacatcgatgcgcgttcaaaggctagatttgacggtattgctccagaaccttggaagggtttaccgagtggtcatatacccggtaccaagtgtgtcccttttcccctaatgtttgattcctctcaaacactgttaccagcagaggagctgaagaagcagtttgaacaggaagacatatctctggacagtccgattgcggcctcatgtggaaccggtgtaacagcttgtattttggcattgggactttatcgtctgggaaaaactaatgtggcaatctatgatgggtcttggactgaatgggcaactgcaccaaacttgcccatagtgggttcttcttcataagaaagtccaagaaaaagctacaagatcacaagccagtggatatatatttataagcttagcttggttcaatccatttctgtgttaaactttaacaaatttgctgggagggttgtattagtattatacatcagtattcaggattcttgagtttggtctcatctttgtggagattgattaaaagtcttaatgttcttgttgtttgtc

SEQ ID NO: 38769 - protein, 353 aa, Arabidopsis thaliana
  peptide (1)..(353): Ceres Seq. ID no. 12331030
  misc_feature (23)..(78): Pfam Name: Rhodanese-like domain Pfam Description: Rhodanese-like domain
  misc_feature (1)..(78): Homolog of NCBI NO: 18412307 NR Description: mercaptopyruvate sulfurtransferase (Mst1/Rdh1)
  misc_feature (114)..(353): Homolog of NCBI NO: 18412307 NR Description: mercaptopyruvate sulfurtransferase (Mst1/Rdh1)
  misc_feature (1)..(78): Homolog of NCBI NO: 25288797 NR Description: hypothetical protein F3O9.26 [imported] -
  misc_feature (114)..(353): Homolog of NCBI NO: 25288797 NR Description: hypothetical protein F3O9.26 [imported] -
  misc_feature (1)..(78): Homolog of NCBI NO: 18394364 NR Description: mercaptopyruvate sulfurtransferase (Mst2/Rdh2)
  misc_feature (114)..(353): Homolog of NCBI NO: 18394364 NR Description: mercaptopyruvate sulfurtransferase (Mst2/Rdh2)
  misc_feature (1)..(78): Homolog of NCBI NO: 30684873 NR Description: mercaptopyruvate sulfurtransferase (Mst2/Rdh2)
  misc_feature (114)..(353): Homolog of NCBI NO: 30684873 NR Description: mercaptopyruvate sulfurtransferase (Mst2/Rdh2)
  misc_feature (1)..(83): Homolog of NCBI NO: 25456716 NR Description: thiosulfate sulfurtransferase (EC 2.8.1.1)
  misc_feature (113)..(353): Homolog of NCBI NO: 25456716 NR Description: thiosulfate sulfurtransferase (EC 2.8.1.1)
MASSGSEAKANYAPISTNEPVVSVDWLHSNLGDADIKVLDASWYMAHEQRNPIQEYQVAHIPGALFFDLNGIADRKTNRFPLIALASLLAVSFYVSVCATTKKYCILFELHVQLRHMLPSEEAFAAGCSALGIENNDGVVVYDGMGLFSAARVWWMFRVFGHDKVWVLDGGLPKWRASGYDVESSVSNDAILKASAATEAIEKIYQGQTISPITFQTKFRPHLVLALDQVKENIEDKTYQHIDARSKARFDGIAPEPWKGLPSGHIPGTKCVPFPLMFDSSQTLLPAEELKKQFEQEDISLDSPIAASCGTGVTACILALGLYRLGKTNVAIYDGSWTEWATAPNLPIVGSSS

SEQ ID NO: 38770 - protein, 309 aa, Arabidopsis thaliana
  peptide (1)..(309): Ceres Seq. ID no. 12331031
  misc_feature (70)..(134): Pfam Name: Rhodanese-like domain Pfam Description: Rhodanese-like domain
  misc_feature (1)..(34): Homolog of NCBI NO: 18412307 NR Description: mercaptopyruvate sulfurtransferase (Mst1/Rdh1)
  misc_feature (70)..(309): Homolog of NCBI NO: 18412307 NR Description: mercaptopyruvate sulfurtransferase (Mst1/Rdh1)
  misc_feature (1)..(34): Homolog of NCBI NO: 25288797 NR Description: hypothetical protein F3O9.26 [imported] -
  misc_feature (70)..(309): Homolog of NCBI NO: 25288797 NR Description: hypothetical protein F3O9.26 [imported] -
  misc_feature (1)..(34): Homolog of NCBI NO: 18394364 NR Description: mercaptopyruvate sulfurtransferase (Mst2/Rdh2)
  misc_feature (70)..(309): Homolog of NCBI NO: 18394364 NR Description: mercaptopyruvate sulfurtransferase (Mst2/Rdh2)
  misc_feature (1)..(34): Homolog of NCBI NO: 30684873 NR Description: mercaptopyruvate sulfurtransferase (Mst2/Rdh2)
  misc_feature (70)..(309): Homolog of NCBI NO: 30684873 NR Description: mercaptopyruvate sulfurtransferase (Mst2/Rdh2)
  misc_feature (1)..(39): Homolog of NCBI NO: 25456716 NR Description: thiosulfate sulfurtransferase (EC 2.8.1.1)
  misc_feature (69)..(309): Homolog of NCBI NO: 25456716 NR Description: thiosulfate sulfurtransferase (EC 2.8.1.1)
MAHEQRNPIQEYQVAHIPGALFFDLNGIADRKTNRFPLIALASLLAVSFYVSVCATTKKYCILFELHVQLRHMLPSEEAFAAGCSALGIENNDGVVVYDGMGLFSAARVWWMFRVFGHDKVWVLDGGLPKWRASGYDVESSVSNDAILKASAATEAIEKIYQGQTISPITFQTKFRPHLVLALDQVKENIEDKTYQHIDARSKARFDGIAPEPWKGLPSGHIPGTKCVPFPLMFDSSQTLLPAEELKKQFEQEDISLDSPIAASCGTGVTACILALGLYRLGKTNVAIYDGSWTEWATAPNLPIVGSSS

SEQ ID NO: 38771 - protein, 237 aa, Arabidopsis thaliana
  peptide (1)..(237): Ceres Seq. ID no. 12331032
  misc_feature (1)..(62): Pfam Name: Rhodanese-like domain Pfam Description: Rhodanese-like domain
  misc_feature (1)..(90): Homolog of NCBI NO: 27381801 NR Description: thiosulfate sulfurtransferase [Bradyrhizobium
  misc_feature (96)..(232): Homolog of NCBI NO: 27381801 NR Description: thiosulfate sulfurtransferase [Bradyrhizobium
  misc_feature (1)..(236): Homolog of NCBI NO: 14571545 NR Description: thiosulfate transferase [Triticum aestivum]
  misc_feature (1)..(232): Homolog of NCBI NO: 4406372 NR Description: thiosulfate sulfurtransferase [Datisca glomerata]
  misc_feature (1)..(237): Homolog of NCBI NO: 25288794 NR Description: thiosulfate sulfurtransferase (EC 2.8.1.1) Mst1
  misc_feature (1)..(237): Homolog of NCBI NO: 18412307 NR Description: mercaptopyruvate sulfurtransferase (Mst1/Rdh1)
  misc_feature (1)..(237): Homolog of NCBI NO: 25288797 NR Description: hypothetical protein F3O9.26 [imported] -
  misc_feature (1)..(237): Homolog of NCBI NO: 18394364 NR Description: mercaptopyruvate sulfurtransferase (Mst2/Rdh2)
  misc_feature (1)..(237): Homolog of NCBI NO: 30684873 NR Description: mercaptopyruvate sulfurtransferase (Mst2/Rdh2)
  misc_feature (1)..(237): Homolog of NCBI NO: 25456716 NR Description: thiosulfate sulfurtransferase (EC 2.8.1.1)
MLPSEEAFAAGCSALGIENNDGVVVYDGMGLFSAARVWWMFRVFGHDKVWVLDGGLPKWRASGYDVESSVSNDAILKASAATEAIEKIYQGQTISPITFQTKFRPHLVLALDQVKENIEDKTYQHIDARSKARFDGIAPEPWKGLPSGHIPGTKCVPFPLMFDSSQTLLPAEELKKQFEQEDISLDSPIAASCGTGVTACILALGLYRLGKTNVAIYDGSWTEWATAPNLPIVGSSS

SEQ ID NO: 38772 - DNA, 2063 bp, Arabidopsis thaliana
  misc_feature (1)..(2063): Ceres Seq. ID no. 12371494
  misc_feature: MA Experiment ID: 108434 Result: Down-regulated in Transcription
  misc_feature: MA Experiment 108434 PARAMETER Experiment Name: At_Root_Tips_cDNA_P Parameter: Tissue Value: Root Tips
  misc_feature: MA Experiment ID: 108585 Result: Up-regulated in Transcription
  misc_feature: MA Experiment 108585 PARAMETER Experiment Name: At_5mM_NaNP_cDNA_P Parameter: Timepoint (hr) Value: 6
  misc_feature: MA Experiment 108585 PARAMETER Experiment Name: At_5mM_NaNP_cDNA_P Parameter: Tissue Value: Aerial
  misc_feature: MA Experiment 108585 PARAMETER Experiment Name: At_5mM_NaNP_cDNA_P Parameter: Treatment Value: null
  misc_feature: MA Experiment ID: 108668 Result: Up-regulated in Transcription
  misc_feature: MA Experiment 108668 PARAMETER Experiment Name: At_2mM_SA_cDNA_P Parameter: Plant Line Value: WS
  misc_feature: MA Experiment 108668 PARAMETER Experiment Name: At_2mM_SA_cDNA_P Parameter: Timepoint (hr) Value: 6
  misc_feature: MA Experiment 108668 PARAMETER Experiment Name: At_2mM_SA_cDNA_P Parameter: Treatment Value: 2mM SA vs. No Treatment
  misc_feature: MA Experiment ID: 20000182 Result: Up-regulated in Transcription
  misc_feature: MA Experiment 20000182 PARAMETER Experiment Name: At_2mM_SA_P Parameter: Age (day) Value: 14
  misc_feature: MA Experiment 20000182 PARAMETER Experiment Name: At_2mM_SA_P Parameter: Organism Value: A. thaliana
  misc_feature: MA Experiment 20000182 PARAMETER Experiment Name: At_2mM_SA_P Parameter: Plant Line Value: WS
  misc_feature: MA Experiment 20000182 PARAMETER Experiment Name: At_2mM_SA_P Parameter: Timepoint (hr) Value: 6
  misc_feature: MA Experiment 20000182 PARAMETER Experiment Name: At_2mM_SA_P Parameter: Tissue Value: Aerial
  misc_feature: MA Experiment 20000182 PARAMETER Experiment Name: At_2mM_SA_P Parameter: Treatment Value: 2mM SA vs. No Treatment
  misc_feature: MA Experiment ID: 20000184 Result: Down-regulated in Transcription
  misc_feature: MA Experiment 20000184 PARAMETER Experiment Name: At_Shoots__P Parameter: Age (day) Value: 7
  misc_feature: MA Experiment 20000184 PARAMETER Experiment Name: At_Shoots__P Parameter: Tissue Value: Shoots vs. Whole Plant
  misc_feature: MA Experiment ID: 20000235 Result: Down-regulated in Transcription
  misc_feature: MA Experiment 20000235 PARAMETER Experiment Name: At_Siliques_P Parameter: Age (day) Value: 21
  misc_feature: MA Experiment 20000235 PARAMETER Experiment Name: At_Siliques_P Parameter: Organism Value: A. thaliana
  misc_feature: MA Experiment 20000235 PARAMETER Experiment Name: At_Siliques_P Parameter: Plant Line Value: WS
  misc_feature: MA Experiment 20000235 PARAMETER Experiment Name: At_Siliques_P Parameter: Tissue Value: 5-10mm Siliques vs. Whole Plant
  misc_feature: MA Experiment ID: 20000286 Result: Down-regulated in Transcription
  misc_feature: MA Experiment 20000286 PARAMETER Experiment Name: At_Open_Flower_P Parameter: Age (day) Value: 21
  misc_feature: MA Experiment 20000286 PARAMETER Experiment Name: At_Open_Flower_P Parameter: Plant Line Value: WS
  misc_feature: MA Experiment 20000286 PARAMETER Experiment Name: At_Open_Flower_P Parameter: Tissue Value: Half Open vs. Whole Plant
  misc_feature: MA Experiment ID: 20000438 Result: Down-regulated in Transcription
  misc_feature: MA Experiment 20000438 PARAMETER Experiment Name: At_Shoots__P Parameter: Age (day) Value: 14
  misc_feature: MA Experiment 20000438 PARAMETER Experiment Name: At_Shoots__P Parameter: Tissue Value: Shoots vs. Whole Plant
aaacaaaaaaaacagagacccttcctctggggaatctaaggaagcttcaaaatgaagctaaagatttctctaatcgctccgattcttcttctcttctcattcttcttcgccgtggaatctaagtgcaggactagctgtcctttagctctagcttcgtactatctcgagaacggaacaacactctccgtcatcaaccaaaacctcaattcttcaatcgcgccttacgatcaaatcaatttcgatccaatcctcaggtacaacagtaacattaaagacaaagatagaatccagatgggctctagggttcttgtacctttcccttgcgaatgtcaacctggtgatttcctagggcacaatttcagctacagtgttcgacaggaagatacttacgaaagagtcgcgattagtaattacgcgaatctcacgacgatggagtcgttacaggcgaggaatccttttccggcgactaacatacctctctctgcgacgcttaatgtattggtgaattgttcttgtggtgatgagagtgtttcgaaagattttggtttgtttgttacgtatccgcttcgtcctgaagacagtctcagttctattgcgagatcttccggtgtatcggcggatattctgcagagatataatcccggtgttaattttaactccgggaatggaatcgtttatgtgcctggaagagatccaaatggtgcatttccaccattcaaatcaagtaaacaagatggtgttggtgctggagttattgctggtatagttataggagtgattgtggctttgttgttgatcttgtttatcgtatattatgcttaccggaagaataagtcgaagggtgattcgttttcttcttctattccgttgtctactaaggctgatcatgcttcttctactagtctccaaagtggaggtttgggtggtgccggagtgtctcctggcattgctgccataagcgtggacaaatctgttgagttttcgttggaggaactagcaaaggctactgataatttcaatttgtcttttaagattgggcaaggtggttttggggctgtttactatgcagagctgagaggagaaaaagctgcgattaagaagatggacatggaggcatcgaaacagttcttggcggaactaaaagtcttaacgcgtgtacatcatgtcaacctggttcgcctgattggatattgtgttgagggatcacttttcttggtgtatgaatatgttgagaatggtaaccttggacaacatttacatgggtcaggacgagaaccattaccgtggactaagagagtgcagattgcactagactcagctagaggtttagaatatatccacgagcacacggttccagtttatgtccatagggacattaaatctgccaatattttgatagaccagaaattccgagcaaaggtagcagatttcgggttaacaaaactgacagaagttggaggttcagcaactcggggtgcaatgggtacatttggttacatggcaccagagactgtttatggagaagtgtctgcaaaagtagatgtatatgcatttggagttgtcctttacgaattgatttctgcgaaaggtgcggttgtcaaaatgacagaagccgttggtgaatttagaggccttgttggtgtgttcgaagaatcattcaaggaaaccgacaaagaagaagcactacgcaagattatagacccgaggctcggtgatagttacccgtttgattcggtatacaagatggcggaattagggaaagcatgtacacaagagaatgcgcagctacgtccgagtatgagatacattgtggttgctttatccactctcttttcgtctaccggaaattgggatgttggaaacttccaaaacgaagatttagtcagtcttatgtccggccggtagactcgttttccggtttgctgttgttatatagaaatgattgttttttggtatgctcacgtatattttgtctgtctatacgaactttacatgtcacaactcacaagttgacttttatatgattttctataacgctctatatgtcaattattcaacgtctc

SEQ ID NO: 38773 - protein, 617 aa, Arabidopsis thaliana
  peptide (1)..(617): Ceres Seq. ID no. 12371495
  misc_feature (298)..(617): Homolog of NCBI NO: 15218078 NR Description: unknown protein; protein id: At1g51940.1
  misc_feature (130)..(596): Homolog of NCBI NO: 34485526 NR Description: LysM domain-containing receptor-like kinase 4
  misc_feature (5)..(266): Homolog of NCBI NO: 34485514 NR Description: LysM domain-containing receptor-like kinase 1
  misc_feature (302)..(596): Homolog of NCBI NO: 34485514 NR Description: LysM domain-containing receptor-like kinase 1
  misc_feature (25)..(224): Homolog of NCBI NO: 38175551 NR Description: receptor protein kinase PERK1-like protein
  misc_feature (294)..(617): Homolog of NCBI NO: 38175551 NR Description: receptor protein kinase PERK1-like protein
  misc_feature (1)..(617): Homolog of NCBI NO: 34485516 NR Description: LysM domain-containing receptor-like kinase 3
  misc_feature (1)..(617): Homolog of NCBI NO: 37651060 NR Description: Nod-factor receptor 1b [Lotus corniculatus var.
  misc_feature (1)..(617): Homolog of NCBI NO: 37651058 NR Description: Nod-factor receptor 1a [Lotus corniculatus var.
  misc_feature (1)..(617): Homolog of NCBI NO: 11994399 NR Description: contains similarity to receptor protein
MKLKISLIAPILLLFSFFFAVESKCRTSCPLALASYYLENGTTLSVINQNLNSSIAPYDQINFDPILRYNSNIKDKDRIQMGSRVLVPFPCECQPGDFLGHNFSYSVRQEDTYERVAISNYANLTTMESLQARNPFPATNIPLSATLNVLVNCSCGDESVSKDFGLFVTYPLRPEDSLSSIARSSGVSADILQRYNPGVNFNSGNGIVYVPGRDPNGAFPPFKSSKQDGVGAGVIAGIVIGVIVALLLILFIVYYAYRKNKSKGDSFSSSIPLSTKADHASSTSLQSGGLGGAGVSPGIAAISVDKSVEFSLEELAKATDNFNLSFKIGQGGFGAVYYAELRGEKAAIKKMDMEASKQFLAELKVLTRVHHVNLVRLIGYCVEGSLFLVYEYVENGNLGQHLHGSGREPLPWTKRVQIALDSARGLEYIHEHTVPVYVHRDIKSANILIDQKFRAKVADFGLTKLTEVGGSATRGAMGTFGYMAPETVYGEVSAKVDVYAFGVVLYELISAKGAVVKMTEAVGEFRGLVGVFEESFKETDKEEALRKIIDPRLGDSYPFDSVYKMAELGKACTQENAQLRPSMRYIVVALSTLFSSTGNWDVGNFQNEDLVSLMSGR

SEQ ID NO: 38774 - protein, 537 aa, Arabidopsis thaliana
  peptide (1)..(537): Ceres Seq. ID no. 12371496
  misc_feature (218)..(537): Homolog of NCBI NO: 15218078 NR Description: unknown protein; protein id: At1g51940.1
  misc_feature (50)..(516): Homolog of NCBI NO: 34485526 NR Description: LysM domain-containing receptor-like kinase 4
  misc_feature (1)..(186): Homolog of NCBI NO: 34485514 NR Description: LysM domain-containing receptor-like kinase 1
  misc_feature (222)..(516): Homolog of NCBI NO: 34485514 NR Description: LysM domain-containing receptor-like kinase 1
  misc_feature (1)..(144): Homolog of NCBI NO: 38175551 NR Description: receptor protein kinase PERK1-like protein
  misc_feature (214)..(537): Homolog of NCBI NO: 38175551 NR Description: receptor protein kinase PERK1-like protein
  misc_feature (1)..(537): Homolog of NCBI NO: 34485516 NR Description: LysM domain-containing receptor-like kinase 3
  misc_feature (1)..(537): Homolog of NCBI NO: 37651060 NR Description: Nod-factor receptor 1b [Lotus corniculatus var.
  misc_feature (1)..(537): Homolog of NCBI NO: 37651058 NR Description: Nod-factor receptor 1a [Lotus corniculatus var.
  misc_feature (1)..(537): Homolog of NCBI NO: 11994399 NR Description: contains similarity to receptor protein
MGSRVLVPFPCECQPGDFLGHNFSYSVRQEDTYERVAISNYANLTTMESLQARNPFPATNIPLSATLNVLVNCSCGDESVSKDFGLFVTYPLRPEDSLSSIARSSGVSADILQRYNPGVNFNSGNGIVYVPGRDPNGAFPPFKSSKQDGVGAGVIAGIVIGVIVALLLILFIVYYAYRKNKSKGDSFSSSIPLSTKADHASSTSLQSGGLGGAGVSPGIAAISVDKSVEFSLEELAKATDNFNLSFKIGQGGFGAVYYAELRGEKAAIKKMDMEASKQFLAELKVLTRVHHVNLVRLIGYCVEGSLFLVYEYVENGNLGQHLHGSGREPLPWTKRVQIALDSARGLEYIHEHTVPVYVHRDIKSANILIDQKFRAKVADFGLTKLTEVGGSATRGAMGTFGYMAPETVYGEVSAKVDVYAFGVVLYELISAKGAVVKMTEAVGEFRGLVGVFEESFKETDKEEALRKIIDPRLGDSYPFDSVYKMAELGKACTQENAQLRPSMRYIVVALSTLFSSTGNWDVGNFQNEDLVSLMSGR

SEQ ID NO: 38775 - protein, 491 aa, Arabidopsis thaliana
  peptide (1)..(491): Ceres Seq. ID no. 12371497
  misc_feature (172)..(491): Homolog of NCBI NO: 15218078 NR Description: unknown protein; protein id: At1g51940.1
  misc_feature (4)..(470): Homolog of NCBI NO: 34485526 NR Description: LysM domain-containing receptor-like kinase 4
  misc_feature (1)..(140): Homolog of NCBI NO: 34485514 NR Description: LysM domain-containing receptor-like kinase 1
  misc_feature (176)..(470): Homolog of NCBI NO: 34485514 NR Description: LysM domain-containing receptor-like kinase 1
  misc_feature (1)..(98): Homolog of NCBI NO: 38175551 NR Description: receptor protein kinase PERK1-like protein
  misc_feature (168)..(491): Homolog of NCBI NO: 38175551 NR Description: receptor protein kinase PERK1-like protein
  misc_feature (1)..(491): Homolog of NCBI NO: 34485516 NR Description: LysM domain-containing receptor-like kinase 3
  misc_feature (1)..(491): Homolog of NCBI NO: 37651060 NR Description: Nod-factor receptor 1b [Lotus corniculatus var.
  misc_feature (1)..(491): Homolog of NCBI NO: 37651058 NR Description: Nod-factor receptor 1a [Lotus corniculatus var.
  misc_feature (1)..(491): Homolog of NCBI NO: 11994399 NR Description: contains similarity to receptor protein
MESLQARNPFPATNIPLSATLNVLVNCSCGDESVSKDFGLFVTYPLRPEDSLSSIARSSGVSADILQRYNPGVNFNSGNGIVYVPGRDPNGAFPPFKSSKQDGVGAGVIAGIVIGVIVALLLILFIVYYAYRKNKSKGDSFSSSIPLSTKADHASSTSLQSGGLGGAGVSPGIAAISVDKSVEFSLEELAKATDNFNLSFKIGQGGFGAVYYAELRGEKAAIKKMDMEASKQFLAELKVLTRVHHVNLVRLIGYCVEGSLFLVYEYVENGNLGQHLHGSGREPLPWTKRVQIALDSARGLEYIHEHTVPVYVHRDIKSANILIDQKFRAKVADFGLTKLTEVGGSATRGAMGTFGYMAPETVYGEVSAKVDVYAFGVVLYELISAKGAVVKMTEAVGEFRGLVGVFEESFKETDKEEALRKIIDPRLGDSYPFDSVYKMAELGKACTQENAQLRPSMRYIVVALSTLFSSTGNWDVGNFQNEDLVSLMSGR

SEQ ID NO: 38776 - DNA, 1435 bp, Arabidopsis thaliana
  misc_feature (1)..(1435): Ceres Seq. ID no. 12328568
  misc_feature: MA Experiment ID: 108434 Result: Down-regulated in Transcription
  misc_feature: MA Experiment 108434 PARAMETER Experiment Name: At_Root_Tips_cDNA_P Parameter: Tissue Value: Root Tips
  misc_feature: MA Experiment ID: 108464 Result: Up-regulated in Transcription
  misc_feature: MA Experiment 108464 PARAMETER Experiment Name: At_Germinating_Seeds_cDNA_P Parameter: Age (day) Value: 4 vs. 0
  misc_feature: MA Experiment 108464 PARAMETER Experiment Name: At_Germinating_Seeds_cDNA_P Parameter: Tissue Value: Germinating Seeds
  misc_feature: MA Experiment ID: 108607 Result: Up-regulated in Transcription
  misc_feature: MA Experiment 108607 PARAMETER Experiment Name: At_100uM_ABA_cDNA_P Parameter: Timepoint (hr) Value: 4
  misc_feature: MA Experiment 108607 PARAMETER Experiment Name: At_100uM_ABA_cDNA_P Parameter: Tissue Value: Aerial
  misc_feature: MA Experiment 108607 PARAMETER Experiment Name: At_100uM_ABA_cDNA_P Parameter: Treatment Value: 100uM ABA vs. No Treatment
  misc_feature: MA Experiment ID: 108668 Result: Up-regulated in Transcription
  misc_feature: MA Experiment 108668 PARAMETER Experiment Name: At_2mM_SA_cDNA_P Parameter: Plant Line Value: WS
  misc_feature: MA Experiment 108668 PARAMETER Experiment Name: At_2mM_SA_cDNA_P Parameter: Timepoint (hr) Value: 6
  misc_feature: MA Experiment 108668 PARAMETER Experiment Name: At_2mM_SA_cDNA_P Parameter: Treatment Value: 2mM SA vs. No Treatment
  misc_feature: MA Experiment ID: 20000069 Result: Up-regulated in Transcription
  misc_feature: MA Experiment 20000069 PARAMETER Experiment Name: At_100uM_ABA_Mutants_cDNA_P Parameter: Plant Line Value: CS23
  misc_feature: MA Experiment 20000069 PARAMETER Experiment Name: At_100uM_ABA_Mutants_cDNA_P Parameter: Timepoint (hr) Value: 6
  misc_feature: MA Experiment 20000069 PARAMETER Experiment Name: At_100uM_ABA_Mutants_cDNA_P Parameter: Tissue Value: Aerial
  misc_feature: MA Experiment 20000069 PARAMETER Experiment Name: At_100uM_ABA_Mutants_cDNA_P Parameter: Treatment Value: 100uM ABA vs. No Treatment
  misc_feature: MA Experiment ID: 20000070 Result: Up-regulated in Transcription
  misc_feature: MA Experiment 20000070 PARAMETER Experiment Name: At_100uM_ABA_Mutants_cDNA_P Parameter: Plant Line Value: CS24
  misc_feature: MA Experiment 20000070 PARAMETER Experiment Name: At_100uM_ABA_Mutants_cDNA_P Parameter: Timepoint (hr) Value: 6
  misc_feature: MA Experiment 20000070 PARAMETER Experiment Name: At_100uM_ABA_Mutants_cDNA_P Parameter: Tissue Value: Aerial
  misc_feature: MA Experiment 20000070 PARAMETER Experiment Name: At_100uM_ABA_Mutants_cDNA_P Parameter: Treatment Value: 100uM ABA vs. No Treatment
  misc_feature: MA Experiment ID: 20000072 Result: Up-regulated in Transcription
  misc_feature: MA Experiment 20000072 PARAMETER Experiment Name: At_100uM_ABA_Mutants_cDNA_P Parameter: Plant Line Value: CS8105
  misc_feature: MA Experiment 20000072 PARAMETER Experiment Name: At_100uM_ABA_Mutants_cDNA_P Parameter: Timepoint (hr) Value: 6
  misc_feature: MA Experiment 20000072 PARAMETER Experiment Name: At_100uM_ABA_Mutants_cDNA_P Parameter: Tissue Value: Aerial
  misc_feature: MA Experiment 20000072 PARAMETER Experiment Name: At_100uM_ABA_Mutants_cDNA_P Parameter: Treatment Value: 100uM ABA vs. No Treatment
  misc_feature: MA Experiment ID: 20000090 Result: Up-regulated in Transcription
  misc_feature: MA Experiment ID: 20000144 Result: Down-regulated in Transcription
  misc_feature: MA Experiment 20000144 PARAMETER Experiment Name: At_42deg_Heat_cDNA_P Parameter: Temperature (deg C) Value: 42 vs. 22
  misc_feature: MA Experiment 20000144 PARAMETER Experiment Name: At_42deg_Heat_cDNA_P Parameter: Timepoint (hr) Value: 1
  misc_feature: MA Experiment 20000144 PARAMETER Experiment Name: At_42deg_Heat_cDNA_P Parameter: Tissue Value: Aerial
  misc_feature: MA Experiment ID: 20000171 Result: Down-regulated in Transcription
  misc_feature: MA Experiment 20000171 PARAMETER Experiment Name: At_42deg_Heat_P Parameter: Age (day) Value: 14
  misc_feature: MA Experiment 20000171 PARAMETER Experiment Name: At_42deg_Heat_P Parameter: Organism Value: A. thaliana
  misc_feature: MA Experiment 20000171 PARAMETER Experiment Name: At_42deg_Heat_P Parameter: Plant Line Value: WS
  misc_feature: MA Experiment 20000171 PARAMETER Experiment Name: At_42deg_Heat_P Parameter: Temperature (deg C) Value: 42 vs. 22
  misc_feature: MA Experiment 20000171 PARAMETER Experiment Name: At_42deg_Heat_P Parameter: Timepoint (hr) Value: 1
  misc_feature: MA Experiment 20000171 PARAMETER Experiment Name: At_42deg_Heat_P Parameter: Tissue Value: Aerial
  misc_feature: MA Experiment ID: 20000173 Result: Down-regulated in Transcription
  misc_feature: MA Experiment 20000173 PARAMETER Experiment Name: At_42deg_Heat_P Parameter: Age (day) Value: 14
  misc_feature: MA Experiment 20000173 PARAMETER Experiment Name: At_42deg_Heat_P Parameter: Organism Value: A. thaliana
  misc_feature: MA Experiment 20000173 PARAMETER Experiment Name: At_42deg_Heat_P Parameter: Plant Line Value: WS
  misc_feature: MA Experiment 20000173 PARAMETER Experiment Name: At_42deg_Heat_P Parameter: Temperature (deg C) Value: 42 vs. 22
  misc_feature: MA Experiment 20000173 PARAMETER Experiment Name: At_42deg_Heat_P Parameter: Timepoint (hr) Value: 6
  misc_feature: MA Experiment 20000173 PARAMETER Experiment Name: At_42deg_Heat_P Parameter: Tissue Value: Aerial
  misc_feature: MA Experiment ID: 20000182 Result: Up-regulated in Transcription
  misc_feature: MA Experiment 20000182 PARAMETER Experiment Name: At_2mM_SA_P Parameter: Age (day) Value: 14
  misc_feature: MA Experiment 20000182 PARAMETER Experiment Name: At_2mM_SA_P Parameter: Organism Value: A. thaliana
  misc_feature: MA Experiment 20000182 PARAMETER Experiment Name: At_2mM_SA_P Parameter: Plant Line Value: WS
  misc_feature: MA Experiment 20000182 PARAMETER Experiment Name: At_2mM_SA_P Parameter: Timepoint (hr) Value: 6
  misc_feature: MA Experiment 20000182 PARAMETER Experiment Name: At_2mM_SA_P Parameter: Tissue Value: Aerial
  misc_feature: MA Experiment 20000182 PARAMETER Experiment Name: At_2mM_SA_P Parameter: Treatment Value: 2mM SA vs. No Treatment
  misc_feature: MA Experiment ID: 20000184 Result: Down-regulated in Transcription
  misc_feature: MA Experiment 20000184 PARAMETER Experiment Name: At_Shoots__P Parameter: Age (day) Value: 7
  misc_feature: MA Experiment 20000184 PARAMETER Experiment Name: At_Shoots__P Parameter: Tissue Value: Shoots vs. Whole Plant
  misc_feature: MA Experiment ID: 20000224 Result: Up-regulated in Transcription
  misc_feature: MA Experiment ID: 20000234 Result: Down-regulated in Transcription
  misc_feature: MA Experiment 20000234 PARAMETER Experiment Name: At_Siliques_P Parameter: Age (day) Value: 21
  misc_feature: MA Experiment 20000234 PARAMETER Experiment Name: At_Siliques_P Parameter: Organism Value: A. thaliana
  misc_feature: MA Experiment 20000234 PARAMETER Experiment Name: At_Siliques_P Parameter: Plant Line Value: WS
  misc_feature: MA Experiment 20000234 PARAMETER Experiment Name: At_Siliques_P Parameter: Tissue Value: Less Than 5mm Siliques vs. Whole Plant
  misc_feature: MA Experiment ID: 20000235 Result: Down-regulated in Transcription
  misc_feature: MA Experiment 20000235 PARAMETER Experiment Name: At_Siliques_P Parameter: Age (day) Value: 21
  misc_feature: MA Experiment 20000235 PARAMETER Experiment Name: At_Siliques_P Parameter: Organism Value: A. thaliana
  misc_feature: MA Experiment 20000235 PARAMETER Experiment Name: At_Siliques_P Parameter: Plant Line Value: WS
  misc_feature: MA Experiment 20000235 PARAMETER Experiment Name: At_Siliques_P Parameter: Tissue Value: 5-10mm Siliques vs. Whole Plant
  misc_feature: MA Experiment ID: 20000264 Result: Down-regulated in Transcription
  misc_feature: MA Experiment 20000264 PARAMETER Experiment Name: At_Open_Flower_P Parameter: Age (day) Value: 21
  misc_feature: MA Experiment 20000264 PARAMETER Experiment Name: At_Open_Flower_P Parameter: Plant Line Value: WS
  misc_feature: MA Experiment 20000264 PARAMETER Experiment Name: At_Open_Flower_P Parameter: Tissue Value: Open Flower vs. Whole Plant
  misc_feature: MA Experiment ID: 20000286 Result: Down-regulated in Transcription
  misc_feature: MA Experiment 20000286 PARAMETER Experiment Name: At_Open_Flower_P Parameter: Age (day) Value: 21
  misc_feature: MA Experiment 20000286 PARAMETER Experiment Name: At_Open_Flower_P Parameter: Plant Line Value: WS
  misc_feature: MA Experiment 20000286 PARAMETER Experiment Name: At_Open_Flower_P Parameter: Tissue Value: Half Open vs. Whole Plant
  misc_feature: MA Experiment ID: 20000438 Result: Down-regulated in Transcription
  misc_feature: MA Experiment 20000438 PARAMETER Experiment Name: At_Shoots__P Parameter: Age (day) Value: 14
  misc_feature: MA Experiment 20000438 PARAMETER Experiment Name: At_Shoots__P Parameter: Tissue Value: Shoots vs. Whole Plant
  misc_feature: MA Experiment ID: 20001560 Result: Down-regulated in Transcription
  misc_feature: MA Experiment 20001560 PARAMETER Experiment Name: At_Drought_Soil_Dry_P Parameter: Age (day) Value: 28
  misc_feature: MA Experiment 20001560 PARAMETER Experiment Name: At_Drought_Soil_Dry_P Parameter: Organism Value: A. thaliana
  misc_feature: MA Experiment 20001560 PARAMETER Experiment Name: At_Drought_Soil_Dry_P Parameter: Plant Line Value: WS
  misc_feature: MA Experiment 20001560 PARAMETER Experiment Name: At_Drought_Soil_Dry_P Parameter: Post Timepoint (hr) Value: None
  misc_feature: MA Experiment 20001560 PARAMETER Experiment Name: At_Drought_Soil_Dry_P Parameter: Post-Treatment Value: None
  misc_feature: MA Experiment 20001560 PARAMETER Experiment Name: At_Drought_Soil_Dry_P Parameter: Timepoint (day) Value: 14
  misc_feature: MA Experiment 20001560 PARAMETER Experiment Name: At_Drought_Soil_Dry_P Parameter: Treatment Value: Drought vs. No Drought
aattatatgtatatatatacgtacacaaaatcatacgtttttccacaaatggatcaagaagaggaagagatcgagattcctaattactttatctgcccaatctcactagagatcatgaaagatccagtcacgaccgtttctggcatcacttacgaccgtcaaaacatcgttaaatggctcgaaaaggtcccttcttgtcccgtcacgaagcaacctcttcccttagactccgatcttacacctaaccacatgcttcgccgtcttatccaacactggtgcgtcgagaacgagacacgtggcgttgtcagaatctctacacctcgagttcctcctggaaaacttaacgtcgtcgaagagatcaagaatctcaaaaagttcggccaagaagccttaggaagagaagaaacgttgcagaagcttgaagttttggcaatggacggaaataacagaagattgatgtgtgaatgtggcgtacataagtctttgatcttgttcgtagtcaagtgtactagtgaagacgaagacggacgacgtcgtatcaaaggactagatgagtctcttcgtcttcttcacttgatcggtattccatcaaacgacgcaaaaacaatcttgatggaaaacgatcgagttatggaatcgttgacttgggttttacaccaagaagactttctcagtaaggcttatacaattgtgctattgaggaatctaacggaatacacttcctctcatatcgtagagagattgaatcccgagatttttaaagggatcatagggtttctcaaggatgttgtaaatagtgttaatcggacgagccctaccgtgagagaaacggtacagtcatcatcaaggcctagcttgggaaaaacggaaccatcaaaacttgatcatagtttggtcatcaaacaagcggtgactgccgcgctgatgattcttttagagacttcttcgtggagccgaaaccgatcactccttgtggatctcggtgcggtttctgaactcatcgaactcgaaataagctacactggcgagaaaagaatcacagaacttatgttaggagttttatctcgtttatgttgctgtgcgaacggtagagccgagattcttgctcataggggcggaatcgcggttgtgacaaagcggctattgagggtttcacctgcggcagacgatagagctatctctatcctaactacagtgtcaaaattctcgccggaaaacatggtggtggaagagatggttaatgttgggacggtagagaagctctgttccgttctaggaatggattgtggtttgaacttgaaggagaaagcaaaagagatactaaaagatcattttgatgagtggaagaagtttccatgtattgacataactcttctcactaagctgctaagcatctcacccaaagggccaaagatctaagtaaataatctgctgc

SEQ ID NO: 38777 - protein, 472 aa, Arabidopsis thaliana
  peptide (1)..(472): Ceres Seq. ID no. 12328569
  misc_feature (25)..(99): Pfam Name: U-box domain Pfam Description: U-box domain
  misc_feature (21)..(265): Homolog of NCBI NO: 30686609 NR Description: expressed protein [Arabidopsis thaliana]
  misc_feature (21)..(265): Homolog of NCBI NO: 25408431 NR Description: hypothetical protein At2g35930 [imported] -
  misc_feature (314)..(442): Homolog of NCBI NO: 30013683 NR Description: Avr9/Cf-9 rapidly elicited protein 74 [Nicotiana
  misc_feature (23)..(303): Homolog of NCBI NO: 30013683 NR Description: Avr9/Cf-9 rapidly elicited protein 74 [Nicotiana
  misc_feature (299)..(459): Homolog of NCBI NO: 34908566 NR Description: P0505D12.10 [Oryza sativa (japonica
  misc_feature (25)..(266): Homolog of NCBI NO: 34908566 NR Description: P0505D12.10 [Oryza sativa (japonica
  misc_feature (21)..(153): Homolog of NCBI NO: 15231222 NR Description: putative protein; protein id: At3g52450.1
  misc_feature (296)..(454): Homolog of NCBI NO: 15231222 NR Description: putative protein; protein id: At3g52450.1
  misc_feature (17)..(472): Homolog of NCBI NO: 6671940 NR Description: hypothetical protein [Arabidopsis thaliana]
  misc_feature (3)..(472): Homolog of NCBI NO: 18399375 NR Description: expressed protein
NYMYIYTYTKSYVFPQMDQEEEEIEIPNYFICPISLEIMKDPVTTVSGITYDRQNIVKWLEKVPSCPVTKQPLPLDSDLTPNHMLRRLIQHWCVENETRGVVRISTPRVPPGKLNVVEEIKNLKKFGQEALGREETLQKLEVLAMDGNNRRLMCECGVHKSLILFVVKCTSEDEDGRRRIKGLDESLRLLHLIGIPSNDAKTILMENDRVMESLTWVLHQEDFLSKAYTIVLLRNLTEYTSSHIVERLNPEIFKGIIGFLKDVVNSVNRTSPTVRETVQSSSRPSLGKTEPSKLDHSLVIKQAVTAALMILLETSSWSRNRSLLVDLGAVSELIELEISYTGEKRITELMLGVLSRLCCCANGRAEILAHRGGIAVVTKRLLRVSPAADDRAISILTTVSKFSPENMVVEEMVNVGTVEKLCSVLGMDCGLNLKEKAKEILKDHFDEWKKFPCIDITLLTKLLSISPKGPKI

SEQ ID NO: 38778 - protein, 470 aa, Arabidopsis thaliana
  peptide (1)..(470): Ceres Seq. ID no. 12328570
  misc_feature (23)..(97): Pfam Name: U-box domain Pfam Description: U-box domain
  misc_feature (19)..(263): Homolog of NCBI NO: 30686609 NR Description: expressed protein [Arabidopsis thaliana]
  misc_feature (19)..(263): Homolog of NCBI NO: 25408431 NR Description: hypothetical protein At2g35930 [imported] -
  misc_feature (312)..(440): Homolog of NCBI NO: 30013683 NR Description: Avr9/Cf-9 rapidly elicited protein 74 [Nicotiana
  misc_feature (21)..(301): Homolog of NCBI NO: 30013683 NR Description: Avr9/Cf-9 rapidly elicited protein 74 [Nicotiana
  misc_feature (297)..(457): Homolog of NCBI NO: 34908566 NR Description: P0505D12.10 [Oryza sativa (japonica
  misc_feature (23)..(264): Homolog of NCBI NO: 34908566 NR Description: P0505D12.10 [Oryza sativa (japonica
  misc_feature (19)..(151): Homolog of NCBI NO: 15231222 NR Description: putative protein; protein id: At3g52450.1
  misc_feature (294)..(452): Homolog of NCBI NO: 15231222 NR Description: putative protein; protein id: At3g52450.1
  misc_feature (15)..(470): Homolog of NCBI NO: 6671940 NR Description: hypothetical protein [Arabidopsis thaliana]
  misc_feature (1)..(470): Homolog of NCBI NO: 18399375 NR Description: expressed protein
MYIYTYTKSYVFPQMDQEEEEIEIPNYFICPISLEIMKDPVTTVSGITYDRQNIVKWLEKVPSCPVTKQPLPLDSDLTPNHMLRRLIQHWCVENETRGVVRISTPRVPPGKLNVVEEIKNLKKFGQEALGREETLQKLEVLAMDGNNRRLMCECGVHKSLILFVVKCTSEDEDGRRRIKGLDESLRLLHLIGIPSNDAKTILMENDRVMESLTWVLHQEDFLSKAYTIVLLRNLTEYTSSHIVERLNPEIFKGIIGFLKDVVNSVNRTSPTVRETVQSSSRPSLGKTEPSKLDHSLVIKQAVTAALMILLETSSWSRNRSLLVDLGAVSELIELEISYTGEKRITELMLGVLSRLCCCANGRAEILAHRGGIAVVTKRLLRVSPAADDRAISILTTVSKFSPENMVVEEMVNVGTVEKLCSVLGMDCGLNLKEKAKEILKDHFDEWKKFPCIDITLLTKLLSISPKGPKI

SEQ ID NO: 38779 - protein, 456 aa, Arabidopsis thaliana
  peptide (1)..(456): Ceres Seq. ID no. 12328571
  misc_feature (9)..(83): Pfam Name: U-box domain Pfam Description: U-box domain
  misc_feature (5)..(249): Homolog of NCBI NO: 30686609 NR Description: expressed protein [Arabidopsis thaliana]
  misc_feature (5)..(249): Homolog of NCBI NO: 25408431 NR Description: hypothetical protein At2g35930 [imported] -
  misc_feature (298)..(426): Homolog of NCBI NO: 30013683 NR Description: Avr9/Cf-9 rapidly elicited protein 74 [Nicotiana
  misc_feature (7)..(287): Homolog of NCBI NO: 30013683 NR Description: Avr9/Cf-9 rapidly elicited protein 74 [Nicotiana
  misc_feature (283)..(443): Homolog of NCBI NO: 34908566 NR Description: P0505D12.10 [Oryza sativa (japonica
  misc_feature (9)..(250): Homolog of NCBI NO: 34908566 NR Description: P0505D12.10 [Oryza sativa (japonica
  misc_feature (5)..(137): Homolog of NCBI NO: 15231222 NR Description: putative protein; protein id: At3g52450.1
  misc_feature (280)..(438): Homolog of NCBI NO: 15231222 NR Description: putative protein; protein id: At3g52450.1
  misc_feature (1)..(456): Homolog of NCBI NO: 6671940 NR Description: hypothetical protein [Arabidopsis thaliana]
  misc_feature (1)..(456): Homolog of NCBI NO: 18399375 NR Description: expressed protein
MDQEEEEIEIPNYFICPISLEIMKDPVTTVSGITYDRQNIVKWLEKVPSCPVTKQPLPLDSDLTPNHMLRRLIQHWCVENETRGVVRISTPRVPPGKLNVVEEIKNLKKFGQEALGREETLQKLEVLAMDGNNRRLMCECGVHKSLILFVVKCTSEDEDGRRRIKGLDESLRLLHLIGIPSNDAKTILMENDRVMESLTWVLHQEDFLSKAYTIVLLRNLTEYTSSHIVERLNPEIFKGIIGFLKDVVNSVNRTSPTVRETVQSSSRPSLGKTEPSKLDHSLVIKQAVTAALMILLETSSWSRNRSLLVDLGAVSELIELEISYTGEKRITELMLGVLSRLCCCANGRAEILAHRGGIAVVTKRLLRVSPAADDRAISILTTVSKFSPENMVVEEMVNVGTVEKLCSVLGMDCGLNLKEKAKEILKDHFDEWKKFPCIDITLLTKLLSISPKGPKI

SEQ ID NO: 38780 - DNA, 1325 bp, Arabidopsis thaliana
  misc_feature (1)..(1325): Ceres Seq. ID no. 12579499
  misc_feature: MA Experiment ID: 20000069 Result: Up-regulated in Transcription
  misc_feature: MA Experiment 20000069 PARAMETER Experiment Name: At_100uM_ABA_Mutants_cDNA_P Parameter: Plant Line Value: CS23
  misc_feature: MA Experiment 20000069 PARAMETER Experiment Name: At_100uM_ABA_Mutants_cDNA_P Parameter: Timepoint (hr) Value: 6
  misc_feature: MA Experiment 20000069 PARAMETER Experiment Name: At_100uM_ABA_Mutants_cDNA_P Parameter: Tissue Value: Aerial
  misc_feature: MA Experiment 20000069 PARAMETER Experiment Name: At_100uM_ABA_Mutants_cDNA_P Parameter: Treatment Value: 100uM ABA vs. No Treatment
  misc_feature: MA Experiment ID: 20000070 Result: Up-regulated in Transcription
  misc_feature: MA Experiment 20000070 PARAMETER Experiment Name: At_100uM_ABA_Mutants_cDNA_P Parameter: Plant Line Value: CS24
  misc_feature: MA Experiment 20000070 PARAMETER Experiment Name: At_100uM_ABA_Mutants_cDNA_P Parameter: Timepoint (hr) Value: 6
  misc_feature: MA Experiment 20000070 PARAMETER Experiment Name: At_100uM_ABA_Mutants_cDNA_P Parameter: Tissue Value: Aerial
  misc_feature: MA Experiment 20000070 PARAMETER Experiment Name: At_100uM_ABA_Mutants_cDNA_P Parameter: Treatment Value: 100uM ABA vs. No Treatment
  misc_feature: MA Experiment ID: 20000071 Result: Up-regulated in Transcription
  misc_feature: MA Experiment 20000071 PARAMETER Experiment Name: At_100uM_ABA_Mutants_cDNA_P Parameter: Plant Line Value: CS8104
  misc_feature: MA Experiment 20000071 PARAMETER Experiment Name: At_100uM_ABA_Mutants_cDNA_P Parameter: Timepoint (hr) Value: 6
  misc_feature: MA Experiment 20000071 PARAMETER Experiment Name: At_100uM_ABA_Mutants_cDNA_P Parameter: Tissue Value: Aerial
  misc_feature: MA Experiment 20000071 PARAMETER Experiment Name: At_100uM_ABA_Mutants_cDNA_P Parameter: Treatment Value: 100uM ABA vs. No Treatment
  misc_feature: MA Experiment ID: 20000087 Result: Up-regulated in Transcription
  misc_feature: MA Experiment 20000087 PARAMETER Experiment Name: At_100uM_ABA_Mutants_cDNA_P Parameter: Plant Line Value: WS
  misc_feature: MA Experiment 20000087 PARAMETER Experiment Name: At_100uM_ABA_Mutants_cDNA_P Parameter: Timepoint (hr) Value: 6
  misc_feature: MA Experiment 20000087 PARAMETER Experiment Name: At_100uM_ABA_Mutants_cDNA_P Parameter: Tissue Value: Aerial
  misc_feature: MA Experiment 20000087 PARAMETER Experiment Name: At_100uM_ABA_Mutants_cDNA_P Parameter: Treatment Value: 100uM ABA vs. No Treatment
  misc_feature: MA Experiment ID: 20000088 Result: Up-regulated in Transcription
  misc_feature: MA Experiment 20000088 PARAMETER Experiment Name: At_100uM_ABA_Mutants_cDNA_P Parameter: Plant Line Value: Landsberg
  misc_feature: MA Experiment 20000088 PARAMETER Experiment Name: At_100uM_ABA_Mutants_cDNA_P Parameter: Timepoint (hr) Value: 6
  misc_feature: MA Experiment 20000088 PARAMETER Experiment Name: At_100uM_ABA_Mutants_cDNA_P Parameter: Tissue Value: Aerial
  misc_feature: MA Experiment 20000088 PARAMETER Experiment Name: At_100uM_ABA_Mutants_cDNA_P Parameter: Treatment Value: 100uM ABA vs. No Treatment
  misc_feature: MA Experiment ID: 20000111 Result: Up-regulated in Transcription
  misc_feature: MA Experiment 20000111 PARAMETER Experiment Name: At_42deg_Heat_cDNA_P Parameter: Temperature (deg C) Value: 42 vs. 22
  misc_feature: MA Experiment 20000111 PARAMETER Experiment Name: At_42deg_Heat_cDNA_P Parameter: Timepoint (hr) Value: 6
  misc_feature: MA Experiment 20000111 PARAMETER Experiment Name: At_42deg_Heat_cDNA_P Parameter: Tissue Value: Aerial
  misc_feature: MA Experiment ID: 20000112 Result: Up-regulated in Transcription
  misc_feature: MA Experiment 20000112 PARAMETER Experiment Name: At_42deg_Heat_cDNA_P Parameter: Temperature (deg C) Value: 42 vs. 22
  misc_feature: MA Experiment 20000112 PARAMETER Experiment Name: At_42deg_Heat_cDNA_P Parameter: Timepoint (hr) Value: 2
  misc_feature: MA Experiment 20000112 PARAMETER Experiment Name: At_42deg_Heat_cDNA_P Parameter: Tissue Value: Aerial
  misc_feature: MA Experiment ID: 20000113 Result: Up-regulated in Transcription
  misc_feature: MA Experiment 20000113 PARAMETER Experiment Name: At_42deg_Heat_cDNA_P Parameter: Temperature (deg C) Value: 42 vs. 22
  misc_feature: MA Experiment 20000113 PARAMETER Experiment Name: At_42deg_Heat_cDNA_P Parameter: Timepoint (hr) Value: 8
  misc_feature: MA Experiment 20000113 PARAMETER Experiment Name: At_42deg_Heat_cDNA_P Parameter: Tissue Value: Aerial
  misc_feature: MA Experiment ID: 20000117 Result: Up-regulated in Transcription
  misc_feature: MA Experiment 20000117 PARAMETER Experiment Name: At_100uM_ABA_Mutants_cDNA_P Parameter: Plant Line Value: Columbia
  misc_feature: MA Experiment 20000117 PARAMETER Experiment Name: At_100uM_ABA_Mutants_cDNA_P Parameter: Timepoint (hr) Value: 6
  misc_feature: MA Experiment 20000117 PARAMETER Experiment Name: At_100uM_ABA_Mutants_cDNA_P Parameter: Tissue Value: Aerial
  misc_feature: MA Experiment 20000117 PARAMETER Experiment Name: At_100uM_ABA_Mutants_cDNA_P Parameter: Treatment Value: 100uM ABA vs. No Treatment
  misc_feature: MA Experiment ID: 20000144 Result: Up-regulated in Transcription
  misc_feature: MA Experiment 20000144 PARAMETER Experiment Name: At_42deg_Heat_cDNA_P Parameter: Temperature (deg C) Value: 42 vs. 22
  misc_feature: MA Experiment 20000144 PARAMETER Experiment Name: At_42deg_Heat_cDNA_P Parameter: Timepoint (hr) Value: 1
  misc_feature: MA Experiment 20000144 PARAMETER Experiment Name: At_42deg_Heat_cDNA_P Parameter: Tissue Value: Aerial
  misc_feature: MA Experiment ID: 20000179 Result: Down-regulated in Transcription
  misc_feature: MA Experiment 20000179 PARAMETER Experiment Name: At_Germinating_Seeds_P Parameter: Age (hr) Value: 6 vs. 0
  misc_feature: MA Experiment 20000179 PARAMETER Experiment Name: At_Germinating_Seeds_P Parameter: Tissue Value: Germinating Seeds
  misc_feature: MA Experiment ID: 20000234 Result: Down-regulated in Transcription
  misc_feature: MA Experiment 20000234 PARAMETER Experiment Name: At_Siliques_P Parameter: Age (day) Value: 21
  misc_feature: MA Experiment 20000234 PARAMETER Experiment Name: At_Siliques_P Parameter: Organism Value: A. thaliana
  misc_feature: MA Experiment 20000234 PARAMETER Experiment Name: At_Siliques_P Parameter: Plant Line Value: WS
  misc_feature: MA Experiment 20000234 PARAMETER Experiment Name: At_Siliques_P Parameter: Tissue Value: Less Than 5mm Siliques vs. Whole Plant
  misc_feature: MA Experiment ID: 20000235 Result: Down-regulated in Transcription
  misc_feature: MA Experiment 20000235 PARAMETER Experiment Name: At_Siliques_P Parameter: Age (day) Value: 21
  misc_feature: MA Experiment 20000235 PARAMETER Experiment Name: At_Siliques_P Parameter: Organism Value: A. thaliana
  misc_feature: MA Experiment 20000235 PARAMETER Experiment Name: At_Siliques_P Parameter: Plant Line Value: WS
  misc_feature: MA Experiment 20000235 PARAMETER Experiment Name: At_Siliques_P Parameter: Tissue Value: 5-10mm Siliques vs. Whole Plant
  misc_feature: MA Experiment ID: 20000265 Result: Down-regulated in Transcription
  misc_feature: MA Experiment 20000265 PARAMETER Experiment Name: At_Open_Flower_P Parameter: Age (day) Value: 21
  misc_feature: MA Experiment 20000265 PARAMETER Experiment Name: At_Open_Flower_P Parameter: Plant Line Value: WS
  misc_feature: MA Experiment 20000265 PARAMETER Experiment Name: At_Open_Flower_P Parameter: Tissue Value: Closed Flower vs. Whole Plant
accttttgactcttcttctctctctctctgcaaattcaaaacagtgaaaaaaacctctcttcattttttaactccctctctctctctctctatggagagacgaacgagacgagtgaaattcacagagaatcgtacggtcacaaacgtagcagctacaccatctaacgggtctccgagactggtccgtatcactgttactgatcctttcgctactgactcgtctagcgacgacgacgacaacaacaacgtcacggtggttccaagagtgaaacgatacgtgaaggagattagattctgccaaggtgaatcttcttcctccaccgcggcgaggaaaggtaagcacaaggaggaggaaagcgtagtggttgaagatgacgtgtcgacgtcggtgaagcctaaaaagtacagaggcgtgagacagagaccttggggaaaattcgcggcggagattagagatccgtcgagccgtactcggatttggcttgggacttttgtcacggcggaggaagctgctatagcgtacgatagagccgcgattcatctcaaaggacctaaagcgctcacgaatttcctaactccgccgacgccaacgccggttatcgatctccaaacggtttccgcctgcgattacggtagagattctcggcagagccttcattcaccgacctctgttctaagattcaacgtcaacgaggaaacagagcatgagattgaagcgatcgagctatctccgagagaaagtcgacggttataaaagaagaagaagaatcgtcggcgggtttggtgttcccggatccgtatctgttaccggatttatctctcgccggcgaatgtttttgggataccgaaattgcccctgaccttttgtttctcgatgaagaaaccaaaatccaatcaacgttgttaccaaacacagaggtttcgaaacaaggagaaaacgaaactgaagatttcgagtttggtttgattgatgatttcgagtcttctccatgggatgtggatcatttcttcgaccatcatcatcactctttcgattaaaaatctcttcttttttggggaaatttttgtgtggtgatgatgacgtggatacatcgtgaccgtcggcttaccttttttagtctgaatgacgtggactgttcagatcaactgaagcgcaaacaaaaaaaaactagggttttgttttattaatttgtgggtaaatattttagttaagaagaagataagtatgttaatgtttatcaaggttggacctttcgttgttttggttcctctctctcagattgtctcaacggtaggaagcagtatataaatgtgtttctatgtcc

SEQ ID NO: 38781 - protein, 250 aa, Arabidopsis thaliana
  peptide (1)..(250): Ceres Seq. ID no. 12579500
  misc_feature (132)..(196): Pfam Name: AP2 domain Pfam Description: AP2 domain
  misc_feature (25)..(226): Homolog of NCBI NO: 7489208 NR Description: Tsi1 protein - common tobacco
  misc_feature (24)..(226): Homolog of NCBI NO: 34898320 NR Description: Similar to Nicotiana tabacum mRNA for ERF1,
  misc_feature (38)..(225): Homolog of NCBI NO: 7531181 NR Description: PATHOGENESIS-RELATED GENES TRANSCRIPTIONAL
  misc_feature (32)..(249): Homolog of NCBI NO: 15238705 NR Description: putative protein; protein id: At5g53290.1
  misc_feature (58)..(246): Homolog of NCBI NO: 15237053 NR Description: putative Ap2 domain protein; protein id:
  misc_feature (37)..(197): Homolog of NCBI NO: 15236595 NR Description: putative Ap2 domain protein
  misc_feature (37)..(197): Homolog of NCBI NO: 22655200 NR Description: putative Ap2 domain protein [Arabidopsis thaliana]
  misc_feature (36)..(232): Homolog of NCBI NO: 15234337 NR Description: putative protein; protein id: At4g27950.1
  misc_feature (31)..(241): Homolog of NCBI NO: 15225959 NR Description: putative AP2 domain transcription factor
  misc_feature (31)..(250): Homolog of NCBI NO: 15233169 NR Description: putative protein
PFDSSSLSLCKFKTVKKTSLHFLTPSLSLSMERRTRRVKFTENRTVTNVAATPSNGSPRLVRITVTDPFATDSSSDDDDNNNVTVVPRVKRYVKEIRFCQGESSSSTAARKGKHKEEESVVVEDDVSTSVKPKKYRGVRQRPWGKFAAEIRDPSSRTRIWLGTFVTAEEAAIAYDRAAIHLKGPKALTNFLTPPTPTPVIDLQTVSACDYGRDSRQSLHSPTSVLRFNVNEETEHEIEAIELSPRESRRL

SEQ ID NO: 38782 - protein, 220 aa, Arabidopsis thaliana
  peptide (1)..(220): Ceres Seq. ID no. 12579501
  misc_feature (102)..(166): Pfam Name: AP2 domain Pfam Description: AP2 domain
  misc_feature (1)..(196): Homolog of NCBI NO: 7489208 NR Description: Tsi1 protein - common tobacco
  misc_feature (1)..(196): Homolog of NCBI NO: 34898320 NR Description: Similar to Nicotiana tabacum mRNA for ERF1,
  misc_feature (8)..(195): Homolog of NCBI NO: 7531181 NR Description: PATHOGENESIS-RELATED GENES TRANSCRIPTIONAL
  misc_feature (2)..(219): Homolog of NCBI NO: 15238705 NR Description: putative protein; protein id: At5g53290.1
  misc_feature (28)..(216): Homolog of NCBI NO: 15237053 NR Description: putative Ap2 domain protein; protein id:
  misc_feature (7)..(167): Homolog of NCBI NO: 15236595 NR Description: putative Ap2 domain protein
  misc_feature (7)..(167): Homolog of NCBI NO: 22655200 NR Description: putative Ap2 domain protein [Arabidopsis thaliana]
  misc_feature (6)..(202): Homolog of NCBI NO: 15234337 NR Description: putative protein; protein id: At4g27950.1
  misc_feature (1)..(211): Homolog of NCBI NO: 15225959 NR Description: putative AP2 domain transcription factor
  misc_feature (1)..(220): Homolog of NCBI NO: 15233169 NR Description: putative protein
MERRTRRVKFTENRTVTNVAATPSNGSPRLVRITVTDPFATDSSSDDDDNNNVTVVPRVKRYVKEIRFCQGESSSSTAARKGKHKEEESVVVEDDVSTSVKPKKYRGVRQRPWGKFAAEIRDPSSRTRIWLGTFVTAEEAAIAYDRAAIHLKGPKALTNFLTPPTPTPVIDLQTVSACDYGRDSRQSLHSPTSVLRFNVNEETEHEIEAIELSPRESRRL

SEQ ID NO: 38783 - DNA, 873 bp, Arabidopsis thaliana
  misc_feature (1)..(873): Ceres Seq. ID no. 12328483
  misc_feature: MA Experiment ID: 108462 Result: Down-regulated in Transcription
  misc_feature: MA Experiment 108462 PARAMETER Experiment Name: At_Germinating_Seeds_cDNA_P Parameter: Age (day) Value: 2 vs. 0
  misc_feature: MA Experiment 108462 PARAMETER Experiment Name: At_Germinating_Seeds_cDNA_P Parameter: Tissue Value: Germinating Seeds
  misc_feature: MA Experiment ID: 108463 Result: Down-regulated in Transcription
  misc_feature: MA Experiment 108463 PARAMETER Experiment Name: At_Germinating_Seeds_cDNA_P Parameter: Age (day) Value: 3 vs. 0
  misc_feature: MA Experiment 108463 PARAMETER Experiment Name: At_Germinating_Seeds_cDNA_P Parameter: Tissue Value: Germinating Seeds
  misc_feature: MA Experiment ID: 108572 Result: Down-regulated in Transcription
  misc_feature: MA Experiment 108572 PARAMETER Experiment Name: At_Drought_cDNA_P Parameter: Timepoint (hr) Value: 1
  misc_feature: MA Experiment 108572 PARAMETER Experiment Name: At_Drought_cDNA_P Parameter: Tissue Value: Aerial
  misc_feature: MA Experiment 108572 PARAMETER Experiment Name: At_Drought_cDNA_P Parameter: Treatment Value: Drought vs. No Drought
  misc_feature: MA Experiment ID: 108595 Result: Down-regulated in Transcription
  misc_feature: MA Experiment 108595 PARAMETER Experiment Name: At_Ler-pi_Ovule_cDNA_P Parameter: Plant Line Value: null
  misc_feature: MA Experiment ID: 20001757 Result: Up-regulated in Transcription
  misc_feature: MA Experiment 20001757 PARAMETER Experiment Name: At_50mM_NH4NO3_L-to-H_P Parameter: Timepoint (hr) Value: 6
  misc_feature: MA Experiment 20001757 PARAMETER Experiment Name: At_50mM_NH4NO3_L-to-H_P Parameter: Tissue Value: Leaf
  misc_feature: MA Experiment 20001757 PARAMETER Experiment Name: At_50mM_NH4NO3_L-to-H_P Parameter: Treatment Value: 50mM NH4NO3 vs 100mM Mannitol
aacaaaaaaccctaacaaaaatggaatcgaaagcaatttgcttagggtttcttcctccaagacttcgattttcatctccacgtttaccctctcttcctccttctcctcctgtaagtgaaatttaaccatcaaaatttcatttttttccatttcgattcttccaaaaccttatcctaaaatttgtcaatatctcctgattctataggcttcttccacatttgcgacgcgtcacaaacttgattccagacaaaccctcctttggaacaaaccgcaattgagccgaggccgtgtagcgtgttcttcttctcaatctgactcaagacctgacaagaagcaatcggataagagtaactatgctcgagctgagctgttccgtgggaaatcaggttctgtttctttcaatggtctgactcatcagctggttgaagaaagtaaactggtttcagctccgtttcaagaagagaaaggttctttcttgtgggttttggctcctgttgttttgatttcttcgttgattcttcctcagttctttctaagtggtatcattgaagctaccttcaaaaacgacactgttgctgaaattgttacttctttttgctttgagacggtgttttatgctggtcttgcgatattcctgtctgtgactgaccgagtgcagaggccgtacttagacttcagctccaagagatggggtctgatcactggactgaggggataccttacgtctgcattcctcacgatgggtttaaaagttgtagttcccgtatttgctgtttacatgacttggccagctcttggaatagatgctttgattgcagtgcttcctttcttggttggctgtgcagttcaaagagttttcgagaagagtccagc

SEQ ID NO: 38784 - protein, 62 aa, Arabidopsis thaliana
  peptide (1)..(62): Ceres Seq. ID no. 12328484
MGSDHWTEGIPYVCIPHDGFKSCSSRICCLHDLASSWNRCFDCSASFLGWLCSSKSFREESS

SEQ ID NO: 38785 - protein, 44 aa, Arabidopsis thaliana
  peptide (1)..(44): Ceres Seq. ID no. 12328485
  misc_feature (1)..(42): Homolog of NCBI NO: 18424658 NR Description: putative protein
  misc_feature (1)..(42): Homolog of NCBI NO: 9758304 NR Description: emb|CAB81845.1~gene_id:MJH22.10~similar to
  misc_feature (1)..(42): Homolog of NCBI NO: 21592953 NR Description: unknown [Arabidopsis thaliana]
  misc_feature (1)..(42): Homolog of NCBI NO: 34910348 NR Description: P0684B02.8 [Oryza sativa (japonica
  misc_feature (1)..(41): Homolog of NCBI NO: 25405928 NR Description: protein T1N15.7 [imported] - Arabidopsis thaliana
  misc_feature (1)..(41): Homolog of NCBI NO: 15221197 NR Description: unknown protein; protein id: At1g48460.1
MGLKVVVPVFAVYMTWPALGIDALIAVLPFLVGCAVQRVFEKSP

SEQ ID NO: 38786 - protein, 40 aa, Arabidopsis thaliana
  peptide (1)..(40): Ceres Seq. ID no. 12328486
  misc_feature (7)..(38): Homolog of NCBI NO: 25405928 NR Description: protein T1N15.7 [imported] - Arabidopsis thaliana
  misc_feature (7)..(38): Homolog of NCBI NO: 15221197 NR Description: unknown protein; protein id: At1g48460.1
QKTLTKMESKAICLGFLPPRLRFSSPRLPSLPPSPPVSEI

SEQ ID NO: 38787 - DNA, 1316 bp, Arabidopsis thaliana
  misc_feature (1)..(1316): Ceres Seq. ID no. 12329162
  misc_feature: MA Experiment ID: 108433 Result: Down-regulated in Transcription
  misc_feature: MA Experiment 108433 PARAMETER Experiment Name: At_rhl_Mutant2_cDNA_P Parameter: Age (day) Value: 7
  misc_feature: MA Experiment 108433 PARAMETER Experiment Name: At_rhl_Mutant2_cDNA_P Parameter: Organism Value: A. thaliana
  misc_feature: MA Experiment 108433 PARAMETER Experiment Name: At_rhl_Mutant2_cDNA_P Parameter: Plant Line Value: rhl Mutant vs. wt landsburg
  misc_feature: MA Experiment 108433 PARAMETER Experiment Name: At_rhl_Mutant2_cDNA_P Parameter: Tissue Value: Roots
  misc_feature: MA Experiment ID: 108434 Result: Up-regulated in Transcription
  misc_feature: MA Experiment 108434 PARAMETER Experiment Name: At_Root_Tips_cDNA_P Parameter: Tissue Value: Root Tips
  misc_feature: MA Experiment ID: 108461 Result: Up-regulated in Transcription
  misc_feature: MA Experiment 108461 PARAMETER Experiment Name: At_Germinating_Seeds_cDNA_P Parameter: Age (day) Value: 1 vs. 0
  misc_feature: MA Experiment 108461 PARAMETER Experiment Name: At_Germinating_Seeds_cDNA_P Parameter: Tissue Value: Germinating Seeds
  misc_feature: MA Experiment ID: 108561 Result: Down-regulated in Transcription
  misc_feature: MA Experiment 108561 PARAMETER Experiment Name: At_100uM_ABA_cDNA_P Parameter: Timepoint (hr) Value: 6
  misc_feature: MA Experiment 108561 PARAMETER Experiment Name: At_100uM_ABA_cDNA_P Parameter: Tissue Value: Aerial
  misc_feature: MA Experiment 108561 PARAMETER Experiment Name: At_100uM_ABA_cDNA_P Parameter: Treatment Value: 100uM ABA vs. No Treatment
  misc_feature: MA Experiment ID: 108577 Result: Down-regulated in Transcription
  misc_feature: MA Experiment 108577 PARAMETER Experiment Name: At_42deg_Heat_cDNA_P Parameter: Temperature (deg C) Value: 42 vs. 22
  misc_feature: MA Experiment 108577 PARAMETER Experiment Name: At_42deg_Heat_cDNA_P Parameter: Timepoint (hr) Value: 6
  misc_feature: MA Experiment 108577 PARAMETER Experiment Name: At_42deg_Heat_cDNA_P Parameter: Tissue Value: Aerial
  misc_feature: MA Experiment ID: 20000069 Result: Down-regulated in Transcription
  misc_feature: MA Experiment 20000069 PARAMETER Experiment Name: At_100uM_ABA_Mutants_cDNA_P Parameter: Plant Line Value: CS23
  misc_feature: MA Experiment 20000069 PARAMETER Experiment Name: At_100uM_ABA_Mutants_cDNA_P Parameter: Timepoint (hr) Value: 6
  misc_feature: MA Experiment 20000069 PARAMETER Experiment Name: At_100uM_ABA_Mutants_cDNA_P Parameter: Tissue Value: Aerial
  misc_feature: MA Experiment 20000069 PARAMETER Experiment Name: At_100uM_ABA_Mutants_cDNA_P Parameter: Treatment Value: 100uM ABA vs. No Treatment
  misc_feature: MA Experiment ID: 20000071 Result: Down-regulated in Transcription
  misc_feature: MA Experiment 20000071 PARAMETER Experiment Name: At_100uM_ABA_Mutants_cDNA_P Parameter: Plant Line Value: CS8104
  misc_feature: MA Experiment 20000071 PARAMETER Experiment Name: At_100uM_ABA_Mutants_cDNA_P Parameter: Timepoint (hr) Value: 6
  misc_feature: MA Experiment 20000071 PARAMETER Experiment Name: At_100uM_ABA_Mutants_cDNA_P Parameter: Tissue Value: Aerial
  misc_feature: MA Experiment 20000071 PARAMETER Experiment Name: At_100uM_ABA_Mutants_cDNA_P Parameter: Treatment Value: 100uM ABA vs. No Treatment
  misc_feature: MA Experiment ID: 20000112 Result: Down-regulated in Transcription
  misc_feature: MA Experiment 20000112 PARAMETER Experiment Name: At_42deg_Heat_cDNA_P Parameter: Temperature (deg C) Value: 42 vs. 22
  misc_feature: MA Experiment 20000112 PARAMETER Experiment Name: At_42deg_Heat_cDNA_P Parameter: Timepoint (hr) Value: 2
  misc_feature: MA Experiment 20000112 PARAMETER Experiment Name: At_42deg_Heat_cDNA_P Parameter: Tissue Value: Aerial
  misc_feature: MA Experiment ID: 20000117 Result: Down-regulated in Transcription
  misc_feature: MA Experiment 20000117 PARAMETER Experiment Name: At_100uM_ABA_Mutants_cDNA_P Parameter: Plant Line Value: Columbia
  misc_feature: MA Experiment 20000117 PARAMETER Experiment Name: At_100uM_ABA_Mutants_cDNA_P Parameter: Timepoint (hr) Value: 6
  misc_feature: MA Experiment 20000117 PARAMETER Experiment Name: At_100uM_ABA_Mutants_cDNA_P Parameter: Tissue Value: Aerial
  misc_feature: MA Experiment 20000117 PARAMETER Experiment Name: At_100uM_ABA_Mutants_cDNA_P Parameter: Treatment Value: 100uM ABA vs. No Treatment
  misc_feature: MA Experiment ID: 20000144 Result: Down-regulated in Transcription
  misc_feature: MA Experiment 20000144 PARAMETER Experiment Name: At_42deg_Heat_cDNA_P Parameter: Temperature (deg C) Value: 42 vs. 22
  misc_feature: MA Experiment 20000144 PARAMETER Experiment Name: At_42deg_Heat_cDNA_P Parameter: Timepoint (hr) Value: 1
  misc_feature: MA Experiment 20000144 PARAMETER Experiment Name: At_42deg_Heat_cDNA_P Parameter: Tissue Value: Aerial
  misc_feature: MA Experiment ID: 20000180 Result: Up-regulated in Transcription
  misc_feature: MA Experiment 20000180 PARAMETER Experiment Name: At_Germinating_Seeds_P Parameter: Age (hr) Value: 24 vs. 0
  misc_feature: MA Experiment 20000180 PARAMETER Experiment Name: At_Germinating_Seeds_P Parameter: Tissue Value: Germinating Seeds
  misc_feature: MA Experiment ID: 20001911 Result: Down-regulated in Transcription
  misc_feature: MA Experiment 20001911 PARAMETER Experiment Name: At_Drought_Reproduction_P Parameter: Age (day) Value: 40
  misc_feature: MA Experiment 20001911 PARAMETER Experiment Name: At_Drought_Reproduction_P Parameter: Organism Value: A. thaliana
  misc_feature: MA Experiment 20001911 PARAMETER Experiment Name: At_Drought_Reproduction_P Parameter: Plant Line Value: WS
  misc_feature: MA Experiment 20001911 PARAMETER Experiment Name: At_Drought_Reproduction_P Parameter: Timepoint (day) Value: 10
  misc_feature: MA Experiment 20001911 PARAMETER Experiment Name: At_Drought_Reproduction_P Parameter: Tissue Value: Flowers
  misc_feature: MA Experiment 20001911 PARAMETER Experiment Name: At_Drought_Reproduction_P Parameter: Treatment Value: Drought vs. No Drought
cttgccgttccatgctccaagtaaggacctgatttctctcgttttctctttctctctctctctctctcattctctcaacgaaatctcgatctcgtcgaggaagaagaagaacccagatcagaaaacataacaacaatgtcgtcgtctgcgaagaaacaaaccctgttcatatcgacattaatcatctcatggtactcttcaaacatcggtgttcttctcctcaacaagttccttctctcgaattacggattcaaattcccgatttttctcacaatgtgtcacatgtccgcttgcgctatccttagctacatctccattgttttcctcaagcttgttcctctccaacatctcaaatctcgttctcaattccttaaggttgctactctcagcatcgtcttttgtgcttccgtcgtcggtggtaacatctcccttcgttaccttcctgtctctttcaatcaagccgtcggtgctacgacgccgtttttcacggctctgtttgcttatcttatgacctttaagagagaagcttgggttacttatggtgctctcgtccctgtcgtcgccggtgtcgtcatcgccagtgggggtgagccaggatttcactggtttgggttcataatgtgcattagtgctactgcggcaagagcctttaaatctgttcttcaaggcatcttactttcttcagagggggaaaaattgaactcaatgaatttgatgttgtatatgtctcccatagctgtcattgctcttcttcccgttacgctatttatggaaccagacgtgatcagtgtgaccttgacgcttgcaaaacaacatcagtacatgtggatacttcttctggttaactctgtcatggcttattcagccaatctgttgaattttctggttaccaaacacacaagcgccctcaccctccaggttcttggaaatgctaaaggagcagttgcagtggtgatttctatcttgatctttcaaaacccggttacggttatgggaattggcgggtactccataaccgtccttggggtggttgcttatggagagacaaaacgcagatttagatgaactctcagacattagcaagtgagacaacatagcttctctatgtttgtttcttcatctgttcaagactcatccttaggacctgaaatttttgggcatttaggagatgagaatttatcaatagtgattttttgtaactattttatacgcactttatcatgtaatatgtatttggactatgttagatttgatggtgagataatcatttttgtgtgtttcctggttgaaataccattttggttattgaacttatt

SEQ ID NO: 38788 - protein, 309 aa, Arabidopsis thaliana; identical to SEQ ID NO: 36702
  peptide (1)..(309): Ceres Seq. ID no. 12329163
  misc_feature (26)..(149): Pfam Name: Integral membrane protein DUF6 Pfam Description: Integral membrane protein DUF6
  misc_feature (6)..(302): Homolog of NCBI NO: 15219121 NR Description: glucose 6 phosphate/phosphate translocator,
  misc_feature (1)..(307): Homolog of NCBI NO: 15221371 NR Description: hypothetical protein; protein id: At1g12500.1
  misc_feature (11)..(153): Homolog of NCBI NO: 15229717 NR Description: integral membrane protein, putative; protein id:
  misc_feature (152)..(307): Homolog of NCBI NO: 15229717 NR Description: integral membrane protein, putative; protein id:
  misc_feature (11)..(307): Homolog of NCBI NO: 30681126 NR Description: phosphate translocator-related [Arabidopsis
  misc_feature (11)..(307): Homolog of NCBI NO: 9759107 NR Description: phosphate/phosphoenolpyruvate translocator
  misc_feature (11)..(307): Homolog of NCBI NO: 27476065 NR Description: Putative phosphate/phosphoenolpyruvate
  misc_feature (1)..(309): Homolog of NCBI NO: 15228248 NR Description: unknown protein; protein id: At3g10290.1
  misc_feature (1)..(309): Homolog of NCBI NO: 17064798 NR Description: phosphate/phosphoenolpyruvate translocator-like
  misc_feature (1)..(309): Homolog of NCBI NO: 15237644 NR Description: phosphate/phosphoenolpyruvate translocator - like

SEQ ID NO: 38789 - protein, 263 aa, Arabidopsis thaliana; identical to SEQ ID NO: 36703
  peptide (1)..(263): Ceres Seq. ID no. 12329164
  misc_feature (1)..(103): Pfam Name: Integral membrane protein DUF6 Pfam Description: Integral membrane protein DUF6
  misc_feature (1)..(256): Homolog of NCBI NO: 15219121 NR Description: glucose 6 phosphate/phosphate translocator,
  misc_feature (1)..(261): Homolog of NCBI NO: 15221371 NR Description: hypothetical protein; protein id: At1g12500.1
  misc_feature (1)..(107): Homolog of NCBI NO: 15229717 NR Description: integral membrane protein, putative; protein id:
  misc_feature (106)..(261): Homolog of NCBI NO: 15229717 NR Description: integral membrane protein, putative; protein id:
  misc_feature (1)..(261): Homolog of NCBI NO: 30681126 NR Description: phosphate translocator-related [Arabidopsis
  misc_feature (1)..(261): Homolog of NCBI NO: 9759107 NR Description: phosphate/phosphoenolpyruvate translocator
  misc_feature (1)..(261): Homolog of NCBI NO: 27476065 NR Description: Putative phosphate/phosphoenolpyruvate
  misc_feature (1)..(263): Homolog of NCBI NO: 15228248 NR Description: unknown protein; protein id: At3g10290.1
  misc_feature (1)..(263): Homolog of NCBI NO: 17064798 NR Description: phosphate/phosphoenolpyruvate translocator-like
  misc_feature (1)..(263): Homolog of NCBI NO: 15237644 NR Description: phosphate/phosphoenolpyruvate translocator - like

SEQ ID NO: 38790 - protein, 260 aa, Arabidopsis thaliana
  peptide (1)..(260): Ceres Seq. ID no. 12329165
  misc_feature (1)..(100): Pfam Name: Integral membrane protein DUF6 Pfam Description: Integral membrane protein DUF6
  misc_feature (1)..(253): Homolog of NCBI NO: 15219121 NR Description: glucose 6 phosphate/phosphate translocator,
  misc_feature (1)..(258): Homolog of NCBI NO: 15221371 NR Description: hypothetical protein; protein id: At1g12500.1
  misc_feature (1)..(104): Homolog of NCBI NO: 15229717 NR Description: integral membrane protein, putative; protein id:
  misc_feature (103)..(258): Homolog of NCBI NO: 15229717 NR Description: integral membrane protein, putative; protein id:
  misc_feature (1)..(258): Homolog of NCBI NO: 30681126 NR Description: phosphate translocator-related [Arabidopsis
  misc_feature (1)..(258): Homolog of NCBI NO: 9759107 NR Description: phosphate/phosphoenolpyruvate translocator
  misc_feature (1)..(258): Homolog of NCBI NO: 27476065 NR Description: Putative phosphate/phosphoenolpyruvate
  misc_feature (1)..(260): Homolog of NCBI NO: 15228248 NR Description: unknown protein; protein id: At3g10290.1
  misc_feature (1)..(260): Homolog of NCBI NO: 17064798 NR Description: phosphate/phosphoenolpyruvate translocator-like
  misc_feature (1)..(260): Homolog of NCBI NO: 15237644 NR Description: phosphate/phosphoenolpyruvate translocator - like
MSACAILSYISIVFLKLVPLQHLKSRSQFLKVATLSIVFCASVVGGNISLRYLPVSFNQAVGATTPFFTALFAYLMTFKREAWVTYGALVPVVAGVVIASGGEPGFHWFGFIMCISATAARAFKSVLQGILLSSEGEKLNSMNLMLYMSPIAVIALLPVTLFMEPDVISVTLTLAKQHQYMWILLLVNSVMAYSANLLNFLVTKHTSALTLQVLGNAKGAVAVVISILIFQNPVTVMGIGGYSITVLGVVAYGETKRRFR

SEQ ID NO: 38791 - DNA, 1016 bp, Arabidopsis thaliana
  misc_feature (1)..(1016): Ceres Seq. ID no. 13576736
  misc_feature: MA Experiment ID: 20000184 Result: Down-regulated in Transcription
  misc_feature: MA Experiment 20000184 PARAMETER Experiment Name: At_Shoots__P Parameter: Age (day) Value: 7
  misc_feature: MA Experiment 20000184 PARAMETER Experiment Name: At_Shoots__P Parameter: Tissue Value: Shoots vs. Whole Plant
  misc_feature: MA Experiment ID: 20000234 Result: Down-regulated in Transcription
  misc_feature: MA Experiment 20000234 PARAMETER Experiment Name: At_Siliques_P Parameter: Age (day) Value: 21
  misc_feature: MA Experiment 20000234 PARAMETER Experiment Name: At_Siliques_P Parameter: Organism Value: A. thaliana
  misc_feature: MA Experiment 20000234 PARAMETER Experiment Name: At_Siliques_P Parameter: Plant Line Value: WS
  misc_feature: MA Experiment 20000234 PARAMETER Experiment Name: At_Siliques_P Parameter: Tissue Value: Less Than 5mm Siliques vs. Whole Plant
  misc_feature: MA Experiment ID: 20000437 Result: Up-regulated in Transcription
  misc_feature: MA Experiment 20000437 PARAMETER Experiment Name: At_Drought_P Parameter: Age (day) Value: 8
  misc_feature: MA Experiment 20000437 PARAMETER Experiment Name: At_Drought_P Parameter: Organism Value: A. thaliana
  misc_feature: MA Experiment 20000437 PARAMETER Experiment Name: At_Drought_P Parameter: Plant Line Value: WS
  misc_feature: MA Experiment 20000437 PARAMETER Experiment Name: At_Drought_P Parameter: Timepoint (hr) Value: 24
  misc_feature: MA Experiment 20000437 PARAMETER Experiment Name: At_Drought_P Parameter: Tissue Value: Whole Plant
  misc_feature: MA Experiment 20000437 PARAMETER Experiment Name: At_Drought_P Parameter: Treatment Value: Drought vs. No Drought
  misc_feature: MA Experiment ID: 20001450 Result: Up-regulated in Transcription
  misc_feature: MA Experiment 20001450 PARAMETER Experiment Name: At_Far-red-induction_P Parameter: Age (day) Value: 7
  misc_feature: MA Experiment 20001450 PARAMETER Experiment Name: At_Far-red-induction_P Parameter: Light Value: Far-red vs. White
  misc_feature: MA Experiment 20001450 PARAMETER Experiment Name: At_Far-red-induction_P Parameter: Organism Value: A. thaliana
  misc_feature: MA Experiment 20001450 PARAMETER Experiment Name: At_Far-red-induction_P Parameter: Plant Line Value: Columbia
  misc_feature: MA Experiment 20001450 PARAMETER Experiment Name: At_Far-red-induction_P Parameter: Timepoint (hr) Value: 8
  misc_feature: MA Experiment 20001450 PARAMETER Experiment Name: At_Far-red-induction_P Parameter: Tissue Value: Whole Plant
  misc_feature: MA Experiment ID: 20001451 Result: Up-regulated in Transcription
  misc_feature: MA Experiment 20001451 PARAMETER Experiment Name: At_Far-red-induction_P Parameter: Age (day) Value: 7
  misc_feature: MA Experiment 20001451 PARAMETER Experiment Name: At_Far-red-induction_P Parameter: Light Value: Far-red vs. White
  misc_feature: MA Experiment 20001451 PARAMETER Experiment Name: At_Far-red-induction_P Parameter: Organism Value: A. thaliana
  misc_feature: MA Experiment 20001451 PARAMETER Experiment Name: At_Far-red-induction_P Parameter: Plant Line Value: Columbia
  misc_feature: MA Experiment 20001451 PARAMETER Experiment Name: At_Far-red-induction_P Parameter: Timepoint (hr) Value: 24
  misc_feature: MA Experiment 20001451 PARAMETER Experiment Name: At_Far-red-induction_P Parameter: Tissue Value: Whole Plant
  misc_feature: MA Experiment ID: 20001557 Result: Down-regulated in Transcription
  misc_feature: MA Experiment 20001557 PARAMETER Experiment Name: At_Drought_Soil_Dry_P Parameter: Age (day) Value: 27
  misc_feature: MA Experiment 20001557 PARAMETER Experiment Name: At_Drought_Soil_Dry_P Parameter: Organism Value: A. thaliana
  misc_feature: MA Experiment 20001557 PARAMETER Experiment Name: At_Drought_Soil_Dry_P Parameter: Plant Line Value: WS
  misc_feature: MA Experiment 20001557 PARAMETER Experiment Name: At_Drought_Soil_Dry_P Parameter: Post Timepoint (hr) Value: 3
  misc_feature: MA Experiment 20001557 PARAMETER Experiment Name: At_Drought_Soil_Dry_P Parameter: Post-Treatment Value: Re-Water vs. No Drought
  misc_feature: MA Experiment 20001557 PARAMETER Experiment Name: At_Drought_Soil_Dry_P Parameter: Timepoint (day) Value: 13
  misc_feature: MA Experiment 20001557 PARAMETER Experiment Name: At_Drought_Soil_Dry_P Parameter: Treatment Value: Drought vs. No Drought
  misc_feature: MA Experiment ID: 20001558 Result: Down-regulated in Transcription
  misc_feature: MA Experiment 20001558 PARAMETER Experiment Name: At_Drought_Soil_Dry_P Parameter: Age (day) Value: 27
  misc_feature: MA Experiment 20001558 PARAMETER Experiment Name: At_Drought_Soil_Dry_P Parameter: Organism Value: A. thaliana
  misc_feature: MA Experiment 20001558 PARAMETER Experiment Name: At_Drought_Soil_Dry_P Parameter: Plant Line Value: WS
  misc_feature: MA Experiment 20001558 PARAMETER Experiment Name: At_Drought_Soil_Dry_P Parameter: Post Timepoint (hr) Value: 6
  misc_feature: MA Experiment 20001558 PARAMETER Experiment Name: At_Drought_Soil_Dry_P Parameter: Post-Treatment Value: Re-Water vs. No Drought
  misc_feature: MA Experiment 20001558 PARAMETER Experiment Name: At_Drought_Soil_Dry_P Parameter: Timepoint (day) Value: 13
  misc_feature: MA Experiment 20001558 PARAMETER Experiment Name: At_Drought_Soil_Dry_P Parameter: Treatment Value: Drought vs. No Drought
caaaatagttctcaatcagttggatcatctttttattcctaaataaataaactccaaaagcatctctctgtttcttctcctctcttcaagctttttgtttcgtctcagtcgtcgtcatcatctctgacagcaaggttattcacataggcaaagaagtcattcttttgcatgctgttttccaataaagttaattctctaacagaacaagtttcgagattggatattgacgacaacgatatgggacttggaggtagtgaaacaatggaatgcaagtgtggtatgcctctgtgtatctgtgtagctcctcccaaatcaactgataaaccaaacccacctgctaccattgctcctgtggttcttcctcagttgaagtcagaggcttcagcaaaaagtaaaggttccacttccagcagcaatgctagatcagctctaaatgctggactagacaccccccaaagagactatgaagccagtggggagggattaagagaagcgattaagaatggtgacagtgctggtgcgaaaaagcttctaaaagagggcgtagatgcaaattaccgagacaggcaaggaatgtcggtgcttcatctggctgtcctgttcaaccaaactgatattgcgttgatgttgatggatcatggagcaagccttgagtacaagaatgcacaaggagaaacaccgctagattgtgccccggcaacactgcaatacaagatgcgggaaaagatgaagtccacttaacagcatgcctcagacagagctacaaatcattcctcaaatctttttcagataagggaaagatttgtaatggaaaaaatcaagggatcatgaatttgcttgtaactttagttgcattctgtgtgcaattttccatgttatgtgatctttgaaccatgtcttcttccgctatgacataaaaactcccttttgtttttatgtcatcaaaatgtgacaatgcagaaacaaataccagcattgttatcatacgaattcatttatcttacaaactttgtttt

SEQ ID NO: 38792 - protein, 190 aa, Arabidopsis thaliana
  peptide (1)..(190): Ceres Seq. ID no. 13576737
  misc_feature (134)..(166): Pfam Name: Ankyrin repeat Pfam Description: Ankyrin repeat
  misc_feature (134)..(166): Pfam Name: Ankyrin repeat Pfam Description: Ankyrin repeat
  misc_feature (88)..(172): Homolog of NCBI NO: 17230240 NR Description: hypothetical protein [Nostoc sp. PCC 7120]
  misc_feature (32)..(188): Homolog of NCBI NO: 34906752 NR Description: contains EST AU056950(S21011)~similar to
  misc_feature (24)..(104): Homolog of NCBI NO: 25407827 NR Description: hypothetical protein At2g26210 [imported] -
  misc_feature (32)..(188): Homolog of NCBI NO: 34906752 NR Description: contains EST AU056950(S21011)~similar to
  misc_feature (32)..(188): Homolog of NCBI NO: 33146872 NR Description: unknown protein [Oryza sativa (japonica
  misc_feature (1)..(190): Homolog of NCBI NO: 30683047 NR Description: expressed protein [Arabidopsis thaliana]
  misc_feature (24)..(104): Homolog of NCBI NO: 25407827 NR Description: hypothetical protein At2g26210 [imported] -
  misc_feature (88)..(172): Homolog of NCBI NO: 17230240 NR Description: hypothetical protein [Nostoc sp. PCC 7120]
  misc_feature (32)..(188): Homolog of NCBI NO: 33146872 NR Description: unknown protein [Oryza sativa (japonica
  misc_feature (1)..(190): Homolog of NCBI NO: 30683047 NR Description: expressed protein [Arabidopsis thaliana]
MLFSNKVNSLTEQVSRLDIDDNDMGLGGSETMECKCGMPLCICVAPPKSTDKPNPPATIAPVVLPQLKSEASAKSKGSTSSSNARSALNAGLDTPQRDYEASGEGLREAIKNGDSAGAKKLLKEGVDANYRDRQGMSVLHLAVLFNQTDIALMLMDHGASLEYKNAQGETPLDCAPATLQYKMREKMKST

SEQ ID NO: 38793 - protein, 167 aa, Arabidopsis thaliana
  peptide (1)..(167): Ceres Seq. ID no. 13576738
  misc_feature (111)..(143): Pfam Name: Ankyrin repeat Pfam Description: Ankyrin repeat
  misc_feature (111)..(143): Pfam Name: Ankyrin repeat Pfam Description: Ankyrin repeat
  misc_feature (65)..(149): Homolog of NCBI NO: 17230240 NR Description: hypothetical protein [Nostoc sp. PCC 7120]
  misc_feature (9)..(165): Homolog of NCBI NO: 34906752 NR Description: contains EST AU056950(S21011)~similar to
  misc_feature (1)..(81): Homolog of NCBI NO: 25407827 NR Description: hypothetical protein At2g26210 [imported] -
  misc_feature (9)..(165): Homolog of NCBI NO: 34906752 NR Description: contains EST AU056950(S21011)~similar to
  misc_feature (9)..(165): Homolog of NCBI NO: 33146872 NR Description: unknown protein [Oryza sativa (japonica
  misc_feature (1)..(167): Homolog of NCBI NO: 30683047 NR Description: expressed protein [Arabidopsis thaliana]
  misc_feature (1)..(81): Homolog of NCBI NO: 25407827 NR Description: hypothetical protein At2g26210 [imported] -
  misc_feature (65)..(149): Homolog of NCBI NO: 17230240 NR Description: hypothetical protein [Nostoc sp. PCC 7120]
  misc_feature (9)..(165): Homolog of NCBI NO: 33146872 NR Description: unknown protein [Oryza sativa (japonica
  misc_feature (1)..(167): Homolog of NCBI NO: 30683047 NR Description: expressed protein [Arabidopsis thaliana]
MGLGGSETMECKCGMPLCICVAPPKSTDKPNPPATIAPVVLPQLKSEASAKSKGSTSSSNARSALNAGLDTPQRDYEASGEGLREAIKNGDSAGAKKLLKEGVDANYRDRQGMSVLHLAVLFNQTDIALMLMDHGASLEYKNAQGETPLDCAPATLQYKMREKMKST

SEQ ID NO: 38794 - protein, 159 aa, Arabidopsis thaliana
  peptide (1)..(159): Ceres Seq. ID no. 13576739
  misc_feature (103)..(135): Pfam Name: Ankyrin repeat Pfam Description: Ankyrin repeat
  misc_feature (103)..(135): Pfam Name: Ankyrin repeat Pfam Description: Ankyrin repeat
  misc_feature (57)..(141): Homolog of NCBI NO: 17230240 NR Description: hypothetical protein [Nostoc sp. PCC 7120]
  misc_feature (1)..(157): Homolog of NCBI NO: 34906752 NR Description: contains EST AU056950(S21011)~similar to
  misc_feature (1)..(73): Homolog of NCBI NO: 25407827 NR Description: hypothetical protein At2g26210 [imported] -
  misc_feature (1)..(157): Homolog of NCBI NO: 34906752 NR Description: contains EST AU056950(S21011)~similar to
  misc_feature (1)..(157): Homolog of NCBI NO: 33146872 NR Description: unknown protein [Oryza sativa (japonica
  misc_feature (1)..(159): Homolog of NCBI NO: 30683047 NR Description: expressed protein [Arabidopsis thaliana]
  misc_feature (1)..(73): Homolog of NCBI NO: 25407827 NR Description: hypothetical protein At2g26210 [imported] -
  misc_feature (57)..(141): Homolog of NCBI NO: 17230240 NR Description: hypothetical protein [Nostoc sp. PCC 7120]
  misc_feature (1)..(157): Homolog of NCBI NO: 33146872 NR Description: unknown protein [Oryza sativa (japonica
  misc_feature (1)..(159): Homolog of NCBI NO: 30683047 NR Description: expressed protein [Arabidopsis thaliana]
MECKCGMPLCICVAPPKSTDKPNPPATIAPVVLPQLKSEASAKSKGSTSSSNARSALNAGLDTPQRDYEASGEGLREAIKNGDSAGAKKLLKEGVDANYRDRQGMSVLHLAVLFNQTDIALMLMDHGASLEYKNAQGETPLDCAPATLQYKMREKMKST

SEQ ID NO: 38795 - DNA, 641 bp, Arabidopsis thaliana
  misc_feature (1)..(641): Ceres Seq. ID no. 13576537
  misc_feature: MA Experiment ID: 20000171 Result: Up-regulated in Transcription
  misc_feature: MA Experiment 20000171 PARAMETER Experiment Name: At_42deg_Heat_P Parameter: Age (day) Value: 14
  misc_feature: MA Experiment 20000171 PARAMETER Experiment Name: At_42deg_Heat_P Parameter: Organism Value: A. thaliana
  misc_feature: MA Experiment 20000171 PARAMETER Experiment Name: At_42deg_Heat_P Parameter: Plant Line Value: WS
  misc_feature: MA Experiment 20000171 PARAMETER Experiment Name: At_42deg_Heat_P Parameter: Temperature (deg C) Value: 42 vs. 22
  misc_feature: MA Experiment 20000171 PARAMETER Experiment Name: At_42deg_Heat_P Parameter: Timepoint (hr) Value: 1
  misc_feature: MA Experiment 20000171 PARAMETER Experiment Name: At_42deg_Heat_P Parameter: Tissue Value: Aerial
  misc_feature: MA Experiment ID: 20000173 Result: Up-regulated in Transcription
  misc_feature: MA Experiment 20000173 PARAMETER Experiment Name: At_42deg_Heat_P Parameter: Age (day) Value: 14
  misc_feature: MA Experiment 20000173 PARAMETER Experiment Name: At_42deg_Heat_P Parameter: Organism Value: A. thaliana
  misc_feature: MA Experiment 20000173 PARAMETER Experiment Name: At_42deg_Heat_P Parameter: Plant Line Value: WS
  misc_feature: MA Experiment 20000173 PARAMETER Experiment Name: At_42deg_Heat_P Parameter: Temperature (deg C) Value: 42 vs. 22
  misc_feature: MA Experiment 20000173 PARAMETER Experiment Name: At_42deg_Heat_P Parameter: Timepoint (hr) Value: 6
  misc_feature: MA Experiment 20000173 PARAMETER Experiment Name: At_42deg_Heat_P Parameter: Tissue Value: Aerial
  misc_feature: MA Experiment ID: 20000794 Result: Up-regulated in Transcription
  misc_feature: MA Experiment 20000794 PARAMETER Experiment Name: At_Petals_P Parameter: Age (day) Value: 23-25 days
  misc_feature: MA Experiment 20000794 PARAMETER Experiment Name: At_Petals_P Parameter: Plant Line Value: WS
  misc_feature: MA Experiment 20000794 PARAMETER Experiment Name: At_Petals_P Parameter: Tissue Value: Petals vs. Whole plant
aatagctttttttgtattctctccatttgcttaatctcattttcgtttcaccgccgtctctctctatatcaaaatgggtcgccgtagctcaggaggaagatctgcccctcgccctcgtcctgctgctgcacgcagcccagctcctcaacctgtacaccgtgcacctcctccagctccagctcaggccagcggtggtggtggtggcatgttctcaggcattggttcaaccattgctcagggtatggcttttggtactggaagtgcagttgcacacagggctgttgattctgtgatgggtccacgaaccattcagcatgaggctgttgaggctgcttctgcatctgcagcccctgctggaagcgccatgctttctagcacctgtgacattcatgctaaggctttccaagattgcatcggcagctatggaagcgagattagcaaatgtcagttctacatggacatgttgtccgagtgcaggaagaactctggttccgtgattggtgcctagagtttccatttctcctatttgttttatcttaaagaattatccagctgtgatgatgctgagaatttggatatgatgatatgatcaaataacagtattatgtttccagaacctgaaactgcatggttgaagtctt

SEQ ID NO: 38796 - protein, 144 aa, Arabidopsis thaliana
  peptide (1)..(144): Ceres Seq. ID no. 13576538
  misc_feature (1)..(137): Homolog of NCBI NO: 23509031 NR Description: hypothetical protein, conserved [Plasmodium
  misc_feature (7)..(139): Homolog of NCBI NO: 37590390 NR Description: Unknown (protein for MGC:73308) [Danio rerio]
  misc_feature (10)..(135): Homolog of NCBI NO: 39581909 NR Description: Hypothetical protein CBG20173 [Caenorhabditis
  misc_feature (1)..(144): Homolog of NCBI NO: 15242455 NR Description: expressed protein [Arabidopsis thaliana]
  misc_feature (1)..(140): Homolog of NCBI NO: 13174237 NR Description: unknown protein [Oryza sativa]
  misc_feature (1)..(144): Homolog of NCBI NO: 15237688 NR Description: expressed protein [Arabidopsis thaliana]
MGRRSSGGRSAPRPRPAAARSPAPQPVHRAPPPAPAQASGGGGGMFSGIGSTIAQGMAFGTGSAVAHRAVDSVMGPRTIQHEAVEAASASAAPAGSAMLSSTCDIHAKAFQDCIGSYGSEISKCQFYMDMLSECRKNSGSVIGA

SEQ ID NO: 38797 - protein, 100 aa, Arabidopsis thaliana
  peptide (1)..(100): Ceres Seq. ID no. 13576539
  misc_feature (1)..(93): Homolog of NCBI NO: 23509031 NR Description: hypothetical protein, conserved [Plasmodium
  misc_feature (1)..(95): Homolog of NCBI NO: 37590390 NR Description: Unknown (protein for MGC:73308) [Danio rerio]
  misc_feature (1)..(91): Homolog of NCBI NO: 39581909 NR Description: Hypothetical protein CBG20173 [Caenorhabditis
  misc_feature (1)..(100): Homolog of NCBI NO: 15242455 NR Description: expressed protein [Arabidopsis thaliana]
  misc_feature (1)..(96): Homolog of NCBI NO: 13174237 NR Description: unknown protein [Oryza sativa]
  misc_feature (1)..(100): Homolog of NCBI NO: 15237688 NR Description: expressed protein [Arabidopsis thaliana]
MFSGIGSTIAQGMAFGTGSAVAHRAVDSVMGPRTIQHEAVEAASASAAPAGSAMLSSTCDIHAKAFQDCIGSYGSEISKCQFYMDMLSECRKNSGSVIGA

SEQ ID NO: 38798 - protein, 88 aa, Arabidopsis thaliana
  peptide (1)..(88): Ceres Seq. ID no. 13576540
  misc_feature (1)..(81): Homolog of NCBI NO: 23509031 NR Description: hypothetical protein, conserved [Plasmodium
  misc_feature (1)..(83): Homolog of NCBI NO: 37590390 NR Description: Unknown (protein for MGC:73308) [Danio rerio]
  misc_feature (1)..(79): Homolog of NCBI NO: 39581909 NR Description: Hypothetical protein CBG20173 [Caenorhabditis
  misc_feature (1)..(88): Homolog of NCBI NO: 15242455 NR Description: expressed protein [Arabidopsis thaliana]
  misc_feature (1)..(84): Homolog of NCBI NO: 13174237 NR Description: unknown protein [Oryza sativa]
  misc_feature (1)..(88): Homolog of NCBI NO: 15237688 NR Description: expressed protein [Arabidopsis thaliana]
MAFGTGSAVAHRAVDSVMGPRTIQHEAVEAASASAAPAGSAMLSSTCDIHAKAFQDCIGSYGSEISKCQFYMDMLSECRKNSGSVIGA

SEQ ID NO: 38799 - DNA, 2181 bp, Arabidopsis thaliana; identical to SEQ ID NO: 37605
  misc_feature (1)..(2181): Ceres Seq. ID no. 13646180
  misc_feature: MA Experiment ID: 108561 Result: Up-regulated in Transcription
  misc_feature: MA Experiment 108561 PARAMETER Experiment Name: At_100uM_ABA_cDNA_P Parameter: Timepoint (hr) Value: 6
  misc_feature: MA Experiment 108561 PARAMETER Experiment Name: At_100uM_ABA_cDNA_P Parameter: Tissue Value: Aerial
  misc_feature: MA Experiment 108561 PARAMETER Experiment Name: At_100uM_ABA_cDNA_P Parameter: Treatment Value: 100uM ABA vs. No Treatment
  misc_feature: MA Experiment ID: 108572 Result: Up-regulated in Transcription
  misc_feature: MA Experiment 108572 PARAMETER Experiment Name: At_Drought_cDNA_P Parameter: Timepoint (hr) Value: 1
  misc_feature: MA Experiment 108572 PARAMETER Experiment Name: At_Drought_cDNA_P Parameter: Tissue Value: Aerial
  misc_feature: MA Experiment 108572 PARAMETER Experiment Name: At_Drought_cDNA_P Parameter: Treatment Value: Drought vs. No Drought
  misc_feature: MA Experiment ID: 20000169 Result: Up-regulated in Transcription
  misc_feature: MA Experiment 20000169 PARAMETER Experiment Name: At_100uM_ABA_P Parameter: Age (day) Value: 14
  misc_feature: MA Experiment 20000169 PARAMETER Experiment Name: At_100uM_ABA_P Parameter: Organism Value: A. thaliana
  misc_feature: MA Experiment 20000169 PARAMETER Experiment Name: At_100uM_ABA_P Parameter: Plant Line Value: WS
  misc_feature: MA Experiment 20000169 PARAMETER Experiment Name: At_100uM_ABA_P Parameter: Timepoint (hr) Value: 6
  misc_feature: MA Experiment 20000169 PARAMETER Experiment Name: At_100uM_ABA_P Parameter: Tissue Value: Aerial
  misc_feature: MA Experiment 20000169 PARAMETER Experiment Name: At_100uM_ABA_P Parameter: Treatment Value: 100uM ABA vs. No Treatment
  misc_feature: MA Experiment ID: 20000180 Result: Up-regulated in Transcription
  misc_feature: MA Experiment 20000180 PARAMETER Experiment Name: At_Germinating_Seeds_P Parameter: Age (hr) Value: 24 vs. 0
  misc_feature: MA Experiment 20000180 PARAMETER Experiment Name: At_Germinating_Seeds_P Parameter: Tissue Value: Germinating Seeds
  misc_feature: MA Experiment ID: 20000185 Result: Down-regulated in Transcription
  misc_feature: MA Experiment 20000185 PARAMETER Experiment Name: At_Roots__P Parameter: Age (day) Value: 7 vs. 21
  misc_feature: MA Experiment 20000185 PARAMETER Experiment Name: At_Roots__P Parameter: Organism Value: A. thaliana
  misc_feature: MA Experiment 20000185 PARAMETER Experiment Name: At_Roots__P Parameter: Tissue Value: Roots vs. Whole Plant
  misc_feature: MA Experiment ID: 20000439 Result: Down-regulated in Transcription
  misc_feature: MA Experiment 20000439 PARAMETER Experiment Name: At_Roots__P Parameter: Age (day) Value: 14 vs. 21
  misc_feature: MA Experiment 20000439 PARAMETER Experiment Name: At_Roots__P Parameter: Organism Value: A. thaliana
  misc_feature: MA Experiment 20000439 PARAMETER Experiment Name: At_Roots__P Parameter: Tissue Value: Roots vs. Whole Plant
  misc_feature: MA Experiment ID: 20000794 Result: Up-regulated in Transcription
  misc_feature: MA Experiment 20000794 PARAMETER Experiment Name: At_Petals_P Parameter: Age (day) Value: 23-25 days
  misc_feature: MA Experiment 20000794 PARAMETER Experiment Name: At_Petals_P Parameter: Plant Line Value: WS
  misc_feature: MA Experiment 20000794 PARAMETER Experiment Name: At_Petals_P Parameter: Tissue Value: Petals vs. Whole plant
  misc_feature: MA Experiment ID: 20001554 Result: Up-regulated in Transcription
  misc_feature: MA Experiment 20001554 PARAMETER Experiment Name: At_Drought_Soil_Dry_P Parameter: Age (day) Value: 21
  misc_feature: MA Experiment 20001554 PARAMETER Experiment Name: At_Drought_Soil_Dry_P Parameter: Organism Value: A. thaliana
  misc_feature: MA Experiment 20001554 PARAMETER Experiment Name: At_Drought_Soil_Dry_P Parameter: Plant Line Value: WS
  misc_feature: MA Experiment 20001554 PARAMETER Experiment Name: At_Drought_Soil_Dry_P Parameter: Post Timepoint (hr) Value: None
  misc_feature: MA Experiment 20001554 PARAMETER Experiment Name: At_Drought_Soil_Dry_P Parameter: Post-Treatment Value: None
  misc_feature: MA Experiment 20001554 PARAMETER Experiment Name: At_Drought_Soil_Dry_P Parameter: Timepoint (day) Value: 7
  misc_feature: MA Experiment 20001554 PARAMETER Experiment Name: At_Drought_Soil_Dry_P Parameter: Treatment Value: Drought vs. No Drought

SEQ ID NO: 38800 - protein, 497 aa, Arabidopsis thaliana; identical to SEQ ID NO: 23374
  peptide (1)..(497): Ceres Seq. ID no. 13646181
  misc_feature (330)..(470): Pfam Name: Chalcone and stilbene synthases, C-terminal domain Pfam Description: Chalcone and stilbene synthases, C-terminal
  misc_feature (330)..(470): Pfam Name: Chalcone and stilbene synthases, C-terminal domain Pfam Description: Chalcone and stilbene synthases, C-terminal
  misc_feature (330)..(470): Pfam Name: Chalcone and stilbene synthases, C-terminal domain Pfam Description: Chalcone and stilbene synthases, C-terminal
  misc_feature (6)..(492): Homolog of NCBI NO: 29417540 NR Description: beta-ketoacyl-CoA-synthase [Marchantia polymorpha]
  misc_feature (6)..(489): Homolog of NCBI NO: 15223556 NR Description: very-long-chain fatty acid condensing enzyme
  misc_feature (6)..(489): Homolog of NCBI NO: 15226724 NR Description: very-long-chain fatty acid condensing enzyme
  misc_feature (1)..(349): Homolog of NCBI NO: 30697701 NR Description: very-long-chain fatty acid condensing enzyme
  misc_feature (6)..(497): Homolog of NCBI NO: 28393607 NR Description: putative fatty acid condensing enzyme CUT1
  misc_feature (6)..(492): Homolog of NCBI NO: 29417540 NR Description: beta-ketoacyl-CoA-synthase [Marchantia polymorpha]
  misc_feature (6)..(489): Homolog of NCBI NO: 15226724 NR Description: very-long-chain fatty acid condensing enzyme
  misc_feature (6)..(497): Homolog of NCBI NO: 28393607 NR Description: putative fatty acid condensing enzyme CUT1
  misc_feature (1)..(349): Homolog of NCBI NO: 30697701 NR Description: very-long-chain fatty acid condensing enzyme
  misc_feature (6)..(489): Homolog of NCBI NO: 15226724 NR Description: very-long-chain fatty acid condensing enzyme
  misc_feature (6)..(489): Homolog of NCBI NO: 15223556 NR Description: very-long-chain fatty acid condensing enzyme
  misc_feature (6)..(492): Homolog of NCBI NO: 29417540 NR Description: beta-ketoacyl-CoA-synthase [Marchantia polymorpha]
  misc_feature (1)..(497): Homolog of NCBI NO: 15221431 NR Description: very-long-chain fatty acid condensing enzyme
  misc_feature (1)..(497): Homolog of NCBI NO: 17979464 NR Description: At1g68530/T26J14_10 [Arabidopsis thaliana]
  misc_feature (6)..(497): Homolog of NCBI NO: 21593111 NR Description: very-long-chain fatty acid condensing enzyme CUT1
  misc_feature (6)..(497): Homolog of NCBI NO: 15222592 NR Description: very-long-chain fatty acid condensing enzyme
  misc_feature (6)..(497): Homolog of NCBI NO: 21618184 NR Description: fatty acid condensing enzyme CUT1, putative
  misc_feature (1)..(497): Homolog of NCBI NO: 15221431 NR Description: very-long-chain fatty acid condensing enzyme
  misc_feature (1)..(497): Homolog of NCBI NO: 17979464 NR Description: At1g68530/T26J14_10 [Arabidopsis thaliana]
  misc_feature (6)..(497): Homolog of NCBI NO: 21593111 NR Description: very-long-chain fatty acid condensing enzyme CUT1
  misc_feature (6)..(497): Homolog of NCBI NO: 15222592 NR Description: very-long-chain fatty acid condensing enzyme
  misc_feature (6)..(497): Homolog of NCBI NO: 21618184 NR Description: fatty acid condensing enzyme CUT1, putative
  misc_feature (6)..(497): Homolog of NCBI NO: 28393607 NR Description: putative fatty acid condensing enzyme CUT1
  misc_feature (1)..(349): Homolog of NCBI NO: 30697701 NR Description: very-long-chain fatty acid condensing enzyme
  misc_feature (6)..(489): Homolog of NCBI NO: 15223556 NR Description: very-long-chain fatty acid condensing enzyme
  misc_feature (6)..(497): Homolog of NCBI NO: 21618184 NR Description: fatty acid condensing enzyme CUT1, putative
  misc_feature (6)..(497): Homolog of NCBI NO: 15222592 NR Description: very-long-chain fatty acid condensing enzyme
  misc_feature (6)..(497): Homolog of NCBI NO: 21593111 NR Description: very-long-chain fatty acid condensing enzyme CUT1
  misc_feature (1)..(497): Homolog of NCBI NO: 17979464 NR Description: At1g68530/T26J14_10 [Arabidopsis thaliana]
  misc_feature (1)..(497): Homolog of NCBI NO: 15221431 NR Description: very-long-chain fatty acid condensing enzyme

SEQ ID NO: 38801 - protein, 492 aa, Arabidopsis thaliana; identical to SEQ ID NO: 23375
  peptide (1)..(492): Ceres Seq. ID no. 13646182
  misc_feature (325)..(465): Pfam Name: Chalcone and stilbene synthases, C-terminal domain Pfam Description: Chalcone and stilbene synthases, C-terminal
  misc_feature (325)..(465): Pfam Name: Chalcone and stilbene synthases, C-terminal domain Pfam Description: Chalcone and stilbene synthases, C-terminal
  misc_feature (325)..(465): Pfam Name: Chalcone and stilbene synthases, C-terminal domain Pfam Description: Chalcone and stilbene synthases, C-terminal
  misc_feature (1)..(487): Homolog of NCBI NO: 29417540 NR Description: beta-ketoacyl-CoA-synthase [Marchantia polymorpha]
  misc_feature (1)..(484): Homolog of NCBI NO: 15223556 NR Description: very-long-chain fatty acid condensing enzyme
  misc_feature (1)..(484): Homolog of NCBI NO: 15226724 NR Description: very-long-chain fatty acid condensing enzyme
  misc_feature (1)..(344): Homolog of NCBI NO: 30697701 NR Description: very-long-chain fatty acid condensing enzyme
  misc_feature (1)..(492): Homolog of NCBI NO: 28393607 NR Description: putative fatty acid condensing enzyme CUT1
  misc_feature (1)..(487): Homolog of NCBI NO: 29417540 NR Description: beta-ketoacyl-CoA-synthase [Marchantia polymorpha]
  misc_feature (1)..(484): Homolog of NCBI NO: 15226724 NR Description: very-long-chain fatty acid condensing enzyme
  misc_feature (1)..(492): Homolog of NCBI NO: 28393607 NR Description: putative fatty acid condensing enzyme CUT1
  misc_feature (1)..(344): Homolog of NCBI NO: 30697701 NR Description: very-long-chain fatty acid condensing enzyme
  misc_feature (1)..(484): Homolog of NCBI NO: 15226724 NR Description: very-long-chain fatty acid condensing enzyme
  misc_feature (1)..(484): Homolog of NCBI NO: 15223556 NR Description: very-long-chain fatty acid condensing enzyme
  misc_feature (1)..(487): Homolog of NCBI NO: 29417540 NR Description: beta-ketoacyl-CoA-synthase [Marchantia polymorpha]
  misc_feature (1)..(492): Homolog of NCBI NO: 15221431 NR Description: very-long-chain fatty acid condensing enzyme
  misc_feature (1)..(492): Homolog of NCBI NO: 17979464 NR Description: At1g68530/T26J14_10 [Arabidopsis thaliana]
  misc_feature (1)..(492): Homolog of NCBI NO: 21593111 NR Description: very-long-chain fatty acid condensing enzyme CUT1
  misc_feature (1)..(492): Homolog of NCBI NO: 15222592 NR Description: very-long-chain fatty acid condensing enzyme
  misc_feature (1)..(492): Homolog of NCBI NO: 21618184 NR Description: fatty acid condensing enzyme CUT1, putative
  misc_feature (1)..(492): Homolog of NCBI NO: 15221431 NR Description: very-long-chain fatty acid condensing enzyme
  misc_feature (1)..(492): Homolog of NCBI NO: 17979464 NR Description: At1g68530/T26J14_10 [Arabidopsis thaliana]
  misc_feature (1)..(492): Homolog of NCBI NO: 21593111 NR Description: very-long-chain fatty acid condensing enzyme CUT1
  misc_feature (1)..(492): Homolog of NCBI NO: 15222592 NR Description: very-long-chain fatty acid condensing enzyme
  misc_feature (1)..(492): Homolog of NCBI NO: 21618184 NR Description: fatty acid condensing enzyme CUT1, putative
  misc_feature (1)..(492): Homolog of NCBI NO: 28393607 NR Description: putative fatty acid condensing enzyme CUT1
  misc_feature (1)..(344): Homolog of NCBI NO: 30697701 NR Description: very-long-chain fatty acid condensing enzyme
  misc_feature (1)..(484): Homolog of NCBI NO: 15223556 NR Description: very-long-chain fatty acid condensing enzyme
  misc_feature (1)..(492): Homolog of NCBI NO: 21618184 NR Description: fatty acid condensing enzyme CUT1, putative
  misc_feature (1)..(492): Homolog of NCBI NO: 15222592 NR Description: very-long-chain fatty acid condensing enzyme
  misc_feature (1)..(492): Homolog of NCBI NO: 21593111 NR Description: very-long-chain fatty acid condensing enzyme CUT1
  misc_feature (1)..(492): Homolog of NCBI NO: 17979464 NR Description: At1g68530/T26J14_10 [Arabidopsis thaliana]
  misc_feature (1)..(492): Homolog of NCBI NO: 15221431 NR Description: very-long-chain fatty acid condensing enzyme

SEQ ID NO: 38802 - protein, 460 aa, Arabidopsis thaliana; identical to SEQ ID NO: 23376
  peptide (1)..(460): Ceres Seq. ID no. 13646183
  misc_feature (293)..(433): Pfam Name: Chalcone and stilbene synthases, C-terminal domain Pfam Description: Chalcone and stilbene synthases, C-terminal
  misc_feature (293)..(433): Pfam Name: Chalcone and stilbene synthases, C-terminal domain Pfam Description: Chalcone and stilbene synthases, C-terminal
  misc_feature (293)..(433): Pfam Name: Chalcone and stilbene synthases, C-terminal domain Pfam Description: Chalcone and stilbene synthases, C-terminal
  misc_feature (1)..(455): Homolog of NCBI NO: 29417540 NR Description: beta-ketoacyl-CoA-synthase [Marchantia polymorpha]
  misc_feature (1)..(452): Homolog of NCBI NO: 15223556 NR Description: very-long-chain fatty acid condensing enzyme
  misc_feature (1)..(452): Homolog of NCBI NO: 15226724 NR Description: very-long-chain fatty acid condensing enzyme
  misc_feature (1)..(312): Homolog of NCBI NO: 30697701 NR Description: very-long-chain fatty acid condensing enzyme
  misc_feature (1)..(460): Homolog of NCBI NO: 28393607 NR Description: putative fatty acid condensing enzyme CUT1
  misc_feature (1)..(455): Homolog of NCBI NO: 29417540 NR Description: beta-ketoacyl-CoA-synthase [Marchantia polymorpha]
  misc_feature (1)..(452): Homolog of NCBI NO: 15226724 NR Description: very-long-chain fatty acid condensing enzyme
  misc_feature (1)..(460): Homolog of NCBI NO: 28393607 NR Description: putative fatty acid condensing enzyme CUT1
  misc_feature (1)..(312): Homolog of NCBI NO: 30697701 NR Description: very-long-chain fatty acid condensing enzyme
  misc_feature (1)..(452): Homolog of NCBI NO: 15226724 NR Description: very-long-chain fatty acid condensing enzyme
  misc_feature (1)..(452): Homolog of NCBI NO: 15223556 NR Description: very-long-chain fatty acid condensing enzyme
  misc_feature (1)..(455): Homolog of NCBI NO: 29417540 NR Description: beta-ketoacyl-CoA-synthase [Marchantia polymorpha]
  misc_feature (1)..(460): Homolog of NCBI NO: 15221431 NR Description: very-long-chain fatty acid condensing enzyme
  misc_feature (1)..(460): Homolog of NCBI NO: 17979464 NR Description: At1g68530/T26J14_10 [Arabidopsis thaliana]
  misc_feature (1)..(460): Homolog of NCBI NO: 21593111 NR Description: very-long-chain fatty acid condensing enzyme CUT1
  misc_feature (1)..(460): Homolog of NCBI NO: 15222592 NR Description: very-long-chain fatty acid condensing enzyme
  misc_feature (1)..(460): Homolog of NCBI NO: 21618184 NR Description: fatty acid condensing enzyme CUT1, putative
  misc_feature (1)..(460): Homolog of NCBI NO: 15221431 NR Description: very-long-chain fatty acid condensing enzyme
  misc_feature (1)..(460): Homolog of NCBI NO: 17979464 NR Description: At1g68530/T26J14_10 [Arabidopsis thaliana]
  misc_feature (1)..(460): Homolog of NCBI NO: 21593111 NR Description: very-long-chain fatty acid condensing enzyme CUT1
  misc_feature (1)..(460): Homolog of NCBI NO: 15222592 NR Description: very-long-chain fatty acid condensing enzyme
  misc_feature (1)..(460): Homolog of NCBI NO: 21618184 NR Description: fatty acid condensing enzyme CUT1, putative
  misc_feature (1)..(460): Homolog of NCBI NO: 28393607 NR Description: putative fatty acid condensing enzyme CUT1
  misc_feature (1)..(312): Homolog of NCBI NO: 30697701 NR Description: very-long-chain fatty acid condensing enzyme
  misc_feature (1)..(452): Homolog of NCBI NO: 15223556 NR Description: very-long-chain fatty acid condensing enzyme
  misc_feature (1)..(460): Homolog of NCBI NO: 21618184 NR Description: fatty acid condensing enzyme CUT1, putative
  misc_feature (1)..(460): Homolog of NCBI NO: 15222592 NR Description: very-long-chain fatty acid condensing enzyme
  misc_feature (1)..(460): Homolog of NCBI NO: 21593111 NR Description: very-long-chain fatty acid condensing enzyme CUT1
  misc_feature (1)..(460): Homolog of NCBI NO: 17979464 NR Description: At1g68530/T26J14_10 [Arabidopsis thaliana]
  misc_feature (1)..(460): Homolog of NCBI NO: 15221431 NR Description: very-long-chain fatty acid condensing enzyme

SEQ ID NO: 38803 - DNA, 1807 bp, Arabidopsis thaliana
  misc_feature (1)..(1807): Ceres Seq. ID no. 13489575
  misc_feature: MA Experiment ID: 108569 Result: Up-regulated in Transcription
  misc_feature: MA Experiment 108569 PARAMETER Experiment Name: At_0.001%_MeJA__cDNA_P Parameter: Timepoint (hr) Value: 6
  misc_feature: MA Experiment 108569 PARAMETER Experiment Name: At_0.001%_MeJA__cDNA_P Parameter: Tissue Value: Aerial
  misc_feature: MA Experiment 108569 PARAMETER Experiment Name: At_0.001%_MeJA__cDNA_P Parameter: Treatment Value: 0.001% MeJA vs. No Treatment
  misc_feature: MA Experiment ID: 108573 Result: Up-regulated in Transcription
  misc_feature: MA Experiment 108573 PARAMETER Experiment Name: At_Drought_cDNA_P Parameter: Timepoint (hr) Value: 6
  misc_feature: MA Experiment 108573 PARAMETER Experiment Name: At_Drought_cDNA_P Parameter: Tissue Value: Aerial
  misc_feature: MA Experiment 108573 PARAMETER Experiment Name: At_Drought_cDNA_P Parameter: Treatment Value: Drought vs. No Drought
  misc_feature: MA Experiment ID: 108576 Result: Down-regulated in Transcription
  misc_feature: MA Experiment 108576 PARAMETER Experiment Name: At_42deg_Heat_cDNA_P Parameter: Temperature (deg C) Value: 42 vs. 22
  misc_feature: MA Experiment 108576 PARAMETER Experiment Name: At_42deg_Heat_cDNA_P Parameter: Timepoint (hr) Value: 1
  misc_feature: MA Experiment 108576 PARAMETER Experiment Name: At_42deg_Heat_cDNA_P Parameter: Tissue Value: Aerial
  misc_feature: MA Experiment ID: 108577 Result: Down-regulated in Transcription
  misc_feature: MA Experiment 108577 PARAMETER Experiment Name: At_42deg_Heat_cDNA_P Parameter: Temperature (deg C) Value: 42 vs. 22
  misc_feature: MA Experiment 108577 PARAMETER Experiment Name: At_42deg_Heat_cDNA_P Parameter: Timepoint (hr) Value: 6
  misc_feature: MA Experiment 108577 PARAMETER Experiment Name: At_42deg_Heat_cDNA_P Parameter: Tissue Value: Aerial
  misc_feature: MA Experiment ID: 108595 Result: Down-regulated in Transcription
  misc_feature: MA Experiment 108595 PARAMETER Experiment Name: At_Ler-pi_Ovule_cDNA_P Parameter: Plant Line Value: null
  misc_feature: MA Experiment ID: 20000087 Result: Down-regulated in Transcription
  misc_feature: MA Experiment 20000087 PARAMETER Experiment Name: At_100uM_ABA_Mutants_cDNA_P Parameter: Plant Line Value: WS
  misc_feature: MA Experiment 20000087 PARAMETER Experiment Name: At_100uM_ABA_Mutants_cDNA_P Parameter: Timepoint (hr) Value: 6
  misc_feature: MA Experiment 20000087 PARAMETER Experiment Name: At_100uM_ABA_Mutants_cDNA_P Parameter: Tissue Value: Aerial
  misc_feature: MA Experiment 20000087 PARAMETER Experiment Name: At_100uM_ABA_Mutants_cDNA_P Parameter: Treatment Value: 100uM ABA vs. No Treatment
  misc_feature: MA Experiment ID: 20000093 Result: Down-regulated in Transcription
  misc_feature: MA Experiment 20000093 PARAMETER Experiment Name: At_42deg_Heat_cDNA_P Parameter: Temperature (deg C) Value: 42 vs. 22
  misc_feature: MA Experiment 20000093 PARAMETER Experiment Name: At_42deg_Heat_cDNA_P Parameter: Timepoint (hr) Value: 0.5
  misc_feature: MA Experiment 20000093 PARAMETER Experiment Name: At_42deg_Heat_cDNA_P Parameter: Tissue Value: Aerial
  misc_feature: MA Experiment ID: 20000111 Result: Down-regulated in Transcription
  misc_feature: MA Experiment 20000111 PARAMETER Experiment Name: At_42deg_Heat_cDNA_P Parameter: Temperature (deg C) Value: 42 vs. 22
  misc_feature: MA Experiment 20000111 PARAMETER Experiment Name: At_42deg_Heat_cDNA_P Parameter: Timepoint (hr) Value: 6
  misc_feature: MA Experiment 20000111 PARAMETER Experiment Name: At_42deg_Heat_cDNA_P Parameter: Tissue Value: Aerial
  misc_feature: MA Experiment ID: 20000112 Result: Down-regulated in Transcription
  misc_feature: MA Experiment 20000112 PARAMETER Experiment Name: At_42deg_Heat_cDNA_P Parameter: Temperature (deg C) Value: 42 vs. 22
  misc_feature: MA Experiment 20000112 PARAMETER Experiment Name: At_42deg_Heat_cDNA_P Parameter: Timepoint (hr) Value: 2
  misc_feature: MA Experiment 20000112 PARAMETER Experiment Name: At_42deg_Heat_cDNA_P Parameter: Tissue Value: Aerial
  misc_feature: MA Experiment ID: 20000113 Result: Down-regulated in Transcription
  misc_feature: MA Experiment 20000113 PARAMETER Experiment Name: At_42deg_Heat_cDNA_P Parameter: Temperature (deg C) Value: 42 vs. 22
  misc_feature: MA Experiment 20000113 PARAMETER Experiment Name: At_42deg_Heat_cDNA_P Parameter: Timepoint (hr) Value: 8
  misc_feature: MA Experiment 20000113 PARAMETER Experiment Name: At_42deg_Heat_cDNA_P Parameter: Tissue Value: Aerial
  misc_feature: MA Experiment ID: 20000117 Result: Down-regulated in Transcription
  misc_feature: MA Experiment 20000117 PARAMETER Experiment Name: At_100uM_ABA_Mutants_cDNA_P Parameter: Plant Line Value: Columbia
  misc_feature: MA Experiment 20000117 PARAMETER Experiment Name: At_100uM_ABA_Mutants_cDNA_P Parameter: Timepoint (hr) Value: 6
  misc_feature: MA Experiment 20000117 PARAMETER Experiment Name: At_100uM_ABA_Mutants_cDNA_P Parameter: Tissue Value: Aerial
  misc_feature: MA Experiment 20000117 PARAMETER Experiment Name: At_100uM_ABA_Mutants_cDNA_P Parameter: Treatment Value: 100uM ABA vs. No Treatment
  misc_feature: MA Experiment ID: 20000144 Result: Down-regulated in Transcription
  misc_feature: MA Experiment 20000144 PARAMETER Experiment Name: At_42deg_Heat_cDNA_P Parameter: Temperature (deg C) Value: 42 vs. 22
  misc_feature: MA Experiment 20000144 PARAMETER Experiment Name: At_42deg_Heat_cDNA_P Parameter: Timepoint (hr) Value: 1
  misc_feature: MA Experiment 20000144 PARAMETER Experiment Name: At_42deg_Heat_cDNA_P Parameter: Tissue Value: Aerial
  misc_feature: MA Experiment ID: 20000180 Result: Up-regulated in Transcription
  misc_feature: MA Experiment 20000180 PARAMETER Experiment Name: At_Germinating_Seeds_P Parameter: Age (hr) Value: 24 vs. 0
  misc_feature: MA Experiment 20000180 PARAMETER Experiment Name: At_Germinating_Seeds_P Parameter: Tissue Value: Germinating Seeds
  misc_feature: MA Experiment ID: 20000185 Result: Down-regulated in Transcription
  misc_feature: MA Experiment 20000185 PARAMETER Experiment Name: At_Roots__P Parameter: Age (day) Value: 7 vs. 21
  misc_feature: MA Experiment 20000185 PARAMETER Experiment Name: At_Roots__P Parameter: Organism Value: A. thaliana
  misc_feature: MA Experiment 20000185 PARAMETER Experiment Name: At_Roots__P Parameter: Tissue Value: Roots vs. Whole Plant
  misc_feature: MA Experiment ID: 20000439 Result: Down-regulated in Transcription
  misc_feature: MA Experiment 20000439 PARAMETER Experiment Name: At_Roots__P Parameter: Age (day) Value: 14 vs. 21
  misc_feature: MA Experiment 20000439 PARAMETER Experiment Name: At_Roots__P Parameter: Organism Value: A. thaliana
  misc_feature: MA Experiment 20000439 PARAMETER Experiment Name: At_Roots__P Parameter: Tissue Value: Roots vs. Whole Plant
  misc_feature: MA Experiment ID: 20001248 Result: Down-regulated in Transcription
  misc_feature: MA Experiment 20001248 PARAMETER Experiment Name: At_Far-red-induction_P Parameter: Age (day) Value: 7
  misc_feature: MA Experiment 20001248 PARAMETER Experiment Name: At_Far-red-induction_P Parameter: Light Value: Far-red vs. White
  misc_feature: MA Experiment 20001248 PARAMETER Experiment Name: At_Far-red-induction_P Parameter: Organism Value: A. thaliana
  misc_feature: MA Experiment 20001248 PARAMETER Experiment Name: At_Far-red-induction_P Parameter: Plant Line Value: Columbia
  misc_feature: MA Experiment 20001248 PARAMETER Experiment Name: At_Far-red-induction_P Parameter: Timepoint (hr) Value: 4
  misc_feature: MA Experiment 20001248 PARAMETER Experiment Name: At_Far-red-induction_P Parameter: Tissue Value: Whole Plant
  misc_feature: MA Experiment ID: 20001555 Result: Down-regulated in Transcription
  misc_feature: MA Experiment 20001555 PARAMETER Experiment Name: At_Drought_Soil_Dry_P Parameter: Age (day) Value: 24
  misc_feature: MA Experiment 20001555 PARAMETER Experiment Name: At_Drought_Soil_Dry_P Parameter: Organism Value: A. thaliana
  misc_feature: MA Experiment 20001555 PARAMETER Experiment Name: At_Drought_Soil_Dry_P Parameter: Plant Line Value: WS
  misc_feature: MA Experiment 20001555 PARAMETER Experiment Name: At_Drought_Soil_Dry_P Parameter: Post Timepoint (hr) Value: None
  misc_feature: MA Experiment 20001555 PARAMETER Experiment Name: At_Drought_Soil_Dry_P Parameter: Post-Treatment Value: None
  misc_feature: MA Experiment 20001555 PARAMETER Experiment Name: At_Drought_Soil_Dry_P Parameter: Timepoint (day) Value: 10
  misc_feature: MA Experiment 20001555 PARAMETER Experiment Name: At_Drought_Soil_Dry_P Parameter: Treatment Value: Drought vs. No Drought
  misc_feature: MA Experiment ID: 20001757 Result: Up-regulated in Transcription
  misc_feature: MA Experiment 20001757 PARAMETER Experiment Name: At_50mM_NH4NO3_L-to-H_P Parameter: Timepoint (hr) Value: 6
  misc_feature: MA Experiment 20001757 PARAMETER Experiment Name: At_50mM_NH4NO3_L-to-H_P Parameter: Tissue Value: Leaf
  misc_feature: MA Experiment 20001757 PARAMETER Experiment Name: At_50mM_NH4NO3_L-to-H_P Parameter: Treatment Value: 50mM NH4NO3 vs 100mM Mannitol
  misc_feature: MA Experiment ID: 20001904 Result: Down-regulated in Transcription
  misc_feature: MA Experiment 20001904 PARAMETER Experiment Name: At_Drought_Reproduction_P Parameter: Age (day) Value: 37
  misc_feature: MA Experiment 20001904 PARAMETER Experiment Name: At_Drought_Reproduction_P Parameter: Organism Value: A. thaliana
  misc_feature: MA Experiment 20001904 PARAMETER Experiment Name: At_Drought_Reproduction_P Parameter: Plant Line Value: WS
  misc_feature: MA Experiment 20001904 PARAMETER Experiment Name: At_Drought_Reproduction_P Parameter: Timepoint (day) Value: 7
  misc_feature: MA Experiment 20001904 PARAMETER Experiment Name: At_Drought_Reproduction_P Parameter: Tissue Value: Rosettes
  misc_feature: MA Experiment 20001904 PARAMETER Experiment Name: At_Drought_Reproduction_P Parameter: Treatment Value: Drought vs. No Drought
  misc_feature: MA Experiment ID: 20001905 Result: Down-regulated in Transcription
  misc_feature: MA Experiment 20001905 PARAMETER Experiment Name: At_Drought_Reproduction_P Parameter: Age (day) Value: 40
  misc_feature: MA Experiment 20001905 PARAMETER Experiment Name: At_Drought_Reproduction_P Parameter: Organism Value: A. thaliana
  misc_feature: MA Experiment 20001905 PARAMETER Experiment Name: At_Drought_Reproduction_P Parameter: Plant Line Value: WS
  misc_feature: MA Experiment 20001905 PARAMETER Experiment Name: At_Drought_Reproduction_P Parameter: Timepoint (day) Value: 10
  misc_feature: MA Experiment 20001905 PARAMETER Experiment Name: At_Drought_Reproduction_P Parameter: Tissue Value: Rosettes
  misc_feature: MA Experiment 20001905 PARAMETER Experiment Name: At_Drought_Reproduction_P Parameter: Treatment Value: Drought vs. No Drought
  misc_feature: MA Experiment ID: 20001908 Result: Down-regulated in Transcription
  misc_feature: MA Experiment 20001908 PARAMETER Experiment Name: At_Drought_Reproduction_P Parameter: Age (day) Value: 40
  misc_feature: MA Experiment 20001908 PARAMETER Experiment Name: At_Drought_Reproduction_P Parameter: Organism Value: A. thaliana
  misc_feature: MA Experiment 20001908 PARAMETER Experiment Name: At_Drought_Reproduction_P Parameter: Plant Line Value: WS
  misc_feature: MA Experiment 20001908 PARAMETER Experiment Name: At_Drought_Reproduction_P Parameter: Timepoint (day) Value: 10
  misc_feature: MA Experiment 20001908 PARAMETER Experiment Name: At_Drought_Reproduction_P Parameter: Tissue Value: Siliques
  misc_feature: MA Experiment 20001908 PARAMETER Experiment Name: At_Drought_Reproduction_P Parameter: Treatment Value: Drought vs. No Drought
  misc_feature: MA Experiment ID: 20001911 Result: Down-regulated in Transcription
  misc_feature: MA Experiment 20001911 PARAMETER Experiment Name: At_Drought_Reproduction_P Parameter: Age (day) Value: 40
  misc_feature: MA Experiment 20001911 PARAMETER Experiment Name: At_Drought_Reproduction_P Parameter: Organism Value: A. thaliana
  misc_feature: MA Experiment 20001911 PARAMETER Experiment Name: At_Drought_Reproduction_P Parameter: Plant Line Value: WS
  misc_feature: MA Experiment 20001911 PARAMETER Experiment Name: At_Drought_Reproduction_P Parameter: Timepoint (day) Value: 10
  misc_feature: MA Experiment 20001911 PARAMETER Experiment Name: At_Drought_Reproduction_P Parameter: Tissue Value: Flowers
  misc_feature: MA Experiment 20001911 PARAMETER Experiment Name: At_Drought_Reproduction_P Parameter: Treatment Value: Drought vs. No Drought
gatatcatcaaaaaccacaaaactttcttttctttttctaactattttatttattattcctacaaaatgtcatgtttgaagtatttcttgatcttattgatgttgggactgtgtgtctcatcggaggagaattttcaatatgactacttgaaagttccggcaagcgagtttgtgagctccataaacacaattgtggtagtgataagacaagtgagttcaattttgtctcagttcgctgatttcagcggagatcgccggctgcagaatgcggtttccgattgccttgatctgcttgacttttcttcagaggagctcacttggtctgcttctgcttctgagaatccaaaaggtaagggcaacggaacaggggacgttggatcggacacaaggacatggttaagtgctgctctctccaaccaagccacttgtatggaaggcttcgatggtacctctggtctcgtaaaatcccttgtcgctggcagtctcgatcaactatattctatgcttagggaattgttaccacttgtgcaaccagagcagaaacccaaggctgtttctaaacctggccctattgctaaaggaccgaaggcaccacctggccgtaaactcagagacaccgacgaagacgaaagccttcaattcccagactgggtcagaccggacgatcgtaaactattagaatcaaacggtaggacttacgacgttagtgtagcattggatgggacaggcaacttcacaaagataatggacgccataaagaaagctcctgattatagctcgacacgtttcgtcatatacattaaaaaaggtttatatttggagaatgttgagatcaagaagaagaaatggaacattgtaatgttaggtgatggcattgacgtgactgttatttccggtaaccgcagcttcatcgatggttggaccactttccgatcagctacattcgcggtaagcggaagaggattcttagcaagagatataacgttccagaacacagcagggccagagaagcatcaggcggtagcactgagatcagactctgacctctctgtgttcttcagatgtgcgatgaggggttatcaagatacactctacacgcacaccatgcgtcagttctaccgtgagtgcaccatcacgggaacagtagattttatatttggggatgggactgttgtgtttcaaaactgtcaaattttggctaaaagaggactccctaaccaaaagaacaccatcactgcacaaggccggaaagatgtcaaccaaccctcaggattctcaattcaattcagcaatatctcggcggacgcagatttggtcccatacctaaacacgacaaggacgtatctaggaaggccatggaagctatattcgagaacggttttcattaggaacaatatgagcgacgttgtgagacccgaaggatggcttgagtggaacgctgattttgcgttggacacactcttctacggagagttcatgaactacgggcctggttcaggactcagcagccgagtcaaatggcctggttaccacgtctttaacaactcggatcaggctaacaacttcaccgtttctcagttcattaaaggaaatctttggctgccttctacgggagtaacgtttagtgatggcttgtatatctaaactggctcagtgtttctattgtgaatgttcctgttttttgttccttttcattttgttttgcgttttcttgtcatgttcttctaagttggtttgttgtggtatttcacggttttggaaaaatattgataaatggggaatttaagtcgatcggctgaagttgaac

SEQ ID NO: 38804 - protein, 547 aa, Arabidopsis thaliana
  peptide (1)..(547): Ceres Seq. ID no. 13489576
  misc_feature (234)..(531): Pfam Name: Pectinesterase Pfam Description: Pectinesterase
  misc_feature (86)..(545): Homolog of NCBI NO: 15230020 NR Description: pectinesterase family [Arabidopsis thaliana]
  misc_feature (27)..(178): Homolog of NCBI NO: 33520429 NR Description: pectinesterase [Fragaria x ananassa]
  misc_feature (205)..(544): Homolog of NCBI NO: 33520429 NR Description: pectinesterase [Fragaria x ananassa]
  misc_feature (46)..(547): Homolog of NCBI NO: 15081598 NR Description: pectin methylesterase PME1 [Vitis vinifera]
  misc_feature (40)..(207): Homolog of NCBI NO: 6093744 NR Description: Pectinesterase PPE8B precursor (Pectin
  misc_feature (213)..(542): Homolog of NCBI NO: 6093744 NR Description: Pectinesterase PPE8B precursor (Pectin
  misc_feature (28)..(545): Homolog of NCBI NO: 30690925 NR Description: pectinesterase family [Arabidopsis thaliana]
  misc_feature (144)..(547): Homolog of NCBI NO: 18418172 NR Description: pectinesterase family [Arabidopsis thaliana]
  misc_feature (78)..(547): Homolog of NCBI NO: 7447375 NR Description: pectinesterase homolog F4I10.150 - Arabidopsis
  misc_feature (23)..(547): Homolog of NCBI NO: 14190429 NR Description: AT4g33220/F4I10_150 [Arabidopsis thaliana]
DIIKNHKTFFSFSNYFIYYSYKMSCLKYFLILLMLGLCVSSEENFQYDYLKVPASEFVSSINTIVVVIRQVSSILSQFADFSGDRRLQNAVSDCLDLLDFSSEELTWSASASENPKGKGNGTGDVGSDTRTWLSAALSNQATCMEGFDGTSGLVKSLVAGSLDQLYSMLRELLPLVQPEQKPKAVSKPGPIAKGPKAPPGRKLRDTDEDESLQFPDWVRPDDRKLLESNGRTYDVSVALDGTGNFTKIMDAIKKAPDYSSTRFVIYIKKGLYLENVEIKKKKWNIVMLGDGIDVTVISGNRSFIDGWTTFRSATFAVSGRGFLARDITFQNTAGPEKHQAVALRSDSDLSVFFRCAMRGYQDTLYTHTMRQFYRECTITGTVDFIFGDGTVVFQNCQILAKRGLPNQKNTITAQGRKDVNQPSGFSIQFSNISADADLVPYLNTTRTYLGRPWKLYSRTVFIRNNMSDVVRPEGWLEWNADFALDTLFYGEFMNYGPGSGLSSRVKWPGYHVFNNSDQANNFTVSQFIKGNLWLPSTGVTFSDGLYI

SEQ ID NO: 38805 - protein, 525 aa, Arabidopsis thaliana
  peptide (1)..(525): Ceres Seq. ID no. 13489577
  misc_feature (212)..(509): Pfam Name: Pectinesterase Pfam Description: Pectinesterase
  misc_feature (64)..(523): Homolog of NCBI NO: 15230020 NR Description: pectinesterase family [Arabidopsis thaliana]
  misc_feature (5)..(156): Homolog of NCBI NO: 33520429 NR Description: pectinesterase [Fragaria x ananassa]
  misc_feature (183)..(522): Homolog of NCBI NO: 33520429 NR Description: pectinesterase [Fragaria x ananassa]
  misc_feature (24)..(525): Homolog of NCBI NO: 15081598 NR Description: pectin methylesterase PME1 [Vitis vinifera]
  misc_feature (18)..(185): Homolog of NCBI NO: 6093744 NR Description: Pectinesterase PPE8B precursor (Pectin
  misc_feature (191)..(520): Homolog of NCBI NO: 6093744 NR Description: Pectinesterase PPE8B precursor (Pectin
  misc_feature (6)..(523): Homolog of NCBI NO: 30690925 NR Description: pectinesterase family [Arabidopsis thaliana]
  misc_feature (122)..(525): Homolog of NCBI NO: 18418172 NR Description: pectinesterase family [Arabidopsis thaliana]
  misc_feature (56)..(525): Homolog of NCBI NO: 7447375 NR Description: pectinesterase homolog F4I10.150 - Arabidopsis
  misc_feature (1)..(525): Homolog of NCBI NO: 14190429 NR Description: AT4g33220/F4I10_150 [Arabidopsis thaliana]
MSCLKYFLILLMLGLCVSSEENFQYDYLKVPASEFVSSINTIVVVIRQVSSILSQFADFSGDRRLQNAVSDCLDLLDFSSEELTWSASASENPKGKGNGTGDVGSDTRTWLSAALSNQATCMEGFDGTSGLVKSLVAGSLDQLYSMLRELLPLVQPEQKPKAVSKPGPIAKGPKAPPGRKLRDTDEDESLQFPDWVRPDDRKLLESNGRTYDVSVALDGTGNFTKIMDAIKKAPDYSSTRFVIYIKKGLYLENVEIKKKKWNIVMLGDGIDVTVISGNRSFIDGWTTFRSATFAVSGRGFLARDITFQNTAGPEKHQAVALRSDSDLSVFFRCAMRGYQDTLYTHTMRQFYRECTITGTVDFIFGDGTVVFQNCQILAKRGLPNQKNTITAQGRKDVNQPSGFSIQFSNISADADLVPYLNTTRTYLGRPWKLYSRTVFIRNNMSDVVRPEGWLEWNADFALDTLFYGEFMNYGPGSGLSSRVKWPGYHVFNNSDQANNFTVSQFIKGNLWLPSTGVTFSDGLYI

SEQ ID NO: 38806 - protein, 514 aa, Arabidopsis thaliana
  peptide (1)..(514): Ceres Seq. ID no. 13489578
  misc_feature (201)..(498): Pfam Name: Pectinesterase Pfam Description: Pectinesterase
  misc_feature (53)..(512): Homolog of NCBI NO: 15230020 NR Description: pectinesterase family [Arabidopsis thaliana]
  misc_feature (1)..(145): Homolog of NCBI NO: 33520429 NR Description: pectinesterase [Fragaria x ananassa]
  misc_feature (172)..(511): Homolog of NCBI NO: 33520429 NR Description: pectinesterase [Fragaria x ananassa]
  misc_feature (13)..(514): Homolog of NCBI NO: 15081598 NR Description: pectin methylesterase PME1 [Vitis vinifera]
  misc_feature (7)..(174): Homolog of NCBI NO: 6093744 NR Description: Pectinesterase PPE8B precursor (Pectin
  misc_feature (180)..(509): Homolog of NCBI NO: 6093744 NR Description: Pectinesterase PPE8B precursor (Pectin
  misc_feature (1)..(512): Homolog of NCBI NO: 30690925 NR Description: pectinesterase family [Arabidopsis thaliana]
  misc_feature (111)..(514): Homolog of NCBI NO: 18418172 NR Description: pectinesterase family [Arabidopsis thaliana]
  misc_feature (45)..(514): Homolog of NCBI NO: 7447375 NR Description: pectinesterase homolog F4I10.150 - Arabidopsis
  misc_feature (1)..(514): Homolog of NCBI NO: 14190429 NR Description: AT4g33220/F4I10_150 [Arabidopsis thaliana]
MLGLCVSSEENFQYDYLKVPASEFVSSINTIVVVIRQVSSILSQFADFSGDRRLQNAVSDCLDLLDFSSEELTWSASASENPKGKGNGTGDVGSDTRTWLSAALSNQATCMEGFDGTSGLVKSLVAGSLDQLYSMLRELLPLVQPEQKPKAVSKPGPIAKGPKAPPGRKLRDTDEDESLQFPDWVRPDDRKLLESNGRTYDVSVALDGTGNFTKIMDAIKKAPDYSSTRFVIYIKKGLYLENVEIKKKKWNIVMLGDGIDVTVISGNRSFIDGWTTFRSATFAVSGRGFLARDITFQNTAGPEKHQAVALRSDSDLSVFFRCAMRGYQDTLYTHTMRQFYRECTITGTVDFIFGDGTVVFQNCQILAKRGLPNQKNTITAQGRKDVNQPSGFSIQFSNISADADLVPYLNTTRTYLGRPWKLYSRTVFIRNNMSDVVRPEGWLEWNADFALDTLFYGEFMNYGPGSGLSSRVKWPGYHVFNNSDQANNFTVSQFIKGNLWLPSTGVTFSDGLYI

SEQ ID NO: 38807 - DNA, 609 bp, Arabidopsis thaliana
  misc_feature (1)..(609): Ceres Seq. ID no. 12323160
  misc_feature: MA Experiment ID: 20001911 Result: Down-regulated in Transcription
  misc_feature: MA Experiment 20001911 PARAMETER Experiment Name: At_Drought_Reproduction_P Parameter: Age (day) Value: 40
  misc_feature: MA Experiment 20001911 PARAMETER Experiment Name: At_Drought_Reproduction_P Parameter: Organism Value: A. thaliana
  misc_feature: MA Experiment 20001911 PARAMETER Experiment Name: At_Drought_Reproduction_P Parameter: Plant Line Value: WS
  misc_feature: MA Experiment 20001911 PARAMETER Experiment Name: At_Drought_Reproduction_P Parameter: Timepoint (day) Value: 10
  misc_feature: MA Experiment 20001911 PARAMETER Experiment Name: At_Drought_Reproduction_P Parameter: Tissue Value: Flowers
  misc_feature: MA Experiment 20001911 PARAMETER Experiment Name: At_Drought_Reproduction_P Parameter: Treatment Value: Drought vs. No Drought
atggcggaacttgagaatccaagtgtaatgtcgaagctgatagcattcttatcttcattgctagagcgagttgctgagtcaaacgatctgacccgacgagtcgcgactcagtcacagagagtttcggtgtttcatggactgagtcgaccaacgataacgattcagagctatctagagaggatcttcaaatacgcaaattgtagtccttcttgcttcgtcgttgcttacgtttatctcgatcgtttcactcacagacaaccttcacttcccatcaattcctttaacgtccatcgtcttctcatcactagtgtcatggtcgctgctaaattcctcgatgatctgtactacaacaatgcgtattacgcgaaagtgggaggaataagcacgaaggagatgaattttctagagctggatttcttattcgggttaggatttgaattaaacgtgacgccaaacacattcaacgcctacttctcttatcttcaaaaggaaatgactcttcttcaacctctctctctcgttgttgtcccatcatcaagatctctcattaccttcaacgacgatgaagcttctcatcagaaacaacaacaacaacaactcgctgtttga

SEQ ID NO: 38808 - protein, 202 aa, Arabidopsis thaliana
  peptide (1)..(202): Ceres Seq. ID no. 12323161
  misc_feature (15)..(148): Pfam Name: Cyclin, N-terminal domain Pfam Description: Cyclin, N-terminal domain
  misc_feature (5)..(166): Homolog of NCBI NO: 15232360 NR Description: regulatory protein - like; protein id:
  misc_feature (7)..(164): Homolog of NCBI NO: 21593009 NR Description: unknown [Arabidopsis thaliana]
  misc_feature (7)..(164): Homolog of NCBI NO: 15229382 NR Description: putative protein
  misc_feature (12)..(182): Homolog of NCBI NO: 15233185 NR Description: PREG-like protein, putative; protein id:
  misc_feature (2)..(165): Homolog of NCBI NO: 14140116 NR Description: PREG-like protein [Oryza sativa]
  misc_feature (8)..(165): Homolog of NCBI NO: 25493992 NR Description: PREG-like protein [imported] - Picea mariana
  misc_feature (9)..(178): Homolog of NCBI NO: 15240794 NR Description: putative protein; protein id: At5g07450.1
  misc_feature (3)..(179): Homolog of NCBI NO: 15240306 NR Description: PREG-like - like protein; protein id: At5g61650.1
  misc_feature (5)..(199): Homolog of NCBI NO: 37536902 NR Description: hypothetical protein [Oryza sativa (japonica
  misc_feature (1)..(202): Homolog of NCBI NO: 15224950 NR Description: putative PREG1-like negative regulator; protein
MAELENPSVMSKLIAFLSSLLERVAESNDLTRRVATQSQRVSVFHGLSRPTITIQSYLERIFKYANCSPSCFVVAYVYLDRFTHRQPSLPINSFNVHRLLITSVMVAAKFLDDLYYNNAYYAKVGGISTKEMNFLELDFLFGLGFELNVTPNTFNAYFSYLQKEMTLLQPLSLVVVPSSRSLITFNDDEASHQKQQQQQLAV

SEQ ID NO: 38809 - protein, 193 aa, Arabidopsis thaliana
  peptide (1)..(193): Ceres Seq. ID no. 12323162
  misc_feature (6)..(139): Pfam Name: Cyclin, N-terminal domain Pfam Description: Cyclin, N-terminal domain
  misc_feature (1)..(157): Homolog of NCBI NO: 15232360 NR Description: regulatory protein - like; protein id:
  misc_feature (1)..(155): Homolog of NCBI NO: 21593009 NR Description: unknown [Arabidopsis thaliana]
  misc_feature (1)..(155): Homolog of NCBI NO: 15229382 NR Description: putative protein
  misc_feature (3)..(173): Homolog of NCBI NO: 15233185 NR Description: PREG-like protein, putative; protein id:
  misc_feature (1)..(156): Homolog of NCBI NO: 14140116 NR Description: PREG-like protein [Oryza sativa]
  misc_feature (1)..(156): Homolog of NCBI NO: 25493992 NR Description: PREG-like protein [imported] - Picea mariana
  misc_feature (1)..(169): Homolog of NCBI NO: 15240794 NR Description: putative protein; protein id: At5g07450.1
  misc_feature (1)..(170): Homolog of NCBI NO: 15240306 NR Description: PREG-like - like protein; protein id: At5g61650.1
  misc_feature (1)..(190): Homolog of NCBI NO: 37536902 NR Description: hypothetical protein [Oryza sativa (japonica
  misc_feature (1)..(193): Homolog of NCBI NO: 15224950 NR Description: putative PREG1-like negative regulator; protein
MSKLIAFLSSLLERVAESNDLTRRVATQSQRVSVFHGLSRPTITIQSYLERIFKYANCSPSCFVVAYVYLDRFTHRQPSLPINSFNVHRLLITSVMVAAKFLDDLYYNNAYYAKVGGISTKEMNFLELDFLFGLGFELNVTPNTFNAYFSYLQKEMTLLQPLSLVVVPSSRSLITFNDDEASHQKQQQQQLAV

SEQ ID NO: 38810 - DNA, 1382 bp, Arabidopsis thaliana
  misc_feature (1)..(1382): Ceres Seq. ID no. 12323163
  misc_feature: MA Experiment ID: 108577 Result: Down-regulated in Transcription
  misc_feature: MA Experiment 108577 PARAMETER Experiment Name: At_42deg_Heat_cDNA_P Parameter: Temperature (deg C) Value: 42 vs. 22
  misc_feature: MA Experiment 108577 PARAMETER Experiment Name: At_42deg_Heat_cDNA_P Parameter: Timepoint (hr) Value: 6
  misc_feature: MA Experiment 108577 PARAMETER Experiment Name: At_42deg_Heat_cDNA_P Parameter: Tissue Value: Aerial
  misc_feature: MA Experiment ID: 108595 Result: Down-regulated in Transcription
  misc_feature: MA Experiment 108595 PARAMETER Experiment Name: At_Ler-pi_Ovule_cDNA_P Parameter: Plant Line Value: null
  misc_feature: MA Experiment ID: 20000224 Result: Down-regulated in Transcription
  misc_feature: MA Experiment ID: 20000306 Result: Up-regulated in Transcription
  misc_feature: MA Experiment 20000306 PARAMETER Experiment Name: At_Germinating_Seeds_Sub_P Parameter: Age (hr) Value: 6 vs. 0
  misc_feature: MA Experiment 20000306 PARAMETER Experiment Name: At_Germinating_Seeds_Sub_P Parameter: Organism Value: A. thaliana
  misc_feature: MA Experiment 20000306 PARAMETER Experiment Name: At_Germinating_Seeds_Sub_P Parameter: Plant Line Value: WS
  misc_feature: MA Experiment 20000306 PARAMETER Experiment Name: At_Germinating_Seeds_Sub_P Parameter: Tissue Value: Germinating Seeds
  misc_feature: MA Experiment ID: 20000307 Result: Up-regulated in Transcription
  misc_feature: MA Experiment 20000307 PARAMETER Experiment Name: At_Germinating_Seeds_Sub_P Parameter: Age (hr) Value: 24 vs. 0
  misc_feature: MA Experiment 20000307 PARAMETER Experiment Name: At_Germinating_Seeds_Sub_P Parameter: Organism Value: A. thaliana
  misc_feature: MA Experiment 20000307 PARAMETER Experiment Name: At_Germinating_Seeds_Sub_P Parameter: Plant Line Value: WS
  misc_feature: MA Experiment 20000307 PARAMETER Experiment Name: At_Germinating_Seeds_Sub_P Parameter: Tissue Value: Germinating Seeds
aagaacgtccaatccaatctataaatctccttgatggaatttccgtacatattacttgttcctttctgatctcttcttcatcggttttatgtttcatcgagtttgaatatttctttgattctctgtttgatgattgctagttctttagaagagcaatgagttattctggagccggactcggaaagcctggctcaggtaaaaggagaataagggatcttttaactcaatctgataaccgagtctgcgctgattgtggcgctccagatcctaagtgggcgtcagctaatattggagtgtttatatgcttaaaatgttgtggtgtccacagaagccttggcagtcatatctcaaaggtcttatccgtgacattggatgaatggtcagatgaagaagtcgattcgatgattgaaattggaggaaatgcctctgcaaattcaatttacgaggcgtttattcctgaaggtagctctaagcctggacctgatgctagtcatgaccagcgtatgaggttcattaggtcgaaatatgagcaccaagagtttctgaaaccaagcttgcggatcacatccgtgaggggctctagtacaaagactccagcatttctttcatcgagtctatctaaaaagattgttgatagctttcgcactaattcatcatcgcaacagccgcaacttgaaggcatggttgagtttattggattgttgaaggtgactattaaaaagggtaccaatatggccatccgagatatgatgtcaagtgatccctatgttgtgttgactctaggacaacagaaggctcaatctactgtagtgaagagcaacttaaaccctgtctggaatgaggaactcatgctctctgttcctcataactatggctcagtgaaattgcaagtgtttgactatgacacattttctgctgatgacataatgggagaagctgagattgatatccagcctctgattacatctgcaatggcttttggagaccctgaaatgtttggagatatgcagattggaaaatggctgaaatcgcacgacaatgctcttatagaagatagcatcatcaacattgcagatggtaaagtgaagcaagaggttcaaatcaagcttcagaatgttgaatctggtgaactagaactagaaatggagtggctacctcttgagcaataaataatcaactatataatagggtcattatatataaccaaacaaattttattactgtattcattattttaacattcccccttggttcttgtttgacaaatttttgaaactttgatctcattgaaaactttctttcgtactttgttgttgtaatgttcttttggcagattagatatttgtataactcatatgattatatgttttgactcatgttct

SEQ ID NO: 38811 - protein, 337 aa, Arabidopsis thaliana; identical to SEQ ID NO: 27546
  peptide (1)..(337): Ceres Seq. ID no. 12323164
  misc_feature (15)..(137): Pfam Name: Putative GTPase activating protein for Arf Pfam Description: Putative GTPase activating protein for Arf
  misc_feature (1)..(121): Homolog of NCBI NO: 25411567 NR Description: hypothetical protein At2g14490 [imported] -
  misc_feature (9)..(337): Homolog of NCBI NO: 19386828 NR Description: putative zinc finger and C2 domain protein
  misc_feature (17)..(337): Homolog of NCBI NO: 30680493 NR Description: zinc finger and C2 domain protein, putative
  misc_feature (17)..(337): Homolog of NCBI NO: 6648206 NR Description: putative GTPase activating protein [Arabidopsis
  misc_feature (1)..(337): Homolog of NCBI NO: 25407332 NR Description: hypothetical protein AT4g05330 [imported] -
  misc_feature (1)..(337): Homolog of NCBI NO: 18412932 NR Description: putative protein
  misc_feature (1)..(41): Homolog of NCBI NO: 7486586 NR Description: hypothetical protein F7J7.100 - Arabidopsis
  misc_feature (40)..(337): Homolog of NCBI NO: 7486586 NR Description: hypothetical protein F7J7.100 - Arabidopsis
  misc_feature (1)..(337): Homolog of NCBI NO: 21594052 NR Description: putative GTPase activating protein [Arabidopsis
  misc_feature (1)..(337): Homolog of NCBI NO: 18415638 NR Description: putative protein

SEQ ID NO: 38812 - protein, 255 aa, Arabidopsis thaliana; identical to SEQ ID NO: 27547
  peptide (1)..(255): Ceres Seq. ID no. 12323165
  misc_feature (1)..(55): Pfam Name: Putative GTPase activating protein for Arf Pfam Description: Putative GTPase activating protein for Arf
  misc_feature (1)..(28): Homolog of NCBI NO: 15225946 NR Description: unknown protein; protein id: At2g14490.1
  misc_feature (1)..(39): Homolog of NCBI NO: 25411567 NR Description: hypothetical protein At2g14490 [imported] -
  misc_feature (1)..(255): Homolog of NCBI NO: 19386828 NR Description: putative zinc finger and C2 domain protein
  misc_feature (1)..(255): Homolog of NCBI NO: 30680493 NR Description: zinc finger and C2 domain protein, putative
  misc_feature (1)..(255): Homolog of NCBI NO: 6648206 NR Description: putative GTPase activating protein [Arabidopsis
  misc_feature (1)..(255): Homolog of NCBI NO: 25407332 NR Description: hypothetical protein AT4g05330 [imported] -
  misc_feature (1)..(255): Homolog of NCBI NO: 18412932 NR Description: putative protein
  misc_feature (1)..(255): Homolog of NCBI NO: 7486586 NR Description: hypothetical protein F7J7.100 - Arabidopsis
  misc_feature (1)..(255): Homolog of NCBI NO: 21594052 NR Description: putative GTPase activating protein [Arabidopsis
  misc_feature (1)..(255): Homolog of NCBI NO: 18415638 NR Description: putative protein

SEQ ID NO: 38813 - protein, 221 aa, Arabidopsis thaliana; identical to SEQ ID NO: 27548
  peptide (1)..(221): Ceres Seq. ID no. 12323166
  misc_feature (67)..(146): Pfam Name: C2 domain Pfam Description: C2 domain
  misc_feature (1)..(39): Homolog of NCBI NO: 28850396 NR Description: similar to Arabidopsis thaliana (Mouse-ear
  misc_feature (64)..(219): Homolog of NCBI NO: 33146442 NR Description: zinc finger and C2 domain protein-like
  misc_feature (1)..(221): Homolog of NCBI NO: 19386828 NR Description: putative zinc finger and C2 domain protein
  misc_feature (1)..(221): Homolog of NCBI NO: 30680493 NR Description: zinc finger and C2 domain protein, putative
  misc_feature (1)..(221): Homolog of NCBI NO: 6648206 NR Description: putative GTPase activating protein [Arabidopsis
  misc_feature (1)..(221): Homolog of NCBI NO: 25407332 NR Description: hypothetical protein AT4g05330 [imported] -
  misc_feature (1)..(221): Homolog of NCBI NO: 18412932 NR Description: putative protein
  misc_feature (1)..(221): Homolog of NCBI NO: 7486586 NR Description: hypothetical protein F7J7.100 - Arabidopsis
  misc_feature (1)..(221): Homolog of NCBI NO: 21594052 NR Description: putative GTPase activating protein [Arabidopsis
  misc_feature (1)..(221): Homolog of NCBI NO: 18415638 NR Description: putative protein

SEQ ID NO: 38814 - DNA, 1077 bp, Arabidopsis thaliana
  misc_feature (1)..(1077): Ceres Seq. ID no. 13487185
  misc_feature: MA Experiment ID: 108461 Result: Up-regulated in Transcription
  misc_feature: MA Experiment 108461 PARAMETER Experiment Name: At_Germinating_Seeds_cDNA_P Parameter: Age (day) Value: 1 vs. 0
  misc_feature: MA Experiment 108461 PARAMETER Experiment Name: At_Germinating_Seeds_cDNA_P Parameter: Tissue Value: Germinating Seeds
  misc_feature: MA Experiment ID: 108462 Result: Up-regulated in Transcription
  misc_feature: MA Experiment 108462 PARAMETER Experiment Name: At_Germinating_Seeds_cDNA_P Parameter: Age (day) Value: 2 vs. 0
  misc_feature: MA Experiment 108462 PARAMETER Experiment Name: At_Germinating_Seeds_cDNA_P Parameter: Tissue Value: Germinating Seeds
  misc_feature: MA Experiment ID: 108463 Result: Up-regulated in Transcription
  misc_feature: MA Experiment 108463 PARAMETER Experiment Name: At_Germinating_Seeds_cDNA_P Parameter: Age (day) Value: 3 vs. 0
  misc_feature: MA Experiment 108463 PARAMETER Experiment Name: At_Germinating_Seeds_cDNA_P Parameter: Tissue Value: Germinating Seeds
  misc_feature: MA Experiment ID: 20000112 Result: Down-regulated in Transcription
  misc_feature: MA Experiment 20000112 PARAMETER Experiment Name: At_42deg_Heat_cDNA_P Parameter: Temperature (deg C) Value: 42 vs. 22
  misc_feature: MA Experiment 20000112 PARAMETER Experiment Name: At_42deg_Heat_cDNA_P Parameter: Timepoint (hr) Value: 2
  misc_feature: MA Experiment 20000112 PARAMETER Experiment Name: At_42deg_Heat_cDNA_P Parameter: Tissue Value: Aerial
  misc_feature: MA Experiment ID: 20000113 Result: Down-regulated in Transcription
  misc_feature: MA Experiment 20000113 PARAMETER Experiment Name: At_42deg_Heat_cDNA_P Parameter: Temperature (deg C) Value: 42 vs. 22
  misc_feature: MA Experiment 20000113 PARAMETER Experiment Name: At_42deg_Heat_cDNA_P Parameter: Timepoint (hr) Value: 8
  misc_feature: MA Experiment 20000113 PARAMETER Experiment Name: At_42deg_Heat_cDNA_P Parameter: Tissue Value: Aerial
  misc_feature: MA Experiment ID: 20000171 Result: Down-regulated in Transcription
  misc_feature: MA Experiment 20000171 PARAMETER Experiment Name: At_42deg_Heat_P Parameter: Age (day) Value: 14
  misc_feature: MA Experiment 20000171 PARAMETER Experiment Name: At_42deg_Heat_P Parameter: Organism Value: A. thaliana
  misc_feature: MA Experiment 20000171 PARAMETER Experiment Name: At_42deg_Heat_P Parameter: Plant Line Value: WS
  misc_feature: MA Experiment 20000171 PARAMETER Experiment Name: At_42deg_Heat_P Parameter: Temperature (deg C) Value: 42 vs. 22
  misc_feature: MA Experiment 20000171 PARAMETER Experiment Name: At_42deg_Heat_P Parameter: Timepoint (hr) Value: 1
  misc_feature: MA Experiment 20000171 PARAMETER Experiment Name: At_42deg_Heat_P Parameter: Tissue Value: Aerial
  misc_feature: MA Experiment ID: 20000173 Result: Down-regulated in Transcription
  misc_feature: MA Experiment 20000173 PARAMETER Experiment Name: At_42deg_Heat_P Parameter: Age (day) Value: 14
  misc_feature: MA Experiment 20000173 PARAMETER Experiment Name: At_42deg_Heat_P Parameter: Organism Value: A. thaliana
  misc_feature: MA Experiment 20000173 PARAMETER Experiment Name: At_42deg_Heat_P Parameter: Plant Line Value: WS
  misc_feature: MA Experiment 20000173 PARAMETER Experiment Name: At_42deg_Heat_P Parameter: Temperature (deg C) Value: 42 vs. 22
  misc_feature: MA Experiment 20000173 PARAMETER Experiment Name: At_42deg_Heat_P Parameter: Timepoint (hr) Value: 6
  misc_feature: MA Experiment 20000173 PARAMETER Experiment Name: At_42deg_Heat_P Parameter: Tissue Value: Aerial
  misc_feature: MA Experiment ID: 20000179 Result: Up-regulated in Transcription
  misc_feature: MA Experiment 20000179 PARAMETER Experiment Name: At_Germinating_Seeds_P Parameter: Age (hr) Value: 6 vs. 0
  misc_feature: MA Experiment 20000179 PARAMETER Experiment Name: At_Germinating_Seeds_P Parameter: Tissue Value: Germinating Seeds
  misc_feature: MA Experiment ID: 20000180 Result: Up-regulated in Transcription
  misc_feature: MA Experiment 20000180 PARAMETER Experiment Name: At_Germinating_Seeds_P Parameter: Age (hr) Value: 24 vs. 0
  misc_feature: MA Experiment 20000180 PARAMETER Experiment Name: At_Germinating_Seeds_P Parameter: Tissue Value: Germinating Seeds
  misc_feature: MA Experiment ID: 20000211 Result: Up-regulated in Transcription
  misc_feature: MA Experiment 20000211 PARAMETER Experiment Name: At_0.001percent_MeJA__P Parameter: Age (day) Value: 14
  misc_feature: MA Experiment 20000211 PARAMETER Experiment Name: At_0.001percent_MeJA__P Parameter: Organism Value: A. thaliana
  misc_feature: MA Experiment 20000211 PARAMETER Experiment Name: At_0.001percent_MeJA__P Parameter: Plant Line Value: WS
  misc_feature: MA Experiment 20000211 PARAMETER Experiment Name: At_0.001percent_MeJA__P Parameter: Timepoint (hr) Value: 1
  misc_feature: MA Experiment 20000211 PARAMETER Experiment Name: At_0.001percent_MeJA__P Parameter: Tissue Value: Aerial
  misc_feature: MA Experiment 20000211 PARAMETER Experiment Name: At_0.001percent_MeJA__P Parameter: Treatment Value: 0.001percent MeJA vs. No Treatment
  misc_feature: MA Experiment ID: 20000224 Result: Down-regulated in Transcription
  misc_feature: MA Experiment ID: 20000227 Result: Down-regulated in Transcription
  misc_feature: MA Experiment 20000227 PARAMETER Experiment Name: At_Root-Tips-vs-Tops_P Parameter: Tissue Value: Root Tips vs. Root Tops
  misc_feature: MA Experiment ID: 20000234 Result: Down-regulated in Transcription
  misc_feature: MA Experiment 20000234 PARAMETER Experiment Name: At_Siliques_P Parameter: Age (day) Value: 21
  misc_feature: MA Experiment 20000234 PARAMETER Experiment Name: At_Siliques_P Parameter: Organism Value: A. thaliana
  misc_feature: MA Experiment 20000234 PARAMETER Experiment Name: At_Siliques_P Parameter: Plant Line Value: WS
  misc_feature: MA Experiment 20000234 PARAMETER Experiment Name: At_Siliques_P Parameter: Tissue Value: Less Than 5mm Siliques vs. Whole Plant
  misc_feature: MA Experiment ID: 20001556 Result: Down-regulated in Transcription
  misc_feature: MA Experiment 20001556 PARAMETER Experiment Name: At_Drought_Soil_Dry_P Parameter: Age (day) Value: 26
  misc_feature: MA Experiment 20001556 PARAMETER Experiment Name: At_Drought_Soil_Dry_P Parameter: Organism Value: A. thaliana
  misc_feature: MA Experiment 20001556 PARAMETER Experiment Name: At_Drought_Soil_Dry_P Parameter: Plant Line Value: WS
  misc_feature: MA Experiment 20001556 PARAMETER Experiment Name: At_Drought_Soil_Dry_P Parameter: Post Timepoint (hr) Value: None
  misc_feature: MA Experiment 20001556 PARAMETER Experiment Name: At_Drought_Soil_Dry_P Parameter: Post-Treatment Value: None
  misc_feature: MA Experiment 20001556 PARAMETER Experiment Name: At_Drought_Soil_Dry_P Parameter: Timepoint (day) Value: 12
  misc_feature: MA Experiment 20001556 PARAMETER Experiment Name: At_Drought_Soil_Dry_P Parameter: Treatment Value: Drought vs. No Drought
  misc_feature: MA Experiment ID: 20001557 Result: Down-regulated in Transcription
  misc_feature: MA Experiment 20001557 PARAMETER Experiment Name: At_Drought_Soil_Dry_P Parameter: Age (day) Value: 27
  misc_feature: MA Experiment 20001557 PARAMETER Experiment Name: At_Drought_Soil_Dry_P Parameter: Organism Value: A. thaliana
  misc_feature: MA Experiment 20001557 PARAMETER Experiment Name: At_Drought_Soil_Dry_P Parameter: Plant Line Value: WS
  misc_feature: MA Experiment 20001557 PARAMETER Experiment Name: At_Drought_Soil_Dry_P Parameter: Post Timepoint (hr) Value: 3
  misc_feature: MA Experiment 20001557 PARAMETER Experiment Name: At_Drought_Soil_Dry_P Parameter: Post-Treatment Value: Re-Water vs. No Drought
  misc_feature: MA Experiment 20001557 PARAMETER Experiment Name: At_Drought_Soil_Dry_P Parameter: Timepoint (day) Value: 13
  misc_feature: MA Experiment 20001557 PARAMETER Experiment Name: At_Drought_Soil_Dry_P Parameter: Treatment Value: Drought vs. No Drought
  misc_feature: MA Experiment ID: 20001559 Result: Down-regulated in Transcription
  misc_feature: MA Experiment 20001559 PARAMETER Experiment Name: At_Drought_Soil_Dry_P Parameter: Age (day) Value: 28
  misc_feature: MA Experiment 20001559 PARAMETER Experiment Name: At_Drought_Soil_Dry_P Parameter: Organism Value: A. thaliana
  misc_feature: MA Experiment 20001559 PARAMETER Experiment Name: At_Drought_Soil_Dry_P Parameter: Plant Line Value: WS
  misc_feature: MA Experiment 20001559 PARAMETER Experiment Name: At_Drought_Soil_Dry_P Parameter: Post Timepoint (hr) Value: 29
  misc_feature: MA Experiment 20001559 PARAMETER Experiment Name: At_Drought_Soil_Dry_P Parameter: Post-Treatment Value: Re-Water vs. No Drought
  misc_feature: MA Experiment 20001559 PARAMETER Experiment Name: At_Drought_Soil_Dry_P Parameter: Timepoint (day) Value: 14
  misc_feature: MA Experiment 20001559 PARAMETER Experiment Name: At_Drought_Soil_Dry_P Parameter: Treatment Value: Drought vs. No Drought
acaaccaatcccatctcttgtttcacttccgccctccatctttcttcgtgattgagagaatcttcaacgaaagaaagcaactttttttgggtgaaattcacagaacaaccaaggtttttcttcttcttcttcttctccagttcctacagaatcatgcctgacaagaacatcgtagaggacgttatcggtgatttggtggataacttcacggagactgttcagaagaacaaacatggttcctccttcttcgaacaagaagattccgtcagttctcgtttcaaccgtttgtttgatcgccagaagccaattcatcatgtcttaggcggtggcaaatctgctgatgtgttgttatggaggaacaagaagatctctgcaagtgttttgatgggagctaccgcaatttgggtgctttttgaatggatcaatttccatttcctgtctctcgtttgctatgccctcttgcttggtatgattgcacaattcgtttggtctaacgcctctggattcttaaaccgctcacagtctagagtgcctcgcctagttcttccaaaggatttctttgctgaagtcggtgtggccgttggaaaagaagttaaccgcggtttgttgtttcttcaggacttggcttgtaaagggaatttgaaacagttcctcatggctgtaatcggactatgggtagctgcaatggtcgggagctgttgcaatttcctaactgttttgtatatcgggtttgttggggcacacacaatgccggttctgtatgagagatacgaagacgaagtggatggttttatggattctatgatcatgaagtttcatagtcattacaagaagcttgatactgggtttctcagtagaatcccaagtggaaagtttggattaaagaagcgtgagtgactaaatcactcaagcattttcttattttaccttgtttgttgttagaacaatatggattatggtttgctaaatgaatgttttgagaatattattcattcatgtagattttgtgtatttccttactaaacaataccttgtccatgtatttgtcaataccttggttaataagagaatcatcat

SEQ ID NO: 38815 - protein, 247 aa, Arabidopsis thaliana; identical to SEQ ID NO: 29724
  peptide (1)..(247): Ceres Seq. ID no. 13487186
  misc_feature (12)..(247): Homolog of NCBI NO: 15237093 NR Description: expressed protein [Arabidopsis thaliana]
  misc_feature (4)..(245): Homolog of NCBI NO: 15238125 NR Description: expressed protein [Arabidopsis thaliana]
  misc_feature (23)..(247): Homolog of NCBI NO: 15236556 NR Description: expressed protein [Arabidopsis thaliana]
  misc_feature (14)..(246): Homolog of NCBI NO: 18406991 NR Description: expressed protein [Arabidopsis thaliana]
  misc_feature (44)..(245): Homolog of NCBI NO: 34904202 NR Description: P0492F05.25 [Oryza sativa (japonica
  misc_feature (4)..(245): Homolog of NCBI NO: 34909318 NR Description: OSJNBb0021A09.5 [Oryza sativa (japonica
  misc_feature (1)..(247): Homolog of NCBI NO: 34899590 NR Description: hypothetical protein~similar to Oryza sativa
  misc_feature (4)..(247): Homolog of NCBI NO: 34897094 NR Description: unknown protein [Oryza sativa (japonica
  misc_feature (1)..(247): Homolog of NCBI NO: 18398810 NR Description: expressed protein [Arabidopsis thaliana]
  misc_feature (1)..(247): Homolog of NCBI NO: 30681227 NR Description: expressed protein [Arabidopsis thaliana]

SEQ ID NO: 38816 - protein, 170 aa, Arabidopsis thaliana; identical to SEQ ID NO: 29725
  peptide (1)..(170): Ceres Seq. ID no. 13487187
  misc_feature (1)..(170): Homolog of NCBI NO: 15237093 NR Description: expressed protein [Arabidopsis thaliana]
  misc_feature (1)..(168): Homolog of NCBI NO: 15238125 NR Description: expressed protein [Arabidopsis thaliana]
  misc_feature (1)..(170): Homolog of NCBI NO: 15236556 NR Description: expressed protein [Arabidopsis thaliana]
  misc_feature (1)..(169): Homolog of NCBI NO: 18406991 NR Description: expressed protein [Arabidopsis thaliana]
  misc_feature (1)..(168): Homolog of NCBI NO: 34904202 NR Description: P0492F05.25 [Oryza sativa (japonica
  misc_feature (1)..(168): Homolog of NCBI NO: 34909318 NR Description: OSJNBb0021A09.5 [Oryza sativa (japonica
  misc_feature (1)..(170): Homolog of NCBI NO: 34899590 NR Description: hypothetical protein~similar to Oryza sativa
  misc_feature (1)..(170): Homolog of NCBI NO: 34897094 NR Description: unknown protein [Oryza sativa (japonica
  misc_feature (1)..(170): Homolog of NCBI NO: 18398810 NR Description: expressed protein [Arabidopsis thaliana]
  misc_feature (1)..(170): Homolog of NCBI NO: 30681227 NR Description: expressed protein [Arabidopsis thaliana]

SEQ ID NO: 38817 - protein, 142 aa, Arabidopsis thaliana; identical to SEQ ID NO: 29726
  peptide (1)..(142): Ceres Seq. ID no. 13487188
  misc_feature (1)..(142): Homolog of NCBI NO: 15237093 NR Description: expressed protein [Arabidopsis thaliana]
  misc_feature (1)..(140): Homolog of NCBI NO: 15238125 NR Description: expressed protein [Arabidopsis thaliana]
  misc_feature (1)..(142): Homolog of NCBI NO: 15236556 NR Description: expressed protein [Arabidopsis thaliana]
  misc_feature (1)..(141): Homolog of NCBI NO: 18406991 NR Description: expressed protein [Arabidopsis thaliana]
  misc_feature (1)..(140): Homolog of NCBI NO: 34904202 NR Description: P0492F05.25 [Oryza sativa (japonica
  misc_feature (1)..(140): Homolog of NCBI NO: 34909318 NR Description: OSJNBb0021A09.5 [Oryza sativa (japonica
  misc_feature (1)..(142): Homolog of NCBI NO: 34899590 NR Description: hypothetical protein~similar to Oryza sativa
  misc_feature (1)..(142): Homolog of NCBI NO: 34897094 NR Description: unknown protein [Oryza sativa (japonica
  misc_feature (1)..(142): Homolog of NCBI NO: 18398810 NR Description: expressed protein [Arabidopsis thaliana]
  misc_feature (1)..(142): Homolog of NCBI NO: 30681227 NR Description: expressed protein [Arabidopsis thaliana]

SEQ ID NO: 38818 - DNA, 2414 bp, Arabidopsis thaliana
  misc_feature (1)..(2414): Ceres Seq. ID no. 12325652
  misc_feature: MA Experiment ID: 108434 Result: Down-regulated in Transcription
  misc_feature: MA Experiment 108434 PARAMETER Experiment Name: At_Root_Tips_cDNA_P Parameter: Tissue Value: Root Tips
  misc_feature: MA Experiment ID: 108607 Result: Up-regulated in Transcription
  misc_feature: MA Experiment 108607 PARAMETER Experiment Name: At_100uM_ABA_cDNA_P Parameter: Timepoint (hr) Value: 4
  misc_feature: MA Experiment 108607 PARAMETER Experiment Name: At_100uM_ABA_cDNA_P Parameter: Tissue Value: Aerial
  misc_feature: MA Experiment 108607 PARAMETER Experiment Name: At_100uM_ABA_cDNA_P Parameter: Treatment Value: 100uM ABA vs. No Treatment
  misc_feature: MA Experiment ID: 20000070 Result: Up-regulated in Transcription
  misc_feature: MA Experiment 20000070 PARAMETER Experiment Name: At_100uM_ABA_Mutants_cDNA_P Parameter: Plant Line Value: CS24
  misc_feature: MA Experiment 20000070 PARAMETER Experiment Name: At_100uM_ABA_Mutants_cDNA_P Parameter: Timepoint (hr) Value: 6
  misc_feature: MA Experiment 20000070 PARAMETER Experiment Name: At_100uM_ABA_Mutants_cDNA_P Parameter: Tissue Value: Aerial
  misc_feature: MA Experiment 20000070 PARAMETER Experiment Name: At_100uM_ABA_Mutants_cDNA_P Parameter: Treatment Value: 100uM ABA vs. No Treatment
  misc_feature: MA Experiment ID: 20000087 Result: Up-regulated in Transcription
  misc_feature: MA Experiment 20000087 PARAMETER Experiment Name: At_100uM_ABA_Mutants_cDNA_P Parameter: Plant Line Value: WS
  misc_feature: MA Experiment 20000087 PARAMETER Experiment Name: At_100uM_ABA_Mutants_cDNA_P Parameter: Timepoint (hr) Value: 6
  misc_feature: MA Experiment 20000087 PARAMETER Experiment Name: At_100uM_ABA_Mutants_cDNA_P Parameter: Tissue Value: Aerial
  misc_feature: MA Experiment 20000087 PARAMETER Experiment Name: At_100uM_ABA_Mutants_cDNA_P Parameter: Treatment Value: 100uM ABA vs. No Treatment
  misc_feature: MA Experiment ID: 20000227 Result: Up-regulated in Transcription
  misc_feature: MA Experiment 20000227 PARAMETER Experiment Name: At_Root-Tips-vs-Tops_P Parameter: Tissue Value: Root Tips vs. Root Tops
  misc_feature: MA Experiment ID: 20000234 Result: Up-regulated in Transcription
  misc_feature: MA Experiment 20000234 PARAMETER Experiment Name: At_Siliques_P Parameter: Age (day) Value: 21
  misc_feature: MA Experiment 20000234 PARAMETER Experiment Name: At_Siliques_P Parameter: Organism Value: A. thaliana
  misc_feature: MA Experiment 20000234 PARAMETER Experiment Name: At_Siliques_P Parameter: Plant Line Value: WS
  misc_feature: MA Experiment 20000234 PARAMETER Experiment Name: At_Siliques_P Parameter: Tissue Value: Less Than 5mm Siliques vs. Whole Plant
  misc_feature: MA Experiment ID: 20000235 Result: Up-regulated in Transcription
  misc_feature: MA Experiment 20000235 PARAMETER Experiment Name: At_Siliques_P Parameter: Age (day) Value: 21
  misc_feature: MA Experiment 20000235 PARAMETER Experiment Name: At_Siliques_P Parameter: Organism Value: A. thaliana
  misc_feature: MA Experiment 20000235 PARAMETER Experiment Name: At_Siliques_P Parameter: Plant Line Value: WS
  misc_feature: MA Experiment 20000235 PARAMETER Experiment Name: At_Siliques_P Parameter: Tissue Value: 5-10mm Siliques vs. Whole Plant
  misc_feature: MA Experiment ID: 20000264 Result: Up-regulated in Transcription
  misc_feature: MA Experiment 20000264 PARAMETER Experiment Name: At_Open_Flower_P Parameter: Age (day) Value: 21
  misc_feature: MA Experiment 20000264 PARAMETER Experiment Name: At_Open_Flower_P Parameter: Plant Line Value: WS
  misc_feature: MA Experiment 20000264 PARAMETER Experiment Name: At_Open_Flower_P Parameter: Tissue Value: Open Flower vs. Whole Plant
  misc_feature: MA Experiment ID: 20000265 Result: Up-regulated in Transcription
  misc_feature: MA Experiment 20000265 PARAMETER Experiment Name: At_Open_Flower_P Parameter: Age (day) Value: 21
  misc_feature: MA Experiment 20000265 PARAMETER Experiment Name: At_Open_Flower_P Parameter: Plant Line Value: WS
  misc_feature: MA Experiment 20000265 PARAMETER Experiment Name: At_Open_Flower_P Parameter: Tissue Value: Closed Flower vs. Whole Plant
  misc_feature: MA Experiment ID: 20000286 Result: Up-regulated in Transcription
  misc_feature: MA Experiment 20000286 PARAMETER Experiment Name: At_Open_Flower_P Parameter: Age (day) Value: 21
  misc_feature: MA Experiment 20000286 PARAMETER Experiment Name: At_Open_Flower_P Parameter: Plant Line Value: WS
  misc_feature: MA Experiment 20000286 PARAMETER Experiment Name: At_Open_Flower_P Parameter: Tissue Value: Half Open vs. Whole Plant
  misc_feature: MA Experiment ID: 20000439 Result: Down-regulated in Transcription
  misc_feature: MA Experiment 20000439 PARAMETER Experiment Name: At_Roots__P Parameter: Age (day) Value: 14 vs. 21
  misc_feature: MA Experiment 20000439 PARAMETER Experiment Name: At_Roots__P Parameter: Organism Value: A. thaliana
  misc_feature: MA Experiment 20000439 PARAMETER Experiment Name: At_Roots__P Parameter: Tissue Value: Roots vs. Whole Plant
  misc_feature: MA Experiment ID: 20000452 Result: Up-regulated in Transcription
  misc_feature: MA Experiment 20000452 PARAMETER Experiment Name: At_CS6879_Shoots-Roots_P Parameter: Age (day) Value: 14
  misc_feature: MA Experiment 20000452 PARAMETER Experiment Name: At_CS6879_Shoots-Roots_P Parameter: Organism Value: A. thaliana
  misc_feature: MA Experiment 20000452 PARAMETER Experiment Name: At_CS6879_Shoots-Roots_P Parameter: Plant Line Value: CS6879 vs. WS
  misc_feature: MA Experiment 20000452 PARAMETER Experiment Name: At_CS6879_Shoots-Roots_P Parameter: Tissue Value: Shoots
  misc_feature: MA Experiment ID: 20000794 Result: Up-regulated in Transcription
  misc_feature: MA Experiment 20000794 PARAMETER Experiment Name: At_Petals_P Parameter: Age (day) Value: 23-25 days
  misc_feature: MA Experiment 20000794 PARAMETER Experiment Name: At_Petals_P Parameter: Plant Line Value: WS
  misc_feature: MA Experiment 20000794 PARAMETER Experiment Name: At_Petals_P Parameter: Tissue Value: Petals vs. Whole plant
  misc_feature: MA Experiment ID: 20001248 Result: Down-regulated in Transcription
  misc_feature: MA Experiment 20001248 PARAMETER Experiment Name: At_Far-red-induction_P Parameter: Age (day) Value: 7
  misc_feature: MA Experiment 20001248 PARAMETER Experiment Name: At_Far-red-induction_P Parameter: Light Value: Far-red vs. White
  misc_feature: MA Experiment 20001248 PARAMETER Experiment Name: At_Far-red-induction_P Parameter: Organism Value: A. thaliana
  misc_feature: MA Experiment 20001248 PARAMETER Experiment Name: At_Far-red-induction_P Parameter: Plant Line Value: Columbia
  misc_feature: MA Experiment 20001248 PARAMETER Experiment Name: At_Far-red-induction_P Parameter: Timepoint (hr) Value: 4
  misc_feature: MA Experiment 20001248 PARAMETER Experiment Name: At_Far-red-induction_P Parameter: Tissue Value: Whole Plant
  misc_feature: MA Experiment ID: 20001450 Result: Down-regulated in Transcription
  misc_feature: MA Experiment 20001450 PARAMETER Experiment Name: At_Far-red-induction_P Parameter: Age (day) Value: 7
  misc_feature: MA Experiment 20001450 PARAMETER Experiment Name: At_Far-red-induction_P Parameter: Light Value: Far-red vs. White
  misc_feature: MA Experiment 20001450 PARAMETER Experiment Name: At_Far-red-induction_P Parameter: Organism Value: A. thaliana
  misc_feature: MA Experiment 20001450 PARAMETER Experiment Name: At_Far-red-induction_P Parameter: Plant Line Value: Columbia
  misc_feature: MA Experiment 20001450 PARAMETER Experiment Name: At_Far-red-induction_P Parameter: Timepoint (hr) Value: 8
  misc_feature: MA Experiment 20001450 PARAMETER Experiment Name: At_Far-red-induction_P Parameter: Tissue Value: Whole Plant
  misc_feature: MA Experiment ID: 20001557 Result: Up-regulated in Transcription
  misc_feature: MA Experiment 20001557 PARAMETER Experiment Name: At_Drought_Soil_Dry_P Parameter: Age (day) Value: 27
  misc_feature: MA Experiment 20001557 PARAMETER Experiment Name: At_Drought_Soil_Dry_P Parameter: Organism Value: A. thaliana
  misc_feature: MA Experiment 20001557 PARAMETER Experiment Name: At_Drought_Soil_Dry_P Parameter: Plant Line Value: WS
  misc_feature: MA Experiment 20001557 PARAMETER Experiment Name: At_Drought_Soil_Dry_P Parameter: Post Timepoint (hr) Value: 3
  misc_feature: MA Experiment 20001557 PARAMETER Experiment Name: At_Drought_Soil_Dry_P Parameter: Post-Treatment Value: Re-Water vs. No Drought
  misc_feature: MA Experiment 20001557 PARAMETER Experiment Name: At_Drought_Soil_Dry_P Parameter: Timepoint (day) Value: 13
  misc_feature: MA Experiment 20001557 PARAMETER Experiment Name: At_Drought_Soil_Dry_P Parameter: Treatment Value: Drought vs. No Drought
  misc_feature: MA Experiment ID: 20001904 Result: Up-regulated in Transcription
  misc_feature: MA Experiment 20001904 PARAMETER Experiment Name: At_Drought_Reproduction_P Parameter: Age (day) Value: 37
  misc_feature: MA Experiment 20001904 PARAMETER Experiment Name: At_Drought_Reproduction_P Parameter: Organism Value: A. thaliana
  misc_feature: MA Experiment 20001904 PARAMETER Experiment Name: At_Drought_Reproduction_P Parameter: Plant Line Value: WS
  misc_feature: MA Experiment 20001904 PARAMETER Experiment Name: At_Drought_Reproduction_P Parameter: Timepoint (day) Value: 7
  misc_feature: MA Experiment 20001904 PARAMETER Experiment Name: At_Drought_Reproduction_P Parameter: Tissue Value: Rosettes
  misc_feature: MA Experiment 20001904 PARAMETER Experiment Name: At_Drought_Reproduction_P Parameter: Treatment Value: Drought vs. No Drought
  misc_feature: MA Experiment ID: 20001905 Result: Up-regulated in Transcription
  misc_feature: MA Experiment 20001905 PARAMETER Experiment Name: At_Drought_Reproduction_P Parameter: Age (day) Value: 40
  misc_feature: MA Experiment 20001905 PARAMETER Experiment Name: At_Drought_Reproduction_P Parameter: Organism Value: A. thaliana
  misc_feature: MA Experiment 20001905 PARAMETER Experiment Name: At_Drought_Reproduction_P Parameter: Plant Line Value: WS
  misc_feature: MA Experiment 20001905 PARAMETER Experiment Name: At_Drought_Reproduction_P Parameter: Timepoint (day) Value: 10
  misc_feature: MA Experiment 20001905 PARAMETER Experiment Name: At_Drought_Reproduction_P Parameter: Tissue Value: Rosettes
  misc_feature: MA Experiment 20001905 PARAMETER Experiment Name: At_Drought_Reproduction_P Parameter: Treatment Value: Drought vs. No Drought
  misc_feature: MA Experiment ID: 20001909 Result: Up-regulated in Transcription
  misc_feature: MA Experiment 20001909 PARAMETER Experiment Name: At_Drought_Reproduction_P Parameter: Age (day) Value: 35
  misc_feature: MA Experiment 20001909 PARAMETER Experiment Name: At_Drought_Reproduction_P Parameter: Organism Value: A. thaliana
  misc_feature: MA Experiment 20001909 PARAMETER Experiment Name: At_Drought_Reproduction_P Parameter: Plant Line Value: WS
  misc_feature: MA Experiment 20001909 PARAMETER Experiment Name: At_Drought_Reproduction_P Parameter: Timepoint (day) Value: 5
  misc_feature: MA Experiment 20001909 PARAMETER Experiment Name: At_Drought_Reproduction_P Parameter: Tissue Value: Flowers
  misc_feature: MA Experiment 20001909 PARAMETER Experiment Name: At_Drought_Reproduction_P Parameter: Treatment Value: Drought vs. No Drought
aagaactttcccagttttgttttttaatcatatcaaagcaaactgtgtgatggataagtacaaagtcgccggaaaatttggtctcccggacatcacggtggcagagatggaatctttagctagcttttgtgaagctgtcttgccttcagtgcagccaccgccggaagagctttccggtgaaggtgataaccatcggaacaaagaggctctccggtcattttactcaacttctgggtctaaaactcctgtccttcgccagagcattgagctggtcacgaaacgagggacaatagaagcttatattgctactaggcttatattgttcttgcttgctactcggcttgggacgcttctcatttgtggaaccgagtgtttggtctcaagatggccttttgtcgagaaatttagtgagctctcgttggagaagagagaaagagtacttcagaaacaattcaagaattggattctgactccaattagagctgcttttgtctacatcaaagttgcattcctcttctgtttcttctcccgggtgaatccaaatggcgaaaacccggcatgggaagccatagggtatcgtgttaaccccgatgagaacaaaccttctgaaactcataacgaaagaccacttgagaaagggatagtggagacgatggaagaaacagagcagactcttcttgaatcacttgctcataaaggcctagaagcggttcttgacacggagcatgatgcgatcagaataaaatgtgatgttgtggtcgtcgggtctggttcaggaggaggcgtagcagcttctgttctagcgaaatctggtttaaaagtggttgttcttgaaaaaggaagctactttacgccttctgaacatcgtcctttcgaaggtcctggcttggataaactctacgagaatggagggattctcccgagtgttgatgggagttttatggtgttggctggagcaactgtaggtggtggatctgctgtgaactggtctgcgtgtatcaaaaccccgaagtcggttcttcaagaatggtcagaggatcaaaatatacctcttttcggtactaaagaatatctaacggctatggaagttgtgtggaagaggatgggtgtcacggagaaatgtgaactggagagttttcagaatcagattctgagaaaaggttgcgaaaatctcgggttcaatgttgaaaacgtgccaagaaactcctcggagagtcattactgtggatcttgcgggtatggatgtagacaaggagacaagaaaggaagtgaccggacttggcttgtcgatgcggtggggcacggtgccgtgattcttactggatgtaaagcggagagattcatactcgaaaagaacggtagtaacaaaggaggcaagcaaatgaaatgtttgggagtgatggctaaatctttaaacggaaacatagcaaagatgttaaagattgaagctaaagtaacggtttcagcagggggtgctcttttaacacctccgttgatgatatctagcgggttgagaaaccgaaacatcggtaaaaaccttcacttacaccctgttttaatggcgtggggttacttcccggacaaggaatcttctaacatcagtttcaagggaaattcatatgaaggcgggatcataacatcagtgagcaaagtgttatcagaagattctgaagtcagagcaatcatagagacaccgcaactaggaccaggttcgttctccgttttaactccttggacctctgggcttgacatgaagaaaagaatggctagatactcaagaaccgcgagtctcataaccatagttagagaccgcgggtcaggagaagttaaaaccgaaggcagaataaactacaccgtggacaaaaccgacagagataatctcaaagctgggcttagagagtcgctaaggatactaatagcagctggagcagaggaagtgggaactcacagaagcgacgggcagagactaatatgcaaaggtgtcaatgagaattcgatccaagagtttttagactcggtgagtacagaggaaggagcaaagggaatgactgagaaatggaacgtttatagctcagctcatcagatgggaagctgtagaattggagaaaatgaaaaagaaggtgcaatagatttgaatggagagagttgggaagcagagaagttgtttgtgtgcgatgcaagtgcgttgcctagtgctgttggtgttaaccctatgatcacagtcatgtctacggcttattgtatctccacaagaatcgctaagtccatgaccactggtttatctcattgaactaaaataacgtatactttctattcatcctaatcaaatttatgtgtaaccaacatgataattcatagttaaagactcttctattgatcatgtctactaataaaatccatgttttggaaacgtt

SEQ ID NO: 38819 - protein, 762 aa, Arabidopsis thaliana
  peptide (1)..(762): Ceres Seq. ID no. 12325653
  misc_feature (250)..(525): Pfam Name: GMC oxidoreductase Pfam Description: GMC oxidoreductase
  misc_feature (250)..(525): Pfam Name: GMC oxidoreductase Pfam Description: GMC oxidoreductase
  misc_feature (181)..(752): Homolog of NCBI NO: 15234998 NR Description: putative protein; protein id: At4g19380.1
  misc_feature (178)..(757): Homolog of NCBI NO: 37535330 NR Description: putative alcohol oxidase [Oryza sativa (japonica
  misc_feature (177)..(759): Homolog of NCBI NO: 16905151 NR Description: putative alcohol oxidase [Oryza sativa]
  misc_feature (176)..(759): Homolog of NCBI NO: 37535334 NR Description: putative oxidase [Oryza sativa (japonica
  misc_feature (80)..(756): Homolog of NCBI NO: 25367436 NR Description: hypothetical protein [imported] - Arabidopsis
  misc_feature (181)..(752): Homolog of NCBI NO: 15234998 NR Description: putative protein; protein id: At4g19380.1
  misc_feature (177)..(759): Homolog of NCBI NO: 16905151 NR Description: putative alcohol oxidase [Oryza sativa]
  misc_feature (80)..(756): Homolog of NCBI NO: 25367436 NR Description: hypothetical protein [imported] - Arabidopsis
  misc_feature (34)..(756): Homolog of NCBI NO: 15235348 NR Description: putative protein
  misc_feature (34)..(756): Homolog of NCBI NO: 21554016 NR Description: unknown [Arabidopsis thaliana]
  misc_feature (34)..(756): Homolog of NCBI NO: 14532706 NR Description: unknown protein [Arabidopsis thaliana]
  misc_feature (185)..(758): Homolog of NCBI NO: 37535318 NR Description: putative alcohol oxidase [Oryza sativa (japonica
  misc_feature (34)..(142): Homolog of NCBI NO: 37535318 NR Description: putative alcohol oxidase [Oryza sativa (japonica
  misc_feature (176)..(759): Homolog of NCBI NO: 37535334 NR Description: putative oxidase [Oryza sativa (japonica
  misc_feature (178)..(757): Homolog of NCBI NO: 37535330 NR Description: putative alcohol oxidase [Oryza sativa (japonica
  misc_feature (34)..(142): Homolog of NCBI NO: 37535318 NR Description: putative alcohol oxidase [Oryza sativa (japonica
  misc_feature (185)..(758): Homolog of NCBI NO: 37535318 NR Description: putative alcohol oxidase [Oryza sativa (japonica
  misc_feature (34)..(756): Homolog of NCBI NO: 14532706 NR Description: unknown protein [Arabidopsis thaliana]
  misc_feature (34)..(756): Homolog of NCBI NO: 21554016 NR Description: unknown [Arabidopsis thaliana]
  misc_feature (34)..(756): Homolog of NCBI NO: 15235348 NR Description: putative protein
RTFPVLFFNHIKANCVMDKYKVAGKFGLPDITVAEMESLASFCEAVLPSVQPPPEELSGEGDNHRNKEALRSFYSTSGSKTPVLRQSIELVTKRGTIEAYIATRLILFLLATRLGTLLICGTECLVSRWPFVEKFSELSLEKRERVLQKQFKNWILTPIRAAFVYIKVAFLFCFFSRVNPNGENPAWEAIGYRVNPDENKPSETHNERPLEKGIVETMEETEQTLLESLAHKGLEAVLDTEHDAIRIKCDVVVVGSGSGGGVAASVLAKSGLKVVVLEKGSYFTPSEHRPFEGPGLDKLYENGGILPSVDGSFMVLAGATVGGGSAVNWSACIKTPKSVLQEWSEDQNIPLFGTKEYLTAMEVVWKRMGVTEKCELESFQNQILRKGCENLGFNVENVPRNSSESHYCGSCGYGCRQGDKKGSDRTWLVDAVGHGAVILTGCKAERFILEKNGSNKGGKQMKCLGVMAKSLNGNIAKMLKIEAKVTVSAGGALLTPPLMISSGLRNRNIGKNLHLHPVLMAWGYFPDKESSNISFKGNSYEGGIITSVSKVLSEDSEVRAIIETPQLGPGSFSVLTPWTSGLDMKKRMARYSRTASLITIVRDRGSGEVKTEGRINYTVDKTDRDNLKAGLRESLRILIAAGAEEVGTHRSDGQRLICKGVNENSIQEFLDSVSTEEGAKGMTEKWNVYSSAHQMGSCRIGENEKEGAIDLNGESWEAEKLFVCDASALPSAVGVNPMITVMSTAYCISTRIAKSMTTGLSH

SEQ ID NO: 38820 - protein, 746 aa, Arabidopsis thaliana
  peptide (1)..(746): Ceres Seq. ID no. 12325654
  misc_feature (234)..(509): Pfam Name: GMC oxidoreductase Pfam Description: GMC oxidoreductase
  misc_feature (234)..(509): Pfam Name: GMC oxidoreductase Pfam Description: GMC oxidoreductase
  misc_feature (165)..(736): Homolog of NCBI NO: 15234998 NR Description: putative protein; protein id: At4g19380.1
  misc_feature (162)..(741): Homolog of NCBI NO: 37535330 NR Description: putative alcohol oxidase [Oryza sativa (japonica
  misc_feature (161)..(743): Homolog of NCBI NO: 16905151 NR Description: putative alcohol oxidase [Oryza sativa]
  misc_feature (160)..(743): Homolog of NCBI NO: 37535334 NR Description: putative oxidase [Oryza sativa (japonica
  misc_feature (64)..(740): Homolog of NCBI NO: 25367436 NR Description: hypothetical protein [imported] - Arabidopsis
  misc_feature (165)..(736): Homolog of NCBI NO: 15234998 NR Description: putative protein; protein id: At4g19380.1
  misc_feature (161)..(743): Homolog of NCBI NO: 16905151 NR Description: putative alcohol oxidase [Oryza sativa]
  misc_feature (64)..(740): Homolog of NCBI NO: 25367436 NR Description: hypothetical protein [imported] - Arabidopsis
  misc_feature (18)..(740): Homolog of NCBI NO: 15235348 NR Description: putative protein
  misc_feature (18)..(740): Homolog of NCBI NO: 21554016 NR Description: unknown [Arabidopsis thaliana]
  misc_feature (18)..(740): Homolog of NCBI NO: 14532706 NR Description: unknown protein [Arabidopsis thaliana]
  misc_feature (169)..(742): Homolog of NCBI NO: 37535318 NR Description: putative alcohol oxidase [Oryza sativa (japonica
  misc_feature (18)..(126): Homolog of NCBI NO: 37535318 NR Description: putative alcohol oxidase [Oryza sativa (japonica
  misc_feature (160)..(743): Homolog of NCBI NO: 37535334 NR Description: putative oxidase [Oryza sativa (japonica
  misc_feature (162)..(741): Homolog of NCBI NO: 37535330 NR Description: putative alcohol oxidase [Oryza sativa (japonica
  misc_feature (18)..(126): Homolog of NCBI NO: 37535318 NR Description: putative alcohol oxidase [Oryza sativa (japonica
  misc_feature (169)..(742): Homolog of NCBI NO: 37535318 NR Description: putative alcohol oxidase [Oryza sativa (japonica
  misc_feature (18)..(740): Homolog of NCBI NO: 14532706 NR Description: unknown protein [Arabidopsis thaliana]
  misc_feature (18)..(740): Homolog of NCBI NO: 21554016 NR Description: unknown [Arabidopsis thaliana]
  misc_feature (18)..(740): Homolog of NCBI NO: 15235348 NR Description: putative protein
MDKYKVAGKFGLPDITVAEMESLASFCEAVLPSVQPPPEELSGEGDNHRNKEALRSFYSTSGSKTPVLRQSIELVTKRGTIEAYIATRLILFLLATRLGTLLICGTECLVSRWPFVEKFSELSLEKRERVLQKQFKNWILTPIRAAFVYIKVAFLFCFFSRVNPNGENPAWEAIGYRVNPDENKPSETHNERPLEKGIVETMEETEQTLLESLAHKGLEAVLDTEHDAIRIKCDVVVVGSGSGGGVAASVLAKSGLKVVVLEKGSYFTPSEHRPFEGPGLDKLYENGGILPSVDGSFMVLAGATVGGGSAVNWSACIKTPKSVLQEWSEDQNIPLFGTKEYLTAMEVVWKRMGVTEKCELESFQNQILRKGCENLGFNVENVPRNSSESHYCGSCGYGCRQGDKKGSDRTWLVDAVGHGAVILTGCKAERFILEKNGSNKGGKQMKCLGVMAKSLNGNIAKMLKIEAKVTVSAGGALLTPPLMISSGLRNRNIGKNLHLHPVLMAWGYFPDKESSNISFKGNSYEGGIITSVSKVLSEDSEVRAIIETPQLGPGSFSVLTPWTSGLDMKKRMARYSRTASLITIVRDRGSGEVKTEGRINYTVDKTDRDNLKAGLRESLRILIAAGAEEVGTHRSDGQRLICKGVNENSIQEFLDSVSTEEGAKGMTEKWNVYSSAHQMGSCRIGENEKEGAIDLNGESWEAEKLFVCDASALPSAVGVNPMITVMSTAYCISTRIAKSMTTGLSH

SEQ ID NO: 38821 - protein, 727 aa, Arabidopsis thaliana
  peptide (1)..(727): Ceres Seq. ID no. 12325655
  misc_feature (215)..(490): Pfam Name: GMC oxidoreductase Pfam Description: GMC oxidoreductase
  misc_feature (215)..(490): Pfam Name: GMC oxidoreductase Pfam Description: GMC oxidoreductase
  misc_feature (146)..(717): Homolog of NCBI NO: 15234998 NR Description: putative protein; protein id: At4g19380.1
  misc_feature (143)..(722): Homolog of NCBI NO: 37535330 NR Description: putative alcohol oxidase [Oryza sativa (japonica
  misc_feature (142)..(724): Homolog of NCBI NO: 16905151 NR Description: putative alcohol oxidase [Oryza sativa]
  misc_feature (141)..(724): Homolog of NCBI NO: 37535334 NR Description: putative oxidase [Oryza sativa (japonica
  misc_feature (45)..(721): Homolog of NCBI NO: 25367436 NR Description: hypothetical protein [imported] - Arabidopsis
  misc_feature (146)..(717): Homolog of NCBI NO: 15234998 NR Description: putative protein; protein id: At4g19380.1
  misc_feature (142)..(724): Homolog of NCBI NO: 16905151 NR Description: putative alcohol oxidase [Oryza sativa]
  misc_feature (45)..(721): Homolog of NCBI NO: 25367436 NR Description: hypothetical protein [imported] - Arabidopsis
  misc_feature (1)..(721): Homolog of NCBI NO: 15235348 NR Description: putative protein
  misc_feature (1)..(721): Homolog of NCBI NO: 21554016 NR Description: unknown [Arabidopsis thaliana]
  misc_feature (1)..(721): Homolog of NCBI NO: 14532706 NR Description: unknown protein [Arabidopsis thaliana]
  misc_feature (150)..(723): Homolog of NCBI NO: 37535318 NR Description: putative alcohol oxidase [Oryza sativa (japonica
  misc_feature (1)..(107): Homolog of NCBI NO: 37535318 NR Description: putative alcohol oxidase [Oryza sativa (japonica
  misc_feature (141)..(724): Homolog of NCBI NO: 37535334 NR Description: putative oxidase [Oryza sativa (japonica
  misc_feature (143)..(722): Homolog of NCBI NO: 37535330 NR Description: putative alcohol oxidase [Oryza sativa (japonica
  misc_feature (1)..(107): Homolog of NCBI NO: 37535318 NR Description: putative alcohol oxidase [Oryza sativa (japonica
  misc_feature (150)..(723): Homolog of NCBI NO: 37535318 NR Description: putative alcohol oxidase [Oryza sativa (japonica
  misc_feature (1)..(721): Homolog of NCBI NO: 14532706 NR Description: unknown protein [Arabidopsis thaliana]
  misc_feature (1)..(721): Homolog of NCBI NO: 21554016 NR Description: unknown [Arabidopsis thaliana]
  misc_feature (1)..(721): Homolog of NCBI NO: 15235348 NR Description: putative protein
MESLASFCEAVLPSVQPPPEELSGEGDNHRNKEALRSFYSTSGSKTPVLRQSIELVTKRGTIEAYIATRLILFLLATRLGTLLICGTECLVSRWPFVEKFSELSLEKRERVLQKQFKNWILTPIRAAFVYIKVAFLFCFFSRVNPNGENPAWEAIGYRVNPDENKPSETHNERPLEKGIVETMEETEQTLLESLAHKGLEAVLDTEHDAIRIKCDVVVVGSGSGGGVAASVLAKSGLKVVVLEKGSYFTPSEHRPFEGPGLDKLYENGGILPSVDGSFMVLAGATVGGGSAVNWSACIKTPKSVLQEWSEDQNIPLFGTKEYLTAMEVVWKRMGVTEKCELESFQNQILRKGCENLGFNVENVPRNSSESHYCGSCGYGCRQGDKKGSDRTWLVDAVGHGAVILTGCKAERFILEKNGSNKGGKQMKCLGVMAKSLNGNIAKMLKIEAKVTVSAGGALLTPPLMISSGLRNRNIGKNLHLHPVLMAWGYFPDKESSNISFKGNSYEGGIITSVSKVLSEDSEVRAIIETPQLGPGSFSVLTPWTSGLDMKKRMARYSRTASLITIVRDRGSGEVKTEGRINYTVDKTDRDNLKAGLRESLRILIAAGAEEVGTHRSDGQRLICKGVNENSIQEFLDSVSTEEGAKGMTEKWNVYSSAHQMGSCRIGENEKEGAIDLNGESWEAEKLFVCDASALPSAVGVNPMITVMSTAYCISTRIAKSMTTGLSH

SEQ ID NO: 38822 - DNA, 1371 bp, Arabidopsis thaliana
  misc_feature (1)..(1371): Ceres Seq. ID no. 12340245
  misc_feature: MA Experiment ID: 108569 Result: Up-regulated in Transcription
  misc_feature: MA Experiment 108569 PARAMETER Experiment Name: At_0.001%_MeJA__cDNA_P Parameter: Timepoint (hr) Value: 6
  misc_feature: MA Experiment 108569 PARAMETER Experiment Name: At_0.001%_MeJA__cDNA_P Parameter: Tissue Value: Aerial
  misc_feature: MA Experiment 108569 PARAMETER Experiment Name: At_0.001%_MeJA__cDNA_P Parameter: Treatment Value: 0.001% MeJA vs. No Treatment
  misc_feature: MA Experiment ID: 108577 Result: Up-regulated in Transcription
  misc_feature: MA Experiment 108577 PARAMETER Experiment Name: At_42deg_Heat_cDNA_P Parameter: Temperature (deg C) Value: 42 vs. 22
  misc_feature: MA Experiment 108577 PARAMETER Experiment Name: At_42deg_Heat_cDNA_P Parameter: Timepoint (hr) Value: 6
  misc_feature: MA Experiment 108577 PARAMETER Experiment Name: At_42deg_Heat_cDNA_P Parameter: Tissue Value: Aerial
  misc_feature: MA Experiment ID: 108579 Result: Down-regulated in Transcription
  misc_feature: MA Experiment 108579 PARAMETER Experiment Name: At_4deg_Cold_cDNA_P Parameter: Temperature (deg C) Value: 4 vs. 22
  misc_feature: MA Experiment 108579 PARAMETER Experiment Name: At_4deg_Cold_cDNA_P Parameter: Timepoint (hr) Value: 6
  misc_feature: MA Experiment 108579 PARAMETER Experiment Name: At_4deg_Cold_cDNA_P Parameter: Tissue Value: Aerial
  misc_feature: MA Experiment ID: 108595 Result: Down-regulated in Transcription
  misc_feature: MA Experiment 108595 PARAMETER Experiment Name: At_Ler-pi_Ovule_cDNA_P Parameter: Plant Line Value: null
  misc_feature: MA Experiment ID: 20000093 Result: Up-regulated in Transcription
  misc_feature: MA Experiment 20000093 PARAMETER Experiment Name: At_42deg_Heat_cDNA_P Parameter: Temperature (deg C) Value: 42 vs. 22
  misc_feature: MA Experiment 20000093 PARAMETER Experiment Name: At_42deg_Heat_cDNA_P Parameter: Timepoint (hr) Value: 0.5
  misc_feature: MA Experiment 20000093 PARAMETER Experiment Name: At_42deg_Heat_cDNA_P Parameter: Tissue Value: Aerial
  misc_feature: MA Experiment ID: 20000111 Result: Up-regulated in Transcription
  misc_feature: MA Experiment 20000111 PARAMETER Experiment Name: At_42deg_Heat_cDNA_P Parameter: Temperature (deg C) Value: 42 vs. 22
  misc_feature: MA Experiment 20000111 PARAMETER Experiment Name: At_42deg_Heat_cDNA_P Parameter: Timepoint (hr) Value: 6
  misc_feature: MA Experiment 20000111 PARAMETER Experiment Name: At_42deg_Heat_cDNA_P Parameter: Tissue Value: Aerial
  misc_feature: MA Experiment ID: 20000144 Result: Up-regulated in Transcription
  misc_feature: MA Experiment 20000144 PARAMETER Experiment Name: At_42deg_Heat_cDNA_P Parameter: Temperature (deg C) Value: 42 vs. 22
  misc_feature: MA Experiment 20000144 PARAMETER Experiment Name: At_42deg_Heat_cDNA_P Parameter: Timepoint (hr) Value: 1
  misc_feature: MA Experiment 20000144 PARAMETER Experiment Name: At_42deg_Heat_cDNA_P Parameter: Tissue Value: Aerial
  misc_feature: MA Experiment ID: 20000171 Result: Up-regulated in Transcription
  misc_feature: MA Experiment 20000171 PARAMETER Experiment Name: At_42deg_Heat_P Parameter: Age (day) Value: 14
  misc_feature: MA Experiment 20000171 PARAMETER Experiment Name: At_42deg_Heat_P Parameter: Organism Value: A. thaliana
  misc_feature: MA Experiment 20000171 PARAMETER Experiment Name: At_42deg_Heat_P Parameter: Plant Line Value: WS
  misc_feature: MA Experiment 20000171 PARAMETER Experiment Name: At_42deg_Heat_P Parameter: Temperature (deg C) Value: 42 vs. 22
  misc_feature: MA Experiment 20000171 PARAMETER Experiment Name: At_42deg_Heat_P Parameter: Timepoint (hr) Value: 1
  misc_feature: MA Experiment 20000171 PARAMETER Experiment Name: At_42deg_Heat_P Parameter: Tissue Value: Aerial
  misc_feature: MA Experiment ID: 20000173 Result: Up-regulated in Transcription
  misc_feature: MA Experiment 20000173 PARAMETER Experiment Name: At_42deg_Heat_P Parameter: Age (day) Value: 14
  misc_feature: MA Experiment 20000173 PARAMETER Experiment Name: At_42deg_Heat_P Parameter: Organism Value: A. thaliana
  misc_feature: MA Experiment 20000173 PARAMETER Experiment Name: At_42deg_Heat_P Parameter: Plant Line Value: WS
  misc_feature: MA Experiment 20000173 PARAMETER Experiment Name: At_42deg_Heat_P Parameter: Temperature (deg C) Value: 42 vs. 22
  misc_feature: MA Experiment 20000173 PARAMETER Experiment Name: At_42deg_Heat_P Parameter: Timepoint (hr) Value: 6
  misc_feature: MA Experiment 20000173 PARAMETER Experiment Name: At_42deg_Heat_P Parameter: Tissue Value: Aerial
  misc_feature: MA Experiment ID: 20000224 Result: Down-regulated in Transcription
  misc_feature: MA Experiment ID: 20000227 Result: Down-regulated in Transcription
  misc_feature: MA Experiment 20000227 PARAMETER Experiment Name: At_Root-Tips-vs-Tops_P Parameter: Tissue Value: Root Tips vs. Root Tops
  misc_feature: MA Experiment ID: 20000234 Result: Down-regulated in Transcription
  misc_feature: MA Experiment 20000234 PARAMETER Experiment Name: At_Siliques_P Parameter: Age (day) Value: 21
  misc_feature: MA Experiment 20000234 PARAMETER Experiment Name: At_Siliques_P Parameter: Organism Value: A. thaliana
  misc_feature: MA Experiment 20000234 PARAMETER Experiment Name: At_Siliques_P Parameter: Plant Line Value: WS
  misc_feature: MA Experiment 20000234 PARAMETER Experiment Name: At_Siliques_P Parameter: Tissue Value: Less Than 5mm Siliques vs. Whole Plant
  misc_feature: MA Experiment ID: 20000264 Result: Down-regulated in Transcription
  misc_feature: MA Experiment 20000264 PARAMETER Experiment Name: At_Open_Flower_P Parameter: Age (day) Value: 21
  misc_feature: MA Experiment 20000264 PARAMETER Experiment Name: At_Open_Flower_P Parameter: Plant Line Value: WS
  misc_feature: MA Experiment 20000264 PARAMETER Experiment Name: At_Open_Flower_P Parameter: Tissue Value: Open Flower vs. Whole Plant
  misc_feature: MA Experiment ID: 20000265 Result: Down-regulated in Transcription
  misc_feature: MA Experiment 20000265 PARAMETER Experiment Name: At_Open_Flower_P Parameter: Age (day) Value: 21
  misc_feature: MA Experiment 20000265 PARAMETER Experiment Name: At_Open_Flower_P Parameter: Plant Line Value: WS
  misc_feature: MA Experiment 20000265 PARAMETER Experiment Name: At_Open_Flower_P Parameter: Tissue Value: Closed Flower vs. Whole Plant
aacgtagaagaagctgatttaaatcccaaatccatttcaacgtagaagcttctacagattcgatttgggtgtctttggttttggatttggtaaagcttctcggtcacttgcttggtgattgaaattgaatcgattgtgattgtgattgtgagggaattatggctcaagccgtagaagaatggtacaagcagatgccgattataacccggtcgtatctcacggcggctgtagtcaccaccgtcgggtgttcgctcgaggtttgaagttttctgactcatgaaagcctttagctttgctctgattgatctgattagtttttccttgaaaaattgaatctttgtgtttctgttatgtatgtggatggttttgtttttttgatgtaaaaggtagctctttattggaattggggtagctaacgaatggttaagtttagagctaagtgttgtggtgttatggcttatgatgtaacattttgtggaacatttttttgttttgcagattatatctccttataatctctacctaaatcctacccttgtggtgaagcaataccagttctggcgtcttgttaccaatttcctttatttcagaaagatggatttggactttttgttccatatgttttttctagctcgatactgcaaactgctcgaagaaaactccttcaggggaaagactgcggatttcctttacatgctcttattcggggcaactgttctaactggtattgttctcattggcggaatgataccttatttgtccgtttcattctccaaaatcatcttcctcagcaattcattgactttcatgatggtctatgtatggagtaaacaaaatccttacatccacatgagtttccttggcctcttcactttcacagcagcttatttaccatgggtacttcttggattctctatccttgttggtgcaagtgcatggggggattttctgggaatgatagcgggccacgcatactacttcttggcgtttgtgtatccacgaatgacggatcgacgtcccttgaaaactccatctttcctcaaagccctatttgctgatgagccagtcgtgattgcaaggccagaagatgtgagatttgctcatgcgccttttgatgaaatccaccaagactgaatcttgatcctccacaaaacaccagccacaacgcacagttcaagtgtactcagataatgttattgattcttgacctttatagttgtggataatgtggaagtgagatagtgttggctctgatttttttccctagttttccgtcttcttttcttgtccgatacaaatgtgtttcctccttgtgcatatgaactcaaattgtgtacaaagtcttcaaaagtactagtttatagtttcgtc

SEQ ID NO: 38823 - protein, 179 aa, Arabidopsis thaliana; identical to SEQ ID NO: 21060
  peptide (1)..(179): Ceres Seq. ID no. 12340246
  misc_feature (1)..(147): Pfam Name: Der1-like family Pfam Description: Der1-like family
  misc_feature (1)..(157): Homolog of NCBI NO: 31455614 NR Description: carcinoma related gene [Homo sapiens]
  misc_feature (1)..(165): Homolog of NCBI NO: 31219425 NR Description: ENSANGP00000001887 [Anopheles gambiae]
  misc_feature (1)..(174): Homolog of NCBI NO: 40352706 NR Description: Unknown (protein for MGC:63991) [Danio rerio]
  misc_feature (74)..(179): Homolog of NCBI NO: 4455289 NR Description: putative protein [Arabidopsis thaliana]
  misc_feature (1)..(179): Homolog of NCBI NO: 27573354 NR Description: putative Der1-like protein
  misc_feature (1)..(179): Homolog of NCBI NO: 25407582 NR Description: hypothetical protein AT4g21810 [imported] -
  misc_feature (1)..(179): Homolog of NCBI NO: 7487831 NR Description: hypothetical protein T8O5.20 - Arabidopsis
  misc_feature (1)..(179): Homolog of NCBI NO: 15234480 NR Description: unknown protein
  misc_feature (1)..(179): Homolog of NCBI NO: 22328865 NR Description: putative protein
  misc_feature (1)..(179): Homolog of NCBI NO: 17473759 NR Description: putative protein [Arabidopsis thaliana]

SEQ ID NO: 38824 - protein, 171 aa, Arabidopsis thaliana
  peptide (1)..(171): Ceres Seq. ID no. 12340247
  misc_feature (1)..(139): Pfam Name: Der1-like family Pfam Description: Der1-like family
  misc_feature (1)..(149): Homolog of NCBI NO: 31455614 NR Description: carcinoma related gene [Homo sapiens]
  misc_feature (1)..(157): Homolog of NCBI NO: 31219425 NR Description: ENSANGP00000001887 [Anopheles gambiae]
  misc_feature (1)..(166): Homolog of NCBI NO: 40352706 NR Description: Unknown (protein for MGC:63991) [Danio rerio]
  misc_feature (66)..(171): Homolog of NCBI NO: 4455289 NR Description: putative protein [Arabidopsis thaliana]
  misc_feature (1)..(171): Homolog of NCBI NO: 27573354 NR Description: putative Der1-like protein
  misc_feature (1)..(171): Homolog of NCBI NO: 25407582 NR Description: hypothetical protein AT4g21810 [imported] -
  misc_feature (1)..(171): Homolog of NCBI NO: 7487831 NR Description: hypothetical protein T8O5.20 - Arabidopsis
  misc_feature (1)..(171): Homolog of NCBI NO: 15234480 NR Description: unknown protein
  misc_feature (1)..(171): Homolog of NCBI NO: 22328865 NR Description: putative protein
  misc_feature (1)..(171): Homolog of NCBI NO: 17473759 NR Description: putative protein [Arabidopsis thaliana]
MFFLARYCKLLEENSFRGKTADFLYMLLFGATVLTGIVLIGGMIPYLSVSFSKIIFLSNSLTFMMVYVWSKQNPYIHMSFLGLFTFTAAYLPWVLLGFSILVGASAWGDFLGMIAGHAYYFLAFVYPRMTDRRPLKTPSFLKALFADEPVVIARPEDVRFAHAPFDEIHQD

SEQ ID NO: 38825 - protein, 146 aa, Arabidopsis thaliana
  peptide (1)..(146): Ceres Seq. ID no. 12340248
  misc_feature (1)..(114): Pfam Name: Der1-like family Pfam Description: Der1-like family
  misc_feature (1)..(124): Homolog of NCBI NO: 31455614 NR Description: carcinoma related gene [Homo sapiens]
  misc_feature (1)..(132): Homolog of NCBI NO: 31219425 NR Description: ENSANGP00000001887 [Anopheles gambiae]
  misc_feature (1)..(141): Homolog of NCBI NO: 40352706 NR Description: Unknown (protein for MGC:63991) [Danio rerio]
  misc_feature (41)..(146): Homolog of NCBI NO: 4455289 NR Description: putative protein [Arabidopsis thaliana]
  misc_feature (1)..(146): Homolog of NCBI NO: 27573354 NR Description: putative Der1-like protein
  misc_feature (1)..(146): Homolog of NCBI NO: 25407582 NR Description: hypothetical protein AT4g21810 [imported] -
  misc_feature (1)..(146): Homolog of NCBI NO: 7487831 NR Description: hypothetical protein T8O5.20 - Arabidopsis
  misc_feature (1)..(146): Homolog of NCBI NO: 15234480 NR Description: unknown protein
  misc_feature (1)..(146): Homolog of NCBI NO: 22328865 NR Description: putative protein
  misc_feature (1)..(146): Homolog of NCBI NO: 17473759 NR Description: putative protein [Arabidopsis thaliana]
MLLFGATVLTGIVLIGGMIPYLSVSFSKIIFLSNSLTFMMVYVWSKQNPYIHMSFLGLFTFTAAYLPWVLLGFSILVGASAWGDFLGMIAGHAYYFLAFVYPRMTDRRPLKTPSFLKALFADEPVVIARPEDVRFAHAPFDEIHQD

SEQ ID NO: 38826 - DNA, 2701 bp, Arabidopsis thaliana
  misc_feature (1)..(2701): Ceres Seq. ID no. 12599860
  misc_feature: MA Experiment ID: 20000171 Result: Up-regulated in Transcription
  misc_feature: MA Experiment 20000171 PARAMETER Experiment Name: At_42deg_Heat_P Parameter: Age (day) Value: 14
  misc_feature: MA Experiment 20000171 PARAMETER Experiment Name: At_42deg_Heat_P Parameter: Organism Value: A. thaliana
  misc_feature: MA Experiment 20000171 PARAMETER Experiment Name: At_42deg_Heat_P Parameter: Plant Line Value: WS
  misc_feature: MA Experiment 20000171 PARAMETER Experiment Name: At_42deg_Heat_P Parameter: Temperature (deg C) Value: 42 vs. 22
  misc_feature: MA Experiment 20000171 PARAMETER Experiment Name: At_42deg_Heat_P Parameter: Timepoint (hr) Value: 1
  misc_feature: MA Experiment 20000171 PARAMETER Experiment Name: At_42deg_Heat_P Parameter: Tissue Value: Aerial
  misc_feature: MA Experiment ID: 20000180 Result: Up-regulated in Transcription
  misc_feature: MA Experiment 20000180 PARAMETER Experiment Name: At_Germinating_Seeds_P Parameter: Age (hr) Value: 24 vs. 0
  misc_feature: MA Experiment 20000180 PARAMETER Experiment Name: At_Germinating_Seeds_P Parameter: Tissue Value: Germinating Seeds
  misc_feature: MA Experiment ID: 20000184 Result: Down-regulated in Transcription
  misc_feature: MA Experiment 20000184 PARAMETER Experiment Name: At_Shoots__P Parameter: Age (day) Value: 7
  misc_feature: MA Experiment 20000184 PARAMETER Experiment Name: At_Shoots__P Parameter: Tissue Value: Shoots vs. Whole Plant
  misc_feature: MA Experiment ID: 20000227 Result: Up-regulated in Transcription
  misc_feature: MA Experiment 20000227 PARAMETER Experiment Name: At_Root-Tips-vs-Tops_P Parameter: Tissue Value: Root Tips vs. Root Tops
  misc_feature: MA Experiment ID: 20000234 Result: Up-regulated in Transcription
  misc_feature: MA Experiment 20000234 PARAMETER Experiment Name: At_Siliques_P Parameter: Age (day) Value: 21
  misc_feature: MA Experiment 20000234 PARAMETER Experiment Name: At_Siliques_P Parameter: Organism Value: A. thaliana
  misc_feature: MA Experiment 20000234 PARAMETER Experiment Name: At_Siliques_P Parameter: Plant Line Value: WS
  misc_feature: MA Experiment 20000234 PARAMETER Experiment Name: At_Siliques_P Parameter: Tissue Value: Less Than 5mm Siliques vs. Whole Plant
  misc_feature: MA Experiment ID: 20000265 Result: Up-regulated in Transcription
  misc_feature: MA Experiment 20000265 PARAMETER Experiment Name: At_Open_Flower_P Parameter: Age (day) Value: 21
  misc_feature: MA Experiment 20000265 PARAMETER Experiment Name: At_Open_Flower_P Parameter: Plant Line Value: WS
  misc_feature: MA Experiment 20000265 PARAMETER Experiment Name: At_Open_Flower_P Parameter: Tissue Value: Closed Flower vs. Whole Plant
  misc_feature: MA Experiment ID: 20000445 Result: Up-regulated in Transcription
  misc_feature: MA Experiment 20000445 PARAMETER Experiment Name: At_100uM_NAA__P Parameter: Age (day) Value: 14
  misc_feature: MA Experiment 20000445 PARAMETER Experiment Name: At_100uM_NAA__P Parameter: Organism Value: A. thaliana
  misc_feature: MA Experiment 20000445 PARAMETER Experiment Name: At_100uM_NAA__P Parameter: Plant Line Value: WS
  misc_feature: MA Experiment 20000445 PARAMETER Experiment Name: At_100uM_NAA__P Parameter: Timepoint (hr) Value: 6
  misc_feature: MA Experiment 20000445 PARAMETER Experiment Name: At_100uM_NAA__P Parameter: Tissue Value: Aerial
  misc_feature: MA Experiment 20000445 PARAMETER Experiment Name: At_100uM_NAA__P Parameter: Treatment Value: 100uM NAA vs. No Treatment
  misc_feature: MA Experiment ID: 20000794 Result: Down-regulated in Transcription
  misc_feature: MA Experiment 20000794 PARAMETER Experiment Name: At_Petals_P Parameter: Age (day) Value: 23-25 days
  misc_feature: MA Experiment 20000794 PARAMETER Experiment Name: At_Petals_P Parameter: Plant Line Value: WS
  misc_feature: MA Experiment 20000794 PARAMETER Experiment Name: At_Petals_P Parameter: Tissue Value: Petals vs. Whole plant
  misc_feature: MA Experiment ID: 20001248 Result: Down-regulated in Transcription
  misc_feature: MA Experiment 20001248 PARAMETER Experiment Name: At_Far-red-induction_P Parameter: Age (day) Value: 7
  misc_feature: MA Experiment 20001248 PARAMETER Experiment Name: At_Far-red-induction_P Parameter: Light Value: Far-red vs. White
  misc_feature: MA Experiment 20001248 PARAMETER Experiment Name: At_Far-red-induction_P Parameter: Organism Value: A. thaliana
  misc_feature: MA Experiment 20001248 PARAMETER Experiment Name: At_Far-red-induction_P Parameter: Plant Line Value: Columbia
  misc_feature: MA Experiment 20001248 PARAMETER Experiment Name: At_Far-red-induction_P Parameter: Timepoint (hr) Value: 4
  misc_feature: MA Experiment 20001248 PARAMETER Experiment Name: At_Far-red-induction_P Parameter: Tissue Value: Whole Plant
  misc_feature: MA Experiment ID: 20001451 Result: Down-regulated in Transcription
  misc_feature: MA Experiment 20001451 PARAMETER Experiment Name: At_Far-red-induction_P Parameter: Age (day) Value: 7
  misc_feature: MA Experiment 20001451 PARAMETER Experiment Name: At_Far-red-induction_P Parameter: Light Value: Far-red vs. White
  misc_feature: MA Experiment 20001451 PARAMETER Experiment Name: At_Far-red-induction_P Parameter: Organism Value: A. thaliana
  misc_feature: MA Experiment 20001451 PARAMETER Experiment Name: At_Far-red-induction_P Parameter: Plant Line Value: Columbia
  misc_feature: MA Experiment 20001451 PARAMETER Experiment Name: At_Far-red-induction_P Parameter: Timepoint (hr) Value: 24
  misc_feature: MA Experiment 20001451 PARAMETER Experiment Name: At_Far-red-induction_P Parameter: Tissue Value: Whole Plant
  misc_feature: MA Experiment ID: 20001905 Result: Down-regulated in Transcription
  misc_feature: MA Experiment 20001905 PARAMETER Experiment Name: At_Drought_Reproduction_P Parameter: Age (day) Value: 40
  misc_feature: MA Experiment 20001905 PARAMETER Experiment Name: At_Drought_Reproduction_P Parameter: Organism Value: A. thaliana
  misc_feature: MA Experiment 20001905 PARAMETER Experiment Name: At_Drought_Reproduction_P Parameter: Plant Line Value: WS
  misc_feature: MA Experiment 20001905 PARAMETER Experiment Name: At_Drought_Reproduction_P Parameter: Timepoint (day) Value: 10
  misc_feature: MA Experiment 20001905 PARAMETER Experiment Name: At_Drought_Reproduction_P Parameter: Tissue Value: Rosettes
  misc_feature: MA Experiment 20001905 PARAMETER Experiment Name: At_Drought_Reproduction_P Parameter: Treatment Value: Drought vs. No Drought
gagtaacccgaaagcaaagactgagagaaccaaggctccgatctaacaatgaggaagaggacgctcgtgtccgttttgttccttttctcgcttctgtttcttcttccagatcaaggaagaaagttacacgcgaatgcagaagagagttccgatgatgttacagatccaccaaaagttgaggagaaaattggtggtcacggtggtttatcgacggattccgatgtagttcatagagagtctgagtcgatgtcaaagaagacgcttcgcagtaacgcggagaagtttgagttccaagctgaggtttctcggcttatggacattattatcaactctctatacagtaacaaggacattttcttaagagagttgatctccaatgcttctgatgccttggacaaaattaggttccttgcactcactgacaaagacgttttgggtgaaggtgacactgctaagcttgagatccagattaagctagacaaagccaagaagattctttctattcgagaccggggaattggtatgactaaggaagacttaatcaagaaccttggtaccatagcaaaatctggaacgtcagcttttgttgagaaaatgcaatcaagtggggatttgaaccttattggacaatttggagttggattctactctgcctatcttgttgctgactacattgaagtcattagcaagcacaatgatgacagccagtatgtatgggaatcaaaggctaacggtaaatttgctgtttccgaggatacatggaatgagcctcttggacgtggaaccgagattagattacatcttagggatgaagctggcgagtacctagaagaaagtaaacttaaggaattggtgaagagatattctgaattcattaacttccctatctccctctgggctagcaaagaggttgaaaccgaggtcccagttgaggaagatgaatcagctgatgaggaaactgaaaccacctctaccgaggaagaaaaggaagaagatgctgaggaggaagatggtgagaaaaagcagaaaaccaagaaggtgaaagaaacagtttatgaatgggagcttctgaatgatgttaaggctatatggctgagaagtccaaaggaggtgacagaggaagagtacactaaattctaccactctctctcaaaggattttaccgacgagaagccaatggcttggagtcactttaatgctgaaggtgatgttgaattcaaggctgtgttgtatgttcctccgaaagctccccatgatctatacgagagctattacaacagcaacaaggcgaacttgaagctatatgtcaggagggtgttcatctcagatgaatttgatgagcttctgcctaagtatttgagtttcttgaagggtcttgttgactctgacacattgcctctaaatgtatcaagagaaatgcttcaacaacacagcagcttaaagacaattaagaagaagcttatccgaaaggcgcttgatatgatccgcaagcttgctgaagaagatcctgatgaaatccatgatgatgagaaaaaagatgtggagaagtctggtgagaacgatgagaagaagggtcaatacacaaaattctggaacgagtttggcaagtctgtcaaactaggtatcattgaggatgctgctaacaggaaccgcttggcaaaacttcttcgttttgagacaacaaagtccgatggaaaattgacttccctggatcagtacattaagagaatgaaaaagagccaaaaggacatattttacatcacaggaagcagcaaggaacagctagagaaatctccattcctggagaggctcatcaagaagggctatgaggtcatcttcttcacagacccagttgatgaatacttgatgcaatacctgatggattacgaagacaaaaagttccagaatgtgtccaaggaaggactgaaggttgggaaagattcaaaagacaaggagctgaaggaagcattcaaggagctaacaaagtggtggaaaggaaatctcgctagcgaaaacgtagacgatgtcaaaatcagcaaccgtttggctgacactccatgtgtagtcgtaacatccaagtttggatggagtgctaatatggagaggatcatgcagtcccaaactctctcggatgctaataagcaagcttacatgcgcggaaagagagtcctcgagatcaacccacgacaccctatcatcaaagaactcaaggatagaattgcaagtgacccagaggatgagagtgtgaaggaaacagcacagctcatgtaccagacagctttgatcgagagtggattcatactcaccgacccaaaagactttgctgcccgtatttataactcagtcaagagcggtctgaacatcagccctgatgcagtagccgacgaggaaatcgaggcagcagaggaaccagagaccagtgaggcaactgagacgaaatcagatgacttggctggtggtctaaacattgaagccgaacccgttgagcaacaagaagagaacaccaaggacgaactgtagatttcacttctgatgtttctcctttgtgtttacctctttagtttaaagcagaacatcgttttactcgaatatcaagattagtttaattaagcagtttttgatggattatgtaaacgcactacttgcattctagagatcaaggaacctaaacttcttcttttcaatgtatgagttttttatc

SEQ ID NO: 38827 - protein, 823 aa, Arabidopsis thaliana
  peptide (1)..(823): Ceres Seq. ID no. 12599861
  misc_feature (258)..(806): Pfam Name: Hsp90 protein Pfam Description: Hsp90 protein
  misc_feature (258)..(806): Pfam Name: Hsp90 protein Pfam Description: Hsp90 protein
  misc_feature (498)..(818): Homolog of NCBI NO: 20453106 NR Description: At2g04030/F3C11.14 [Arabidopsis thaliana]
  misc_feature (71)..(489): Homolog of NCBI NO: 20453106 NR Description: At2g04030/F3C11.14 [Arabidopsis thaliana]
  misc_feature (498)..(818): Homolog of NCBI NO: 15228059 NR Description: putative heat shock protein
  misc_feature (71)..(489): Homolog of NCBI NO: 15228059 NR Description: putative heat shock protein
  misc_feature (495)..(795): Homolog of NCBI NO: 22086553 NR Description: heat shock protein Hsp90 [Achlya ambisexualis]
  misc_feature (498)..(818): Homolog of NCBI NO: 20453106 NR Description: At2g04030/F3C11.14 [Arabidopsis thaliana]
  misc_feature (498)..(818): Homolog of NCBI NO: 15228059 NR Description: putative heat shock protein
  misc_feature (495)..(795): Homolog of NCBI NO: 22086553 NR Description: heat shock protein Hsp90 [Achlya ambisexualis]
  misc_feature (33)..(485): Homolog of NCBI NO: 27803582 NR Description: heat shock protein gp96 [Xenopus laevis]
  misc_feature (495)..(822): Homolog of NCBI NO: 27803582 NR Description: heat shock protein gp96 [Xenopus laevis]
  misc_feature (29)..(522): Homolog of NCBI NO: 21357739 NR Description: Glycoprotein 93 CG5520-PA
  misc_feature (494)..(817): Homolog of NCBI NO: 21357739 NR Description: Glycoprotein 93 CG5520-PA
  misc_feature (76)..(485): Homolog of NCBI NO: 22086553 NR Description: heat shock protein Hsp90 [Achlya ambisexualis]
  misc_feature (71)..(489): Homolog of NCBI NO: 15228059 NR Description: putative heat shock protein
  misc_feature (71)..(489): Homolog of NCBI NO: 20453106 NR Description: At2g04030/F3C11.14 [Arabidopsis thaliana]
  misc_feature (76)..(485): Homolog of NCBI NO: 22086553 NR Description: heat shock protein Hsp90 [Achlya ambisexualis]
  misc_feature (494)..(817): Homolog of NCBI NO: 21357739 NR Description: Glycoprotein 93 CG5520-PA
  misc_feature (29)..(522): Homolog of NCBI NO: 21357739 NR Description: Glycoprotein 93 CG5520-PA
  misc_feature (495)..(822): Homolog of NCBI NO: 27803582 NR Description: heat shock protein gp96 [Xenopus laevis]
  misc_feature (33)..(485): Homolog of NCBI NO: 27803582 NR Description: heat shock protein gp96 [Xenopus laevis]
MRKRTLVSVLFLFSLLFLLPDQGRKLHANAEESSDDVTDPPKVEEKIGGHGGLSTDSDVVHRESESMSKKTLRSNAEKFEFQAEVSRLMDIIINSLYSNKDIFLRELISNASDALDKIRFLALTDKDVLGEGDTAKLEIQIKLDKAKKILSIRDRGIGMTKEDLIKNLGTIAKSGTSAFVEKMQSSGDLNLIGQFGVGFYSAYLVADYIEVISKHNDDSQYVWESKANGKFAVSEDTWNEPLGRGTEIRLHLRDEAGEYLEESKLKELVKRYSEFINFPISLWASKEVETEVPVEEDESADEETETTSTEEEKEEDAEEEDGEKKQKTKKVKETVYEWELLNDVKAIWLRSPKEVTEEEYTKFYHSLSKDFTDEKPMAWSHFNAEGDVEFKAVLYVPPKAPHDLYESYYNSNKANLKLYVRRVFISDEFDELLPKYLSFLKGLVDSDTLPLNVSREMLQQHSSLKTIKKKLIRKALDMIRKLAEEDPDEIHDDEKKDVEKSGENDEKKGQYTKFWNEFGKSVKLGIIEDAANRNRLAKLLRFETTKSDGKLTSLDQYIKRMKKSQKDIFYITGSSKEQLEKSPFLERLIKKGYEVIFFTDPVDEYLMQYLMDYEDKKFQNVSKEGLKVGKDSKDKELKEAFKELTKWWKGNLASENVDDVKISNRLADTPCVVVTSKFGWSANMERIMQSQTLSDANKQAYMRGKRVLEINPRHPIIKELKDRIASDPEDESVKETAQLMYQTALIESGFILTDPKDFAARIYNSVKSGLNISPDAVADEEIEAAEEPETSEATETKSDDLAGGLNIEAEPVEQQEENTKDEL

SEQ ID NO: 38828 - protein, 757 aa, Arabidopsis thaliana
  peptide (1)..(757): Ceres Seq. ID no. 12599862
  misc_feature (192)..(740): Pfam Name: Hsp90 protein Pfam Description: Hsp90 protein
  misc_feature (192)..(740): Pfam Name: Hsp90 protein Pfam Description: Hsp90 protein
  misc_feature (432)..(752): Homolog of NCBI NO: 20453106 NR Description: At2g04030/F3C11.14 [Arabidopsis thaliana]
  misc_feature (5)..(423): Homolog of NCBI NO: 20453106 NR Description: At2g04030/F3C11.14 [Arabidopsis thaliana]
  misc_feature (432)..(752): Homolog of NCBI NO: 15228059 NR Description: putative heat shock protein
  misc_feature (5)..(423): Homolog of NCBI NO: 15228059 NR Description: putative heat shock protein
  misc_feature (429)..(729): Homolog of NCBI NO: 22086553 NR Description: heat shock protein Hsp90 [Achlya ambisexualis]
  misc_feature (432)..(752): Homolog of NCBI NO: 20453106 NR Description: At2g04030/F3C11.14 [Arabidopsis thaliana]
  misc_feature (432)..(752): Homolog of NCBI NO: 15228059 NR Description: putative heat shock protein
  misc_feature (429)..(729): Homolog of NCBI NO: 22086553 NR Description: heat shock protein Hsp90 [Achlya ambisexualis]
  misc_feature (1)..(419): Homolog of NCBI NO: 27803582 NR Description: heat shock protein gp96 [Xenopus laevis]
  misc_feature (429)..(756): Homolog of NCBI NO: 27803582 NR Description: heat shock protein gp96 [Xenopus laevis]
  misc_feature (1)..(456): Homolog of NCBI NO: 21357739 NR Description: Glycoprotein 93 CG5520-PA
  misc_feature (428)..(751): Homolog of NCBI NO: 21357739 NR Description: Glycoprotein 93 CG5520-PA
  misc_feature (10)..(419): Homolog of NCBI NO: 22086553 NR Description: heat shock protein Hsp90 [Achlya ambisexualis]
  misc_feature (5)..(423): Homolog of NCBI NO: 15228059 NR Description: putative heat shock protein
  misc_feature (5)..(423): Homolog of NCBI NO: 20453106 NR Description: At2g04030/F3C11.14 [Arabidopsis thaliana]
  misc_feature (10)..(419): Homolog of NCBI NO: 22086553 NR Description: heat shock protein Hsp90 [Achlya ambisexualis]
  misc_feature (428)..(751): Homolog of NCBI NO: 21357739 NR Description: Glycoprotein 93 CG5520-PA
  misc_feature (1)..(456): Homolog of NCBI NO: 21357739 NR Description: Glycoprotein 93 CG5520-PA
  misc_feature (429)..(756): Homolog of NCBI NO: 27803582 NR Description: heat shock protein gp96 [Xenopus laevis]
  misc_feature (1)..(419): Homolog of NCBI NO: 27803582 NR Description: heat shock protein gp96 [Xenopus laevis]
MSKKTLRSNAEKFEFQAEVSRLMDIIINSLYSNKDIFLRELISNASDALDKIRFLALTDKDVLGEGDTAKLEIQIKLDKAKKILSIRDRGIGMTKEDLIKNLGTIAKSGTSAFVEKMQSSGDLNLIGQFGVGFYSAYLVADYIEVISKHNDDSQYVWESKANGKFAVSEDTWNEPLGRGTEIRLHLRDEAGEYLEESKLKELVKRYSEFINFPISLWASKEVETEVPVEEDESADEETETTSTEEEKEEDAEEEDGEKKQKTKKVKETVYEWELLNDVKAIWLRSPKEVTEEEYTKFYHSLSKDFTDEKPMAWSHFNAEGDVEFKAVLYVPPKAPHDLYESYYNSNKANLKLYVRRVFISDEFDELLPKYLSFLKGLVDSDTLPLNVSREMLQQHSSLKTIKKKLIRKALDMIRKLAEEDPDEIHDDEKKDVEKSGENDEKKGQYTKFWNEFGKSVKLGIIEDAANRNRLAKLLRFETTKSDGKLTSLDQYIKRMKKSQKDIFYITGSSKEQLEKSPFLERLIKKGYEVIFFTDPVDEYLMQYLMDYEDKKFQNVSKEGLKVGKDSKDKELKEAFKELTKWWKGNLASENVDDVKISNRLADTPCVVVTSKFGWSANMERIMQSQTLSDANKQAYMRGKRVLEINPRHPIIKELKDRIASDPEDESVKETAQLMYQTALIESGFILTDPKDFAARIYNSVKSGLNISPDAVADEEIEAAEEPETSEATETKSDDLAGGLNIEAEPVEQQEENTKDEL

SEQ ID NO: 38829 - protein, 735 aa, Arabidopsis thaliana
  peptide (1)..(735): Ceres Seq. ID no. 12599863
  misc_feature (170)..(718): Pfam Name: Hsp90 protein Pfam Description: Hsp90 protein
  misc_feature (170)..(718): Pfam Name: Hsp90 protein Pfam Description: Hsp90 protein
  misc_feature (410)..(730): Homolog of NCBI NO: 20453106 NR Description: At2g04030/F3C11.14 [Arabidopsis thaliana]
  misc_feature (1)..(401): Homolog of NCBI NO: 20453106 NR Description: At2g04030/F3C11.14 [Arabidopsis thaliana]
  misc_feature (410)..(730): Homolog of NCBI NO: 15228059 NR Description: putative heat shock protein
  misc_feature (1)..(401): Homolog of NCBI NO: 15228059 NR Description: putative heat shock protein
  misc_feature (407)..(707): Homolog of NCBI NO: 22086553 NR Description: heat shock protein Hsp90 [Achlya ambisexualis]
  misc_feature (410)..(730): Homolog of NCBI NO: 20453106 NR Description: At2g04030/F3C11.14 [Arabidopsis thaliana]
  misc_feature (410)..(730): Homolog of NCBI NO: 15228059 NR Description: putative heat shock protein
  misc_feature (407)..(707): Homolog of NCBI NO: 22086553 NR Description: heat shock protein Hsp90 [Achlya ambisexualis]
  misc_feature (1)..(397): Homolog of NCBI NO: 27803582 NR Description: heat shock protein gp96 [Xenopus laevis]
  misc_feature (407)..(734): Homolog of NCBI NO: 27803582 NR Description: heat shock protein gp96 [Xenopus laevis]
  misc_feature (1)..(434): Homolog of NCBI NO: 21357739 NR Description: Glycoprotein 93 CG5520-PA
  misc_feature (406)..(729): Homolog of NCBI NO: 21357739 NR Description: Glycoprotein 93 CG5520-PA
  misc_feature (1)..(397): Homolog of NCBI NO: 22086553 NR Description: heat shock protein Hsp90 [Achlya ambisexualis]
  misc_feature (1)..(401): Homolog of NCBI NO: 15228059 NR Description: putative heat shock protein
  misc_feature (1)..(401): Homolog of NCBI NO: 20453106 NR Description: At2g04030/F3C11.14 [Arabidopsis thaliana]
  misc_feature (1)..(397): Homolog of NCBI NO: 22086553 NR Description: heat shock protein Hsp90 [Achlya ambisexualis]
  misc_feature (406)..(729): Homolog of NCBI NO: 21357739 NR Description: Glycoprotein 93 CG5520-PA
  misc_feature (1)..(434): Homolog of NCBI NO: 21357739 NR Description: Glycoprotein 93 CG5520-PA
  misc_feature (407)..(734): Homolog of NCBI NO: 27803582 NR Description: heat shock protein gp96 [Xenopus laevis]
  misc_feature (1)..(397): Homolog of NCBI NO: 27803582 NR Description: heat shock protein gp96 [Xenopus laevis]
MDIIINSLYSNKDIFLRELISNASDALDKIRFLALTDKDVLGEGDTAKLEIQIKLDKAKKILSIRDRGIGMTKEDLIKNLGTIAKSGTSAFVEKMQSSGDLNLIGQFGVGFYSAYLVADYIEVISKHNDDSQYVWESKANGKFAVSEDTWNEPLGRGTEIRLHLRDEAGEYLEESKLKELVKRYSEFINFPISLWASKEVETEVPVEEDESADEETETTSTEEEKEEDAEEEDGEKKQKTKKVKETVYEWELLNDVKAIWLRSPKEVTEEEYTKFYHSLSKDFTDEKPMAWSHFNAEGDVEFKAVLYVPPKAPHDLYESYYNSNKANLKLYVRRVFISDEFDELLPKYLSFLKGLVDSDTLPLNVSREMLQQHSSLKTIKKKLIRKALDMIRKLAEEDPDEIHDDEKKDVEKSGENDEKKGQYTKFWNEFGKSVKLGIIEDAANRNRLAKLLRFETTKSDGKLTSLDQYIKRMKKSQKDIFYITGSSKEQLEKSPFLERLIKKGYEVIFFTDPVDEYLMQYLMDYEDKKFQNVSKEGLKVGKDSKDKELKEAFKELTKWWKGNLASENVDDVKISNRLADTPCVVVTSKFGWSANMERIMQSQTLSDANKQAYMRGKRVLEINPRHPIIKELKDRIASDPEDESVKETAQLMYQTALIESGFILTDPKDFAARIYNSVKSGLNISPDAVADEEIEAAEEPETSEATETKSDDLAGGLNIEAEPVEQQEENTKDEL

SEQ ID NO: 38830 - DNA, 1453 bp, Arabidopsis thaliana
  misc_feature (1)..(1453): Ceres Seq. ID no. 13574966
  misc_feature: MA Experiment ID: 108488 Result: Down-regulated in Transcription
  misc_feature: MA Experiment ID: 108574 Result: Up-regulated in Transcription
  misc_feature: MA Experiment 108574 PARAMETER Experiment Name: At_Wounding__cDNA_P Parameter: Timepoint (hr) Value: 1
  misc_feature: MA Experiment 108574 PARAMETER Experiment Name: At_Wounding__cDNA_P Parameter: Tissue Value: Aerial
  misc_feature: MA Experiment 108574 PARAMETER Experiment Name: At_Wounding__cDNA_P Parameter: Treatment Value: Wounding vs. No Wounding
  misc_feature: MA Experiment ID: 108594 Result: Up-regulated in Transcription
  misc_feature: MA Experiment 108594 PARAMETER Experiment Name: At_Ler-rhl_Root_cDNA_P Parameter: Plant Line Value: null
  misc_feature: MA Experiment ID: 20000069 Result: Up-regulated in Transcription
  misc_feature: MA Experiment 20000069 PARAMETER Experiment Name: At_100uM_ABA_Mutants_cDNA_P Parameter: Plant Line Value: CS23
  misc_feature: MA Experiment 20000069 PARAMETER Experiment Name: At_100uM_ABA_Mutants_cDNA_P Parameter: Timepoint (hr) Value: 6
  misc_feature: MA Experiment 20000069 PARAMETER Experiment Name: At_100uM_ABA_Mutants_cDNA_P Parameter: Tissue Value: Aerial
  misc_feature: MA Experiment 20000069 PARAMETER Experiment Name: At_100uM_ABA_Mutants_cDNA_P Parameter: Treatment Value: 100uM ABA vs. No Treatment
  misc_feature: MA Experiment ID: 20000171 Result: Down-regulated in Transcription
  misc_feature: MA Experiment 20000171 PARAMETER Experiment Name: At_42deg_Heat_P Parameter: Age (day) Value: 14
  misc_feature: MA Experiment 20000171 PARAMETER Experiment Name: At_42deg_Heat_P Parameter: Organism Value: A. thaliana
  misc_feature: MA Experiment 20000171 PARAMETER Experiment Name: At_42deg_Heat_P Parameter: Plant Line Value: WS
  misc_feature: MA Experiment 20000171 PARAMETER Experiment Name: At_42deg_Heat_P Parameter: Temperature (deg C) Value: 42 vs. 22
  misc_feature: MA Experiment 20000171 PARAMETER Experiment Name: At_42deg_Heat_P Parameter: Timepoint (hr) Value: 1
  misc_feature: MA Experiment 20000171 PARAMETER Experiment Name: At_42deg_Heat_P Parameter: Tissue Value: Aerial
  misc_feature: MA Experiment ID: 20000184 Result: Down-regulated in Transcription
  misc_feature: MA Experiment 20000184 PARAMETER Experiment Name: At_Shoots__P Parameter: Age (day) Value: 7
  misc_feature: MA Experiment 20000184 PARAMETER Experiment Name: At_Shoots__P Parameter: Tissue Value: Shoots vs. Whole Plant
  misc_feature: MA Experiment ID: 20000234 Result: Down-regulated in Transcription
  misc_feature: MA Experiment 20000234 PARAMETER Experiment Name: At_Siliques_P Parameter: Age (day) Value: 21
  misc_feature: MA Experiment 20000234 PARAMETER Experiment Name: At_Siliques_P Parameter: Organism Value: A. thaliana
  misc_feature: MA Experiment 20000234 PARAMETER Experiment Name: At_Siliques_P Parameter: Plant Line Value: WS
  misc_feature: MA Experiment 20000234 PARAMETER Experiment Name: At_Siliques_P Parameter: Tissue Value: Less Than 5mm Siliques vs. Whole Plant
  misc_feature: MA Experiment ID: 20000235 Result: Down-regulated in Transcription
  misc_feature: MA Experiment 20000235 PARAMETER Experiment Name: At_Siliques_P Parameter: Age (day) Value: 21
  misc_feature: MA Experiment 20000235 PARAMETER Experiment Name: At_Siliques_P Parameter: Organism Value: A. thaliana
  misc_feature: MA Experiment 20000235 PARAMETER Experiment Name: At_Siliques_P Parameter: Plant Line Value: WS
  misc_feature: MA Experiment 20000235 PARAMETER Experiment Name: At_Siliques_P Parameter: Tissue Value: 5-10mm Siliques vs. Whole Plant
  misc_feature: MA Experiment ID: 20000264 Result: Down-regulated in Transcription
  misc_feature: MA Experiment 20000264 PARAMETER Experiment Name: At_Open_Flower_P Parameter: Age (day) Value: 21
  misc_feature: MA Experiment 20000264 PARAMETER Experiment Name: At_Open_Flower_P Parameter: Plant Line Value: WS
  misc_feature: MA Experiment 20000264 PARAMETER Experiment Name: At_Open_Flower_P Parameter: Tissue Value: Open Flower vs. Whole Plant
  misc_feature: MA Experiment ID: 20000265 Result: Down-regulated in Transcription
  misc_feature: MA Experiment 20000265 PARAMETER Experiment Name: At_Open_Flower_P Parameter: Age (day) Value: 21
  misc_feature: MA Experiment 20000265 PARAMETER Experiment Name: At_Open_Flower_P Parameter: Plant Line Value: WS
  misc_feature: MA Experiment 20000265 PARAMETER Experiment Name: At_Open_Flower_P Parameter: Tissue Value: Closed Flower vs. Whole Plant
  misc_feature: MA Experiment ID: 20000286 Result: Down-regulated in Transcription
  misc_feature: MA Experiment 20000286 PARAMETER Experiment Name: At_Open_Flower_P Parameter: Age (day) Value: 21
  misc_feature: MA Experiment 20000286 PARAMETER Experiment Name: At_Open_Flower_P Parameter: Plant Line Value: WS
  misc_feature: MA Experiment 20000286 PARAMETER Experiment Name: At_Open_Flower_P Parameter: Tissue Value: Half Open vs. Whole Plant
  misc_feature: MA Experiment ID: 20000436 Result: Up-regulated in Transcription
  misc_feature: MA Experiment 20000436 PARAMETER Experiment Name: At_Drought_P Parameter: Age (day) Value: 7
  misc_feature: MA Experiment 20000436 PARAMETER Experiment Name: At_Drought_P Parameter: Organism Value: A. thaliana
  misc_feature: MA Experiment 20000436 PARAMETER Experiment Name: At_Drought_P Parameter: Plant Line Value: WS
  misc_feature: MA Experiment 20000436 PARAMETER Experiment Name: At_Drought_P Parameter: Timepoint (hr) Value: 12
  misc_feature: MA Experiment 20000436 PARAMETER Experiment Name: At_Drought_P Parameter: Tissue Value: Whole Plant
  misc_feature: MA Experiment 20000436 PARAMETER Experiment Name: At_Drought_P Parameter: Treatment Value: Drought vs. No Drought
  misc_feature: MA Experiment ID: 20000437 Result: Up-regulated in Transcription
  misc_feature: MA Experiment 20000437 PARAMETER Experiment Name: At_Drought_P Parameter: Age (day) Value: 8
  misc_feature: MA Experiment 20000437 PARAMETER Experiment Name: At_Drought_P Parameter: Organism Value: A. thaliana
  misc_feature: MA Experiment 20000437 PARAMETER Experiment Name: At_Drought_P Parameter: Plant Line Value: WS
  misc_feature: MA Experiment 20000437 PARAMETER Experiment Name: At_Drought_P Parameter: Timepoint (hr) Value: 24
  misc_feature: MA Experiment 20000437 PARAMETER Experiment Name: At_Drought_P Parameter: Tissue Value: Whole Plant
  misc_feature: MA Experiment 20000437 PARAMETER Experiment Name: At_Drought_P Parameter: Treatment Value: Drought vs. No Drought
  misc_feature: MA Experiment ID: 20000438 Result: Down-regulated in Transcription
  misc_feature: MA Experiment 20000438 PARAMETER Experiment Name: At_Shoots__P Parameter: Age (day) Value: 14
  misc_feature: MA Experiment 20000438 PARAMETER Experiment Name: At_Shoots__P Parameter: Tissue Value: Shoots vs. Whole Plant
  misc_feature: MA Experiment ID: 20000439 Result: Down-regulated in Transcription
  misc_feature: MA Experiment 20000439 PARAMETER Experiment Name: At_Roots__P Parameter: Age (day) Value: 14 vs. 21
  misc_feature: MA Experiment 20000439 PARAMETER Experiment Name: At_Roots__P Parameter: Organism Value: A. thaliana
  misc_feature: MA Experiment 20000439 PARAMETER Experiment Name: At_Roots__P Parameter: Tissue Value: Roots vs. Whole Plant
  misc_feature: MA Experiment ID: 20000453 Result: Up-regulated in Transcription
  misc_feature: MA Experiment 20000453 PARAMETER Experiment Name: At_100uM_ABA_P Parameter: Age (day) Value: 15
  misc_feature: MA Experiment 20000453 PARAMETER Experiment Name: At_100uM_ABA_P Parameter: Organism Value: A. thaliana
  misc_feature: MA Experiment 20000453 PARAMETER Experiment Name: At_100uM_ABA_P Parameter: Plant Line Value: WS
  misc_feature: MA Experiment 20000453 PARAMETER Experiment Name: At_100uM_ABA_P Parameter: Timepoint (hr) Value: 24
  misc_feature: MA Experiment 20000453 PARAMETER Experiment Name: At_100uM_ABA_P Parameter: Tissue Value: Aerial
  misc_feature: MA Experiment 20000453 PARAMETER Experiment Name: At_100uM_ABA_P Parameter: Treatment Value: 100uM ABA vs. No Treatment
  misc_feature: MA Experiment ID: 20001247 Result: Up-regulated in Transcription
  misc_feature: MA Experiment 20001247 PARAMETER Experiment Name: At_Far-red-induction_P Parameter: Age (day) Value: 7
  misc_feature: MA Experiment 20001247 PARAMETER Experiment Name: At_Far-red-induction_P Parameter: Light Value: Far-red vs. White
  misc_feature: MA Experiment 20001247 PARAMETER Experiment Name: At_Far-red-induction_P Parameter: Organism Value: A. thaliana
  misc_feature: MA Experiment 20001247 PARAMETER Experiment Name: At_Far-red-induction_P Parameter: Plant Line Value: Columbia
  misc_feature: MA Experiment 20001247 PARAMETER Experiment Name: At_Far-red-induction_P Parameter: Timepoint (hr) Value: 1
  misc_feature: MA Experiment 20001247 PARAMETER Experiment Name: At_Far-red-induction_P Parameter: Tissue Value: Whole Plant
  misc_feature: MA Experiment ID: 20001757 Result: Down-regulated in Transcription
  misc_feature: MA Experiment 20001757 PARAMETER Experiment Name: At_50mM_NH4NO3_L-to-H_P Parameter: Timepoint (hr) Value: 6
  misc_feature: MA Experiment 20001757 PARAMETER Experiment Name: At_50mM_NH4NO3_L-to-H_P Parameter: Tissue Value: Leaf
  misc_feature: MA Experiment 20001757 PARAMETER Experiment Name: At_50mM_NH4NO3_L-to-H_P Parameter: Treatment Value: 50mM NH4NO3 vs 100mM Mannitol
  misc_feature: MA Experiment ID: 20001911 Result: Up-regulated in Transcription
  misc_feature: MA Experiment 20001911 PARAMETER Experiment Name: At_Drought_Reproduction_P Parameter: Age (day) Value: 40
  misc_feature: MA Experiment 20001911 PARAMETER Experiment Name: At_Drought_Reproduction_P Parameter: Organism Value: A. thaliana
  misc_feature: MA Experiment 20001911 PARAMETER Experiment Name: At_Drought_Reproduction_P Parameter: Plant Line Value: WS
  misc_feature: MA Experiment 20001911 PARAMETER Experiment Name: At_Drought_Reproduction_P Parameter: Timepoint (day) Value: 10
  misc_feature: MA Experiment 20001911 PARAMETER Experiment Name: At_Drought_Reproduction_P Parameter: Tissue Value: Flowers
  misc_feature: MA Experiment 20001911 PARAMETER Experiment Name: At_Drought_Reproduction_P Parameter: Treatment Value: Drought vs. No Drought
gaaattttccccagaaacaacaacagttcgagcaacaaaaccctgaactctctgtttctgttaaactcgtaaagtctcaatctttacgatttgttcttaaaaattctttcatttaaagttcttaaattggtcaacagtgtttatttttcctccaagtttgttaataatttaagatttccccacatgcattgaatatttgtcttttcttcttctttcttccatttcaaagttgtgagatttgattcgatgcttatgcagattcacaattttatgagaaattggacaaaaccctgatgtcggattccgtcaaaacgacggtggatccgcttttgaaagatttggatgggaaaaaagagagtttcaggcggaacgttgtgtctatggcagctgagttaaagcaagtgagaggtcgtttggtttctcaagaacaattctttgttaaagaaagcttttgtagaaaagaagcagagaagaaagctaagaacatggaaatggagatctgtaaattgcagaagaagttggaagatagaaattgtgagcttgtagcttcaacttctgctgctgaaaagtttctagaagaagtggacgatctgagatcacagctagctttaacaaaggacattgcagaaacaagtgctgcttctgctcaatccgcacagcttcaatgctcagtgctaacagaacaacttgacgacaaaacacgttctctaagagaacacgaagaccgtgtaactcatctcggtcaccagcttgataatcttcagagagatttgaagacaagagaatgttctcaaaaacagctgagagaggaagttatgagaatcgagcgtgagataactgaagctgttgcaaagtctgggaaaggcacagaatgtgagctcaggaaacttcttgaagaggtttctccaaagaactttgagagaatgaacatgttattggcggtaaaagacgaagagattgcaaagttaaaagatgatgtgaagttaatgtcagctcattggaaactcaaaactaaggaacttgaatctcagttggagagacaaagaagagcagatcaagagttgaagaagaaggtactgaaactagagttttgcctgcaagaagctcgtagtcagacaagaaagctacagagggcgggggagagacgagacaaggcaatcaaagagctaagtgatcagattactggaaaacagttgaatgaatcggtttcaggggagaaacaaaacttctgggatacttcagggttcaagatcgttgtgtcaatgtcgatgttgatattagttattatctccaaaagatgagttcttttgtcttgaactctctttctttttgttggtgtgtaaatgcagtagttgcagatagtagtcagataatggtgcatattattactccttgaggtttagcgaagagaaatcttgcttccctttgttaagttataagtttgttcatgtgt

SEQ ID NO: 38831 - protein, 335 aa, Arabidopsis thaliana
  peptide (1)..(335): Ceres Seq. ID no. 13574967
  misc_feature (5)..(319): Pfam Name: Myosin tail Pfam Description: Myosin tail
  misc_feature (1)..(310): Homolog of NCBI NO: 1335313 NR Description: translated region (partial) [Homo sapiens]
  misc_feature (5)..(319): Homolog of NCBI NO: 4249699 NR Description: myosin heavy chain [Rana catesbeiana]
  misc_feature (82)..(335): Homolog of NCBI NO: 34894370 NR Description: unnamed protein product [Oryza sativa (japonica
  misc_feature (232)..(325): Homolog of NCBI NO: 22329441 NR Description: myosin heavy chain -related [Arabidopsis thaliana]
  misc_feature (10)..(280): Homolog of NCBI NO: 25402551 NR Description: hypothetical protein [imported] - Arabidopsis
  misc_feature (10)..(335): Homolog of NCBI NO: 22329439 NR Description: hypothetical protein [Arabidopsis thaliana]
  misc_feature (4)..(335): Homolog of NCBI NO: 4097950 NR Description: plant IF-like protein [Arabidopsis thaliana]
  misc_feature (1)..(335): Homolog of NCBI NO: 18397379 NR Description: expressed protein [Arabidopsis thaliana]
  misc_feature (1)..(326): Homolog of NCBI NO: 7485248 NR Description: hypothetical protein A_IG002P16.20 - Arabidopsis
  misc_feature (1)..(335): Homolog of NCBI NO: 18421042 NR Description: expressed protein [Arabidopsis thaliana]
MSDSVKTTVDPLLKDLDGKKESFRRNVVSMAAELKQVRGRLVSQEQFFVKESFCRKEAEKKAKNMEMEICKLQKKLEDRNCELVASTSAAEKFLEEVDDLRSQLALTKDIAETSAASAQSAQLQCSVLTEQLDDKTRSLREHEDRVTHLGHQLDNLQRDLKTRECSQKQLREEVMRIEREITEAVAKSGKGTECELRKLLEEVSPKNFERMNMLLAVKDEEIAKLKDDVKLMSAHWKLKTKELESQLERQRRADQELKKKVLKLEFCLQEARSQTRKLQRAGERRDKAIKELSDQITGKQLNESVSGEKQNFWDTSGFKIVVSMSMLILVIISKR

SEQ ID NO: 38832 - protein, 306 aa, Arabidopsis thaliana
  peptide (1)..(306): Ceres Seq. ID no. 13574968
  misc_feature (1)..(290): Pfam Name: Myosin tail Pfam Description: Myosin tail
  misc_feature (1)..(281): Homolog of NCBI NO: 1335313 NR Description: translated region (partial) [Homo sapiens]
  misc_feature (1)..(290): Homolog of NCBI NO: 4249699 NR Description: myosin heavy chain [Rana catesbeiana]
  misc_feature (53)..(306): Homolog of NCBI NO: 34894370 NR Description: unnamed protein product [Oryza sativa (japonica
  misc_feature (203)..(296): Homolog of NCBI NO: 22329441 NR Description: myosin heavy chain -related [Arabidopsis thaliana]
  misc_feature (1)..(251): Homolog of NCBI NO: 25402551 NR Description: hypothetical protein [imported] - Arabidopsis
  misc_feature (1)..(306): Homolog of NCBI NO: 22329439 NR Description: hypothetical protein [Arabidopsis thaliana]
  misc_feature (1)..(306): Homolog of NCBI NO: 4097950 NR Description: plant IF-like protein [Arabidopsis thaliana]
  misc_feature (1)..(306): Homolog of NCBI NO: 18397379 NR Description: expressed protein [Arabidopsis thaliana]
  misc_feature (1)..(297): Homolog of NCBI NO: 7485248 NR Description: hypothetical protein A_IG002P16.20 - Arabidopsis
  misc_feature (1)..(306): Homolog of NCBI NO: 18421042 NR Description: expressed protein [Arabidopsis thaliana]
MAAELKQVRGRLVSQEQFFVKESFCRKEAEKKAKNMEMEICKLQKKLEDRNCELVASTSAAEKFLEEVDDLRSQLALTKDIAETSAASAQSAQLQCSVLTEQLDDKTRSLREHEDRVTHLGHQLDNLQRDLKTRECSQKQLREEVMRIEREITEAVAKSGKGTECELRKLLEEVSPKNFERMNMLLAVKDEEIAKLKDDVKLMSAHWKLKTKELESQLERQRRADQELKKKVLKLEFCLQEARSQTRKLQRAGERRDKAIKELSDQITGKQLNESVSGEKQNFWDTSGFKIVVSMSMLILVIISKR

SEQ ID NO: 38833 - protein, 271 aa, Arabidopsis thaliana
  peptide (1)..(271): Ceres Seq. ID no. 13574969
  misc_feature (1)..(255): Pfam Name: Myosin tail Pfam Description: Myosin tail
  misc_feature (1)..(246): Homolog of NCBI NO: 1335313 NR Description: translated region (partial) [Homo sapiens]
  misc_feature (1)..(255): Homolog of NCBI NO: 4249699 NR Description: myosin heavy chain [Rana catesbeiana]
  misc_feature (18)..(271): Homolog of NCBI NO: 34894370 NR Description: unnamed protein product [Oryza sativa (japonica
  misc_feature (168)..(261): Homolog of NCBI NO: 22329441 NR Description: myosin heavy chain -related [Arabidopsis thaliana]
  misc_feature (1)..(216): Homolog of NCBI NO: 25402551 NR Description: hypothetical protein [imported] - Arabidopsis
  misc_feature (1)..(271): Homolog of NCBI NO: 22329439 NR Description: hypothetical protein [Arabidopsis thaliana]
  misc_feature (1)..(271): Homolog of NCBI NO: 4097950 NR Description: plant IF-like protein [Arabidopsis thaliana]
  misc_feature (1)..(271): Homolog of NCBI NO: 18397379 NR Description: expressed protein [Arabidopsis thaliana]
  misc_feature (1)..(262): Homolog of NCBI NO: 7485248 NR Description: hypothetical protein A_IG002P16.20 - Arabidopsis
  misc_feature (1)..(271): Homolog of NCBI NO: 18421042 NR Description: expressed protein [Arabidopsis thaliana]
MEMEICKLQKKLEDRNCELVASTSAAEKFLEEVDDLRSQLALTKDIAETSAASAQSAQLQCSVLTEQLDDKTRSLREHEDRVTHLGHQLDNLQRDLKTRECSQKQLREEVMRIEREITEAVAKSGKGTECELRKLLEEVSPKNFERMNMLLAVKDEEIAKLKDDVKLMSAHWKLKTKELESQLERQRRADQELKKKVLKLEFCLQEARSQTRKLQRAGERRDKAIKELSDQITGKQLNESVSGEKQNFWDTSGFKIVVSMSMLILVIISKR

SEQ ID NO: 38834 - DNA, 596 bp, Arabidopsis thaliana
  misc_feature (1)..(596): Ceres Seq. ID no. 12422420
  misc_feature: MA Experiment ID: 108576 Result: Up-regulated in Transcription
  misc_feature: MA Experiment 108576 PARAMETER Experiment Name: At_42deg_Heat_cDNA_P Parameter: Temperature (deg C) Value: 42 vs. 22
  misc_feature: MA Experiment 108576 PARAMETER Experiment Name: At_42deg_Heat_cDNA_P Parameter: Timepoint (hr) Value: 1
  misc_feature: MA Experiment 108576 PARAMETER Experiment Name: At_42deg_Heat_cDNA_P Parameter: Tissue Value: Aerial
  misc_feature: MA Experiment ID: 108594 Result: Down-regulated in Transcription
  misc_feature: MA Experiment 108594 PARAMETER Experiment Name: At_Ler-rhl_Root_cDNA_P Parameter: Plant Line Value: null
  misc_feature: MA Experiment ID: 20000184 Result: Up-regulated in Transcription
  misc_feature: MA Experiment 20000184 PARAMETER Experiment Name: At_Shoots__P Parameter: Age (day) Value: 7
  misc_feature: MA Experiment 20000184 PARAMETER Experiment Name: At_Shoots__P Parameter: Tissue Value: Shoots vs. Whole Plant
  misc_feature: MA Experiment ID: 20000185 Result: Up-regulated in Transcription
  misc_feature: MA Experiment 20000185 PARAMETER Experiment Name: At_Roots__P Parameter: Age (day) Value: 7 vs. 21
  misc_feature: MA Experiment 20000185 PARAMETER Experiment Name: At_Roots__P Parameter: Organism Value: A. thaliana
  misc_feature: MA Experiment 20000185 PARAMETER Experiment Name: At_Roots__P Parameter: Tissue Value: Roots vs. Whole Plant
  misc_feature: MA Experiment ID: 20000227 Result: Down-regulated in Transcription
  misc_feature: MA Experiment 20000227 PARAMETER Experiment Name: At_Root-Tips-vs-Tops_P Parameter: Tissue Value: Root Tips vs. Root Tops
  misc_feature: MA Experiment ID: 20000234 Result: Down-regulated in Transcription
  misc_feature: MA Experiment 20000234 PARAMETER Experiment Name: At_Siliques_P Parameter: Age (day) Value: 21
  misc_feature: MA Experiment 20000234 PARAMETER Experiment Name: At_Siliques_P Parameter: Organism Value: A. thaliana
  misc_feature: MA Experiment 20000234 PARAMETER Experiment Name: At_Siliques_P Parameter: Plant Line Value: WS
  misc_feature: MA Experiment 20000234 PARAMETER Experiment Name: At_Siliques_P Parameter: Tissue Value: Less Than 5mm Siliques vs. Whole Plant
  misc_feature: MA Experiment ID: 20000265 Result: Down-regulated in Transcription
  misc_feature: MA Experiment 20000265 PARAMETER Experiment Name: At_Open_Flower_P Parameter: Age (day) Value: 21
  misc_feature: MA Experiment 20000265 PARAMETER Experiment Name: At_Open_Flower_P Parameter: Plant Line Value: WS
  misc_feature: MA Experiment 20000265 PARAMETER Experiment Name: At_Open_Flower_P Parameter: Tissue Value: Closed Flower vs. Whole Plant
  misc_feature: MA Experiment ID: 20000269 Result: Down-regulated in Transcription
  misc_feature: MA Experiment 20000269 PARAMETER Experiment Name: At_1mM_KNO3_L-vs-H_Roots_P Parameter: Age (day) Value: 7,10,12
  misc_feature: MA Experiment 20000269 PARAMETER Experiment Name: At_1mM_KNO3_L-vs-H_Roots_P Parameter: Organism Value: A. thaliana
  misc_feature: MA Experiment 20000269 PARAMETER Experiment Name: At_1mM_KNO3_L-vs-H_Roots_P Parameter: Plant Line Value: WS
  misc_feature: MA Experiment 20000269 PARAMETER Experiment Name: At_1mM_KNO3_L-vs-H_Roots_P Parameter: Timepoint (day) Value: 7,10,12
  misc_feature: MA Experiment 20000269 PARAMETER Experiment Name: At_1mM_KNO3_L-vs-H_Roots_P Parameter: Tissue Value: Roots
  misc_feature: MA Experiment 20000269 PARAMETER Experiment Name: At_1mM_KNO3_L-vs-H_Roots_P Parameter: Treatment Value: 1mM KNO3 vs. 50mM KNO3
  misc_feature: MA Experiment ID: 20000286 Result: Down-regulated in Transcription
  misc_feature: MA Experiment 20000286 PARAMETER Experiment Name: At_Open_Flower_P Parameter: Age (day) Value: 21
  misc_feature: MA Experiment 20000286 PARAMETER Experiment Name: At_Open_Flower_P Parameter: Plant Line Value: WS
  misc_feature: MA Experiment 20000286 PARAMETER Experiment Name: At_Open_Flower_P Parameter: Tissue Value: Half Open vs. Whole Plant
  misc_feature: MA Experiment ID: 20000308 Result: Up-regulated in Transcription
  misc_feature: MA Experiment 20000308 PARAMETER Experiment Name: At_100mM_NaCl__P Parameter: Age (day) Value: 17
  misc_feature: MA Experiment 20000308 PARAMETER Experiment Name: At_100mM_NaCl__P Parameter: Organism Value: A. thaliana
  misc_feature: MA Experiment 20000308 PARAMETER Experiment Name: At_100mM_NaCl__P Parameter: Plant Line Value: WS
  misc_feature: MA Experiment 20000308 PARAMETER Experiment Name: At_100mM_NaCl__P Parameter: Timepoint (hr) Value: 72
  misc_feature: MA Experiment 20000308 PARAMETER Experiment Name: At_100mM_NaCl__P Parameter: Tissue Value: Whole Plant
  misc_feature: MA Experiment 20000308 PARAMETER Experiment Name: At_100mM_NaCl__P Parameter: Treatment Value: 100mM NaCl vs. No Treatment
  misc_feature: MA Experiment ID: 20000437 Result: Up-regulated in Transcription
  misc_feature: MA Experiment 20000437 PARAMETER Experiment Name: At_Drought_P Parameter: Age (day) Value: 8
  misc_feature: MA Experiment 20000437 PARAMETER Experiment Name: At_Drought_P Parameter: Organism Value: A. thaliana
  misc_feature: MA Experiment 20000437 PARAMETER Experiment Name: At_Drought_P Parameter: Plant Line Value: WS
  misc_feature: MA Experiment 20000437 PARAMETER Experiment Name: At_Drought_P Parameter: Timepoint (hr) Value: 24
  misc_feature: MA Experiment 20000437 PARAMETER Experiment Name: At_Drought_P Parameter: Tissue Value: Whole Plant
  misc_feature: MA Experiment 20000437 PARAMETER Experiment Name: At_Drought_P Parameter: Treatment Value: Drought vs. No Drought
  misc_feature: MA Experiment ID: 20000438 Result: Up-regulated in Transcription
  misc_feature: MA Experiment 20000438 PARAMETER Experiment Name: At_Shoots__P Parameter: Age (day) Value: 14
  misc_feature: MA Experiment 20000438 PARAMETER Experiment Name: At_Shoots__P Parameter: Tissue Value: Shoots vs. Whole Plant
  misc_feature: MA Experiment ID: 20000439 Result: Up-regulated in Transcription
  misc_feature: MA Experiment 20000439 PARAMETER Experiment Name: At_Roots__P Parameter: Age (day) Value: 14 vs. 21
  misc_feature: MA Experiment 20000439 PARAMETER Experiment Name: At_Roots__P Parameter: Organism Value: A. thaliana
  misc_feature: MA Experiment 20000439 PARAMETER Experiment Name: At_Roots__P Parameter: Tissue Value: Roots vs. Whole Plant
  misc_feature: MA Experiment ID: 20000460 Result: Up-regulated in Transcription
  misc_feature: MA Experiment 20000460 PARAMETER Experiment Name: At_10percent_PEG_P Parameter: Age (day) Value: 12
  misc_feature: MA Experiment 20000460 PARAMETER Experiment Name: At_10percent_PEG_P Parameter: Organism Value: A. thaliana
  misc_feature: MA Experiment 20000460 PARAMETER Experiment Name: At_10percent_PEG_P Parameter: Plant Line Value: WS
  misc_feature: MA Experiment 20000460 PARAMETER Experiment Name: At_10percent_PEG_P Parameter: Timepoint (day) Value: 12
  misc_feature: MA Experiment 20000460 PARAMETER Experiment Name: At_10percent_PEG_P Parameter: Tissue Value: Whole Plant
  misc_feature: MA Experiment 20000460 PARAMETER Experiment Name: At_10percent_PEG_P Parameter: Treatment Value: 10percent PEG vs. No Treatment
  misc_feature: MA Experiment ID: 20000574 Result: Up-regulated in Transcription
  misc_feature: MA Experiment 20000574 PARAMETER Experiment Name: At_100uM_ABA_Mutants__P Parameter: Organism Value: A. thaliana
  misc_feature: MA Experiment 20000574 PARAMETER Experiment Name: At_100uM_ABA_Mutants__P Parameter: Plant Line Value: CS23 vs. Ler wt
  misc_feature: MA Experiment 20000574 PARAMETER Experiment Name: At_100uM_ABA_Mutants__P Parameter: Timepoint (hr) Value: N/A
  misc_feature: MA Experiment 20000574 PARAMETER Experiment Name: At_100uM_ABA_Mutants__P Parameter: Tissue Value: Whole Plant
  misc_feature: MA Experiment 20000574 PARAMETER Experiment Name: At_100uM_ABA_Mutants__P Parameter: Treatment Value: None
  misc_feature: MA Experiment ID: 20000575 Result: Up-regulated in Transcription
  misc_feature: MA Experiment 20000575 PARAMETER Experiment Name: At_100uM_ABA_Mutants__P Parameter: Organism Value: A. thaliana
  misc_feature: MA Experiment 20000575 PARAMETER Experiment Name: At_100uM_ABA_Mutants__P Parameter: Plant Line Value: CS22
  misc_feature: MA Experiment 20000575 PARAMETER Experiment Name: At_100uM_ABA_Mutants__P Parameter: Timepoint (hr) Value: 6
  misc_feature: MA Experiment 20000575 PARAMETER Experiment Name: At_100uM_ABA_Mutants__P Parameter: Tissue Value: Whole Plant
  misc_feature: MA Experiment 20000575 PARAMETER Experiment Name: At_100uM_ABA_Mutants__P Parameter: Treatment Value: 1uM ABA vs. No Treatment
  misc_feature: MA Experiment ID: 20000576 Result: Up-regulated in Transcription
  misc_feature: MA Experiment 20000576 PARAMETER Experiment Name: At_100uM_ABA_Mutants__P Parameter: Organism Value: A. thaliana
  misc_feature: MA Experiment 20000576 PARAMETER Experiment Name: At_100uM_ABA_Mutants__P Parameter: Plant Line Value: CS23
  misc_feature: MA Experiment 20000576 PARAMETER Experiment Name: At_100uM_ABA_Mutants__P Parameter: Timepoint (hr) Value: 6
  misc_feature: MA Experiment 20000576 PARAMETER Experiment Name: At_100uM_ABA_Mutants__P Parameter: Tissue Value: Whole Plant
  misc_feature: MA Experiment 20000576 PARAMETER Experiment Name: At_100uM_ABA_Mutants__P Parameter: Treatment Value: 1uM ABA vs. No Treatment
  misc_feature: MA Experiment ID: 20001451 Result: Up-regulated in Transcription
  misc_feature: MA Experiment 20001451 PARAMETER Experiment Name: At_Far-red-induction_P Parameter: Age (day) Value: 7
  misc_feature: MA Experiment 20001451 PARAMETER Experiment Name: At_Far-red-induction_P Parameter: Light Value: Far-red vs. White
  misc_feature: MA Experiment 20001451 PARAMETER Experiment Name: At_Far-red-induction_P Parameter: Organism Value: A. thaliana
  misc_feature: MA Experiment 20001451 PARAMETER Experiment Name: At_Far-red-induction_P Parameter: Plant Line Value: Columbia
  misc_feature: MA Experiment 20001451 PARAMETER Experiment Name: At_Far-red-induction_P Parameter: Timepoint (hr) Value: 24
  misc_feature: MA Experiment 20001451 PARAMETER Experiment Name: At_Far-red-induction_P Parameter: Tissue Value: Whole Plant
atcacttacttaacatactaagagagttattagatcttgaaaaacatggcttccaaggctttgattctgttgggtctcttcgcaattcttctggtggtctccgaagtttctgccgcaaggcagtcgggcatggtgaagccagagagtgaggaaactgtgcaacctgaaggttatcacggaggacatggtggtcacggagggggaggccactacggaggaggaggccacgggcatggaggacacaacggaggagggggccacggacttaacggatacggaggaggacatggaggacactacggaggaggaggaggacactacggaggaggaggaggccacggtggtggtggacactatggaggtggaggacaccatggaggaggaggtcacgggctgaacgaacctgttcagacgaagccgggtgtttaaaagttataactatcaaataaattcaccatgcataattgcatctctatatacacttatgtcttatatgtatccatcaaaataaaccatggtgagtttgtaatgcagttccttcagaaatgtgtggaataatgtttcacaataataatagaatatctctgttgattctg

SEQ ID NO: 38835 - protein, 127 aa, Arabidopsis thaliana
  peptide (1)..(127): Ceres Seq. ID no. 12422421
  misc_feature (42)..(126): Pfam Name: Herpesvirus latent membrane protein 1 (LMP1) Pfam Description: Herpesvirus latent membrane protein 1 (LMP1)
  misc_feature (1)..(126): Homolog of NCBI NO: 18266043 NR Description: glycine-rich protein [Brassica oleracea]
  misc_feature (1)..(114): Homolog of NCBI NO: 81625 NR Description: glycine-rich protein 3 precursor - Arabidopsis
  misc_feature (1)..(114): Homolog of NCBI NO: 259447 NR Description: glycine-rich protein; atGRP [Arabidopsis thaliana]
  misc_feature (4)..(116): Homolog of NCBI NO: 7488799 NR Description: dormancy-associated protein 2 - garden pea
  misc_feature (1)..(116): Homolog of NCBI NO: 15224548 NR Description: putative glycine-rich protein
  misc_feature (1)..(127): Homolog of NCBI NO: 9957568 NR Description: antimicrobial peptide shep-GRP [Capsella
  misc_feature (1)..(127): Homolog of NCBI NO: 30678191 NR Description: glycine-rich protein [Arabidopsis thaliana]
  misc_feature (1)..(127): Homolog of NCBI NO: 21536606 NR Description: putative glycine-rich protein [Arabidopsis
  misc_feature (1)..(127): Homolog of NCBI NO: 15224540 NR Description: putative glycine-rich protein
  misc_feature (1)..(127): Homolog of NCBI NO: 15224547 NR Description: putative glycine-rich protein; protein id:
MASKALILLGLFAILLVVSEVSAARQSGMVKPESEETVQPEGYHGGHGGHGGGGHYGGGGHGHGGHNGGGGHGLNGYGGGHGGHYGGGGGHYGGGGGHGGGGHYGGGGHHGGGGHGLNEPVQTKPGV

SEQ ID NO: 38836 - protein, 99 aa, Arabidopsis thaliana
  peptide (1)..(99): Ceres Seq. ID no. 12422422
  misc_feature (14)..(98): Pfam Name: Herpesvirus latent membrane protein 1 (LMP1) Pfam Description: Herpesvirus latent membrane protein 1 (LMP1)
  misc_feature (1)..(98): Homolog of NCBI NO: 18266043 NR Description: glycine-rich protein [Brassica oleracea]
  misc_feature (1)..(86): Homolog of NCBI NO: 81625 NR Description: glycine-rich protein 3 precursor - Arabidopsis
  misc_feature (1)..(86): Homolog of NCBI NO: 259447 NR Description: glycine-rich protein; atGRP [Arabidopsis thaliana]
  misc_feature (1)..(88): Homolog of NCBI NO: 7488799 NR Description: dormancy-associated protein 2 - garden pea
  misc_feature (1)..(88): Homolog of NCBI NO: 15224548 NR Description: putative glycine-rich protein
  misc_feature (1)..(99): Homolog of NCBI NO: 9957568 NR Description: antimicrobial peptide shep-GRP [Capsella
  misc_feature (1)..(99): Homolog of NCBI NO: 30678191 NR Description: glycine-rich protein [Arabidopsis thaliana]
  misc_feature (1)..(99): Homolog of NCBI NO: 21536606 NR Description: putative glycine-rich protein [Arabidopsis
  misc_feature (1)..(99): Homolog of NCBI NO: 15224540 NR Description: putative glycine-rich protein
  misc_feature (1)..(99): Homolog of NCBI NO: 15224547 NR Description: putative glycine-rich protein; protein id:
MVKPESEETVQPEGYHGGHGGHGGGGHYGGGGHGHGGHNGGGGHGLNGYGGGHGGHYGGGGGHYGGGGGHGGGGHYGGGGHHGGGGHGLNEPVQTKPGV

SEQ ID NO: 38837 - protein, 70 aa, Arabidopsis thaliana; identical to SEQ ID NO: 28937
  peptide (1)..(70): Ceres Seq. ID no. 12422423
  misc_feature (1)..(64): Pfam Name: ELM2 domain Pfam Description: ELM2 domain

SEQ ID NO: 38838 - DNA, 1248 bp, Arabidopsis thaliana
  misc_feature (1)..(1248): Ceres Seq. ID no. 13492921
  misc_feature: MA Experiment ID: 108434 Result: Down-regulated in Transcription
  misc_feature: MA Experiment 108434 PARAMETER Experiment Name: At_Root_Tips_cDNA_P Parameter: Tissue Value: Root Tips
  misc_feature: MA Experiment ID: 108595 Result: Up-regulated in Transcription
  misc_feature: MA Experiment 108595 PARAMETER Experiment Name: At_Ler-pi_Ovule_cDNA_P Parameter: Plant Line Value: null
  misc_feature: MA Experiment ID: 108668 Result: Up-regulated in Transcription
  misc_feature: MA Experiment 108668 PARAMETER Experiment Name: At_2mM_SA_cDNA_P Parameter: Plant Line Value: WS
  misc_feature: MA Experiment 108668 PARAMETER Experiment Name: At_2mM_SA_cDNA_P Parameter: Timepoint (hr) Value: 6
  misc_feature: MA Experiment 108668 PARAMETER Experiment Name: At_2mM_SA_cDNA_P Parameter: Treatment Value: 2mM SA vs. No Treatment
  misc_feature: MA Experiment ID: 20000087 Result: Up-regulated in Transcription
  misc_feature: MA Experiment 20000087 PARAMETER Experiment Name: At_100uM_ABA_Mutants_cDNA_P Parameter: Plant Line Value: WS
  misc_feature: MA Experiment 20000087 PARAMETER Experiment Name: At_100uM_ABA_Mutants_cDNA_P Parameter: Timepoint (hr) Value: 6
  misc_feature: MA Experiment 20000087 PARAMETER Experiment Name: At_100uM_ABA_Mutants_cDNA_P Parameter: Tissue Value: Aerial
  misc_feature: MA Experiment 20000087 PARAMETER Experiment Name: At_100uM_ABA_Mutants_cDNA_P Parameter: Treatment Value: 100uM ABA vs. No Treatment
  misc_feature: MA Experiment ID: 20000171 Result: Up-regulated in Transcription
  misc_feature: MA Experiment 20000171 PARAMETER Experiment Name: At_42deg_Heat_P Parameter: Age (day) Value: 14
  misc_feature: MA Experiment 20000171 PARAMETER Experiment Name: At_42deg_Heat_P Parameter: Organism Value: A. thaliana
  misc_feature: MA Experiment 20000171 PARAMETER Experiment Name: At_42deg_Heat_P Parameter: Plant Line Value: WS
  misc_feature: MA Experiment 20000171 PARAMETER Experiment Name: At_42deg_Heat_P Parameter: Temperature (deg C) Value: 42 vs. 22
  misc_feature: MA Experiment 20000171 PARAMETER Experiment Name: At_42deg_Heat_P Parameter: Timepoint (hr) Value: 1
  misc_feature: MA Experiment 20000171 PARAMETER Experiment Name: At_42deg_Heat_P Parameter: Tissue Value: Aerial
  misc_feature: MA Experiment ID: 20000234 Result: Down-regulated in Transcription
  misc_feature: MA Experiment 20000234 PARAMETER Experiment Name: At_Siliques_P Parameter: Age (day) Value: 21
  misc_feature: MA Experiment 20000234 PARAMETER Experiment Name: At_Siliques_P Parameter: Organism Value: A. thaliana
  misc_feature: MA Experiment 20000234 PARAMETER Experiment Name: At_Siliques_P Parameter: Plant Line Value: WS
  misc_feature: MA Experiment 20000234 PARAMETER Experiment Name: At_Siliques_P Parameter: Tissue Value: Less Than 5mm Siliques vs. Whole Plant
  misc_feature: MA Experiment ID: 20000264 Result: Up-regulated in Transcription
  misc_feature: MA Experiment 20000264 PARAMETER Experiment Name: At_Open_Flower_P Parameter: Age (day) Value: 21
  misc_feature: MA Experiment 20000264 PARAMETER Experiment Name: At_Open_Flower_P Parameter: Plant Line Value: WS
  misc_feature: MA Experiment 20000264 PARAMETER Experiment Name: At_Open_Flower_P Parameter: Tissue Value: Open Flower vs. Whole Plant
  misc_feature: MA Experiment ID: 20000286 Result: Up-regulated in Transcription
  misc_feature: MA Experiment 20000286 PARAMETER Experiment Name: At_Open_Flower_P Parameter: Age (day) Value: 21
  misc_feature: MA Experiment 20000286 PARAMETER Experiment Name: At_Open_Flower_P Parameter: Plant Line Value: WS
  misc_feature: MA Experiment 20000286 PARAMETER Experiment Name: At_Open_Flower_P Parameter: Tissue Value: Half Open vs. Whole Plant
  misc_feature: MA Experiment ID: 20001558 Result: Down-regulated in Transcription
  misc_feature: MA Experiment 20001558 PARAMETER Experiment Name: At_Drought_Soil_Dry_P Parameter: Age (day) Value: 27
  misc_feature: MA Experiment 20001558 PARAMETER Experiment Name: At_Drought_Soil_Dry_P Parameter: Organism Value: A. thaliana
  misc_feature: MA Experiment 20001558 PARAMETER Experiment Name: At_Drought_Soil_Dry_P Parameter: Plant Line Value: WS
  misc_feature: MA Experiment 20001558 PARAMETER Experiment Name: At_Drought_Soil_Dry_P Parameter: Post Timepoint (hr) Value: 6
  misc_feature: MA Experiment 20001558 PARAMETER Experiment Name: At_Drought_Soil_Dry_P Parameter: Post-Treatment Value: Re-Water vs. No Drought
  misc_feature: MA Experiment 20001558 PARAMETER Experiment Name: At_Drought_Soil_Dry_P Parameter: Timepoint (day) Value: 13
  misc_feature: MA Experiment 20001558 PARAMETER Experiment Name: At_Drought_Soil_Dry_P Parameter: Treatment Value: Drought vs. No Drought
  misc_feature: MA Experiment ID: 20001761 Result: Up-regulated in Transcription
  misc_feature: MA Experiment 20001761 PARAMETER Experiment Name: At_50mM_NH4NO3_L-to-H_P Parameter: Timepoint (hr) Value: 4
  misc_feature: MA Experiment 20001761 PARAMETER Experiment Name: At_50mM_NH4NO3_L-to-H_P Parameter: Tissue Value: Siliques
  misc_feature: MA Experiment 20001761 PARAMETER Experiment Name: At_50mM_NH4NO3_L-to-H_P Parameter: Treatment Value: 50mM NH4NO3 vs 100mM Mannitol
  misc_feature: MA Experiment ID: 20001904 Result: Down-regulated in Transcription
  misc_feature: MA Experiment 20001904 PARAMETER Experiment Name: At_Drought_Reproduction_P Parameter: Age (day) Value: 37
  misc_feature: MA Experiment 20001904 PARAMETER Experiment Name: At_Drought_Reproduction_P Parameter: Organism Value: A. thaliana
  misc_feature: MA Experiment 20001904 PARAMETER Experiment Name: At_Drought_Reproduction_P Parameter: Plant Line Value: WS
  misc_feature: MA Experiment 20001904 PARAMETER Experiment Name: At_Drought_Reproduction_P Parameter: Timepoint (day) Value: 7
  misc_feature: MA Experiment 20001904 PARAMETER Experiment Name: At_Drought_Reproduction_P Parameter: Tissue Value: Rosettes
  misc_feature: MA Experiment 20001904 PARAMETER Experiment Name: At_Drought_Reproduction_P Parameter: Treatment Value: Drought vs. No Drought
accaactcctctaataagcttcttctttctatccctcacttttacaaacaaagggagaccaaaaatgggtctaagcaaaactattcccttagtgttactcccgattttgatgtttggggttttgagtaacgctcagcttacctctgatttttactccacgacatgccctaacgtcacagccattgctcggggactgatcgagcgagcaagccgtaacgacgtcagactcactgctaaagtcatgcgtcttcactttcatgactgtttcgtgaacgggtgcgatggttcggtactattggacgctgctccagcggatggggtagagggtgaaaaggaggctttccaaaacgcgggttctcttgatggattcgaagtgatcgatgatatcaaaaccgccctcgagaatgtttgtcccggagttgtctcttgtgctgatatcctcgctatcgcagctgaaatctctgttgcactggcgggagggccgtcattggacgtattgctaggaaggagagatggccggacagcgatccgtgcggacgcagtggctgcacttccactaggacctgattctctcgagattcttacttccaaattctccgtacataatcttgacactaccgatctcgtcgctttatctggtgctcataccttcgggagggttcagtgtggagtgataaacaatcgtctacacaactttagtggtaacagcggacagtccgacccaagtatcgaaccggagttcttgcaaacgttacgacgacaatgcccgcaaggcggagatctcaccgcaagggcgaatcttgatcctacgagccccgactcatttgataacgactatttcaagaaccttcaaaacaaccgcggagtgattgaatcagatcaaatcttgttctcttcgacaggagcgcctactgtgtctttggtgaatcgttttgctgagaaccaaaatgagttctttacaaattttgcgagatcaatgatcaagatgggaaatgtgaggattctcacaggacgtgagggagagatacgtagagactacagacgcgtcaattaataagttttgcatggttaaatgatcaaacgtaacttattgttattcatgaaataagtgttctttagtttgtgcttctccacaattaattgtttttcttcttttgattttatttactgttaagcatgccattgttacttgtaattgtaaatcttatataatatttttctttttgaaaaaatccactatcatgtctg

SEQ ID NO: 38839 - protein, 350 aa, Arabidopsis thaliana
  peptide (1)..(350): Ceres Seq. ID no. 13492922
  misc_feature (62)..(314): Pfam Name: Peroxidase Pfam Description: Peroxidase
  misc_feature (28)..(350): Homolog of NCBI NO: 21593262 NR Description: peroxidase [Arabidopsis thaliana]
  misc_feature (22)..(350): Homolog of NCBI NO: 18072039 NR Description: anionic peroxidase [Nicotiana tomentosiformis]
  misc_feature (33)..(350): Homolog of NCBI NO: 8546851 NR Description: peroxidase [Ipomoea batatas]
  misc_feature (24)..(350): Homolog of NCBI NO: 478389 NR Description: peroxidase (EC 1.11.1.7) precursor, anionic -
  misc_feature (22)..(350): Homolog of NCBI NO: 7433042 NR Description: peroxidase (EC 1.11.1.7) - common tobacco
  misc_feature (29)..(350): Homolog of NCBI NO: 6723685 NR Description: peroxidase [Lycopersicon esculentum]
  misc_feature (29)..(350): Homolog of NCBI NO: 421924 NR Description: peroxidase (EC 1.11.1.7) - tomato
  misc_feature (22)..(350): Homolog of NCBI NO: 21536505 NR Description: peroxidase [Arabidopsis thaliana]
  misc_feature (22)..(350): Homolog of NCBI NO: 15241208 NR Description: peroxidase, putative [Arabidopsis thaliana]
  misc_feature (22)..(350): Homolog of NCBI NO: 26451205 NR Description: putative peroxidase [Arabidopsis thaliana]
PTPLISFFFLSLTFTNKGRPKMGLSKTIPLVLLPILMFGVLSNAQLTSDFYSTTCPNVTAIARGLIERASRNDVRLTAKVMRLHFHDCFVNGCDGSVLLDAAPADGVEGEKEAFQNAGSLDGFEVIDDIKTALENVCPGVVSCADILAIAAEISVALAGGPSLDVLLGRRDGRTAIRADAVAALPLGPDSLEILTSKFSVHNLDTTDLVALSGAHTFGRVQCGVINNRLHNFSGNSGQSDPSIEPEFLQTLRRQCPQGGDLTARANLDPTSPDSFDNDYFKNLQNNRGVIESDQILFSSTGAPTVSLVNRFAENQNEFFTNFARSMIKMGNVRILTGREGEIRRDYRRVN

SEQ ID NO: 38840 - protein, 329 aa, Arabidopsis thaliana
  peptide (1)..(329): Ceres Seq. ID no. 13492923
  misc_feature (41)..(293): Pfam Name: Peroxidase Pfam Description: Peroxidase
  misc_feature (7)..(329): Homolog of NCBI NO: 21593262 NR Description: peroxidase [Arabidopsis thaliana]
  misc_feature (1)..(329): Homolog of NCBI NO: 18072039 NR Description: anionic peroxidase [Nicotiana tomentosiformis]
  misc_feature (12)..(329): Homolog of NCBI NO: 8546851 NR Description: peroxidase [Ipomoea batatas]
  misc_feature (3)..(329): Homolog of NCBI NO: 478389 NR Description: peroxidase (EC 1.11.1.7) precursor, anionic -
  misc_feature (1)..(329): Homolog of NCBI NO: 7433042 NR Description: peroxidase (EC 1.11.1.7) - common tobacco
  misc_feature (8)..(329): Homolog of NCBI NO: 6723685 NR Description: peroxidase [Lycopersicon esculentum]
  misc_feature (8)..(329): Homolog of NCBI NO: 421924 NR Description: peroxidase (EC 1.11.1.7) - tomato
  misc_feature (1)..(329): Homolog of NCBI NO: 21536505 NR Description: peroxidase [Arabidopsis thaliana]
  misc_feature (1)..(329): Homolog of NCBI NO: 15241208 NR Description: peroxidase, putative [Arabidopsis thaliana]
  misc_feature (1)..(329): Homolog of NCBI NO: 26451205 NR Description: putative peroxidase [Arabidopsis thaliana]
MGLSKTIPLVLLPILMFGVLSNAQLTSDFYSTTCPNVTAIARGLIERASRNDVRLTAKVMRLHFHDCFVNGCDGSVLLDAAPADGVEGEKEAFQNAGSLDGFEVIDDIKTALENVCPGVVSCADILAIAAEISVALAGGPSLDVLLGRRDGRTAIRADAVAALPLGPDSLEILTSKFSVHNLDTTDLVALSGAHTFGRVQCGVINNRLHNFSGNSGQSDPSIEPEFLQTLRRQCPQGGDLTARANLDPTSPDSFDNDYFKNLQNNRGVIESDQILFSSTGAPTVSLVNRFAENQNEFFTNFARSMIKMGNVRILTGREGEIRRDYRRVN

SEQ ID NO: 38841 - protein, 314 aa, Arabidopsis thaliana
  peptide (1)..(314): Ceres Seq. ID no. 13492924
  misc_feature (26)..(278): Pfam Name: Peroxidase Pfam Description: Peroxidase
  misc_feature (1)..(314): Homolog of NCBI NO: 21593262 NR Description: peroxidase [Arabidopsis thaliana]
  misc_feature (1)..(314): Homolog of NCBI NO: 18072039 NR Description: anionic peroxidase [Nicotiana tomentosiformis]
  misc_feature (1)..(314): Homolog of NCBI NO: 8546851 NR Description: peroxidase [Ipomoea batatas]
  misc_feature (1)..(314): Homolog of NCBI NO: 478389 NR Description: peroxidase (EC 1.11.1.7) precursor, anionic -
  misc_feature (1)..(314): Homolog of NCBI NO: 7433042 NR Description: peroxidase (EC 1.11.1.7) - common tobacco
  misc_feature (1)..(314): Homolog of NCBI NO: 6723685 NR Description: peroxidase [Lycopersicon esculentum]
  misc_feature (1)..(314): Homolog of NCBI NO: 421924 NR Description: peroxidase (EC 1.11.1.7) - tomato
  misc_feature (1)..(314): Homolog of NCBI NO: 21536505 NR Description: peroxidase [Arabidopsis thaliana]
  misc_feature (1)..(314): Homolog of NCBI NO: 15241208 NR Description: peroxidase, putative [Arabidopsis thaliana]
  misc_feature (1)..(314): Homolog of NCBI NO: 26451205 NR Description: putative peroxidase [Arabidopsis thaliana]
MFGVLSNAQLTSDFYSTTCPNVTAIARGLIERASRNDVRLTAKVMRLHFHDCFVNGCDGSVLLDAAPADGVEGEKEAFQNAGSLDGFEVIDDIKTALENVCPGVVSCADILAIAAEISVALAGGPSLDVLLGRRDGRTAIRADAVAALPLGPDSLEILTSKFSVHNLDTTDLVALSGAHTFGRVQCGVINNRLHNFSGNSGQSDPSIEPEFLQTLRRQCPQGGDLTARANLDPTSPDSFDNDYFKNLQNNRGVIESDQILFSSTGAPTVSLVNRFAENQNEFFTNFARSMIKMGNVRILTGREGEIRRDYRRVN

SEQ ID NO: 38842 - DNA, 1401 bp, Arabidopsis thaliana
  misc_feature (1)..(1401): Ceres Seq. ID no. 12482593
  misc_feature: MA Experiment ID: 108434 Result: Up-regulated in Transcription
  misc_feature: MA Experiment 108434 PARAMETER Experiment Name: At_Root_Tips_cDNA_P Parameter: Tissue Value: Root Tips
  misc_feature: MA Experiment ID: 108462 Result: Down-regulated in Transcription
  misc_feature: MA Experiment 108462 PARAMETER Experiment Name: At_Germinating_Seeds_cDNA_P Parameter: Age (day) Value: 2 vs. 0
  misc_feature: MA Experiment 108462 PARAMETER Experiment Name: At_Germinating_Seeds_cDNA_P Parameter: Tissue Value: Germinating Seeds
  misc_feature: MA Experiment ID: 108463 Result: Down-regulated in Transcription
  misc_feature: MA Experiment 108463 PARAMETER Experiment Name: At_Germinating_Seeds_cDNA_P Parameter: Age (day) Value: 3 vs. 0
  misc_feature: MA Experiment 108463 PARAMETER Experiment Name: At_Germinating_Seeds_cDNA_P Parameter: Tissue Value: Germinating Seeds
  misc_feature: MA Experiment ID: 108464 Result: Down-regulated in Transcription
  misc_feature: MA Experiment 108464 PARAMETER Experiment Name: At_Germinating_Seeds_cDNA_P Parameter: Age (day) Value: 4 vs. 0
  misc_feature: MA Experiment 108464 PARAMETER Experiment Name: At_Germinating_Seeds_cDNA_P Parameter: Tissue Value: Germinating Seeds
  misc_feature: MA Experiment ID: 20000180 Result: Down-regulated in Transcription
  misc_feature: MA Experiment 20000180 PARAMETER Experiment Name: At_Germinating_Seeds_P Parameter: Age (hr) Value: 24 vs. 0
  misc_feature: MA Experiment 20000180 PARAMETER Experiment Name: At_Germinating_Seeds_P Parameter: Tissue Value: Germinating Seeds
  misc_feature: MA Experiment ID: 20000184 Result: Down-regulated in Transcription
  misc_feature: MA Experiment 20000184 PARAMETER Experiment Name: At_Shoots__P Parameter: Age (day) Value: 7
  misc_feature: MA Experiment 20000184 PARAMETER Experiment Name: At_Shoots__P Parameter: Tissue Value: Shoots vs. Whole Plant
  misc_feature: MA Experiment ID: 20000224 Result: Up-regulated in Transcription
agaagaagtagacgatgttggaagaacaatagaggaagagactgtgtttgaaaaaagagaaagaggagaggaagctgaaacattgactccatgggagcaacactccagcatcataagcatccctcgattcggctacaaagctccctcttctctgcttcatcattctcattccggattcctcgtcacctgcaacatcaaaagggagaaaagtgctactaaagaggtcatgtccatccttggaaaggtatcgtcacaattctccatcattagtgaggcaaaagtttggatttttgttccttcatttagaagataactcagagtgattgataaccaattgtggtagagaaacactatatttgaaacgaaagtgattataagtgcagtggtgggggttctctaatgttcagcttgtctcacggaaatcaaacttttgatttgttcagtatattgggtccatgcatgaggagaaacctgaagttctaaactctactgcatccaaaaaacaaaaagtttgtgcacaagagacagaggaaggcggagagaagactgtacctcttgagaatgatgccttgcaggaaacaggtgaaaatccaaatgttgaggatcttaaattagcaaatgaagaacacaattctctcatgtcattggttaagctaacaaagagtggcttgcttctctttactttccctgttgaaaactctcccaatacaacgaatatcgtatcacgagtcttccagtctatggaatctggagctttgaaggcaccaatctggtgccatcggatattcccagttcaagctacttgtggtttgacagagaaagaacttcgggaaacagtatcaaagcttgttcagcggtttgtcaatgataaagacaatacactatcaaaacctgtgaagtttgcagctgggtatcaacgtagaggtgcggaggagacgaaaggaaagattcggaaagacgcttcagatgttctagttcaatgtccgttgctggaccgcattaaatgctttgaaactgtggcagctggagtgaaagacattgtaccagattcagttgtggatctcaaatctccagagttatgtgttctggtggaactgttaccgctctctagaatatcaagtggctcctttgtagctgctgtttcagtgcttccacatagactcgttagcacaaagccgaaactctgcatcaagcctctagtccctgaatccaaacacaaaaagggaccaaactgacaggtgcaaaggctgatcgctgcattcgattttcgagagccaaagatatcaatagaagttgtaatctctctgtttttgtttagatatgtcttttgctttcagtatctctaatggagttaacaacaatgtctgacctatgttattcaagagaacaaagataaaccct

SEQ ID NO: 38843 - protein, 259 aa, Arabidopsis thaliana
  peptide (1)..(259): Ceres Seq. ID no. 12482594
  misc_feature (1)..(157): Homolog of NCBI NO: 25372975 NR Description: hypothetical protein [imported] - Arabidopsis
  misc_feature (1)..(157): Homolog of NCBI NO: 15220918 NR Description: hypothetical protein; protein id: At1g09290.1
  misc_feature (1)..(259): Homolog of NCBI NO: 24030215 NR Description: unknown protein [Arabidopsis thaliana]
  misc_feature (1)..(259): Homolog of NCBI NO: 14334964 NR Description: unknown protein [Arabidopsis thaliana]
MHEEKPEVLNSTASKKQKVCAQETEEGGEKTVPLENDALQETGENPNVEDLKLANEEHNSLMSLVKLTKSGLLLFTFPVENSPNTTNIVSRVFQSMESGALKAPIWCHRIFPVQATCGLTEKELRETVSKLVQRFVNDKDNTLSKPVKFAAGYQRRGAEETKGKIRKDASDVLVQCPLLDRIKCFETVAAGVKDIVPDSVVDLKSPELCVLVELLPLSRISSGSFVAAVSVLPHRLVSTKPKLCIKPLVPESKHKKGPN

SEQ ID NO: 38844 - protein, 198 aa, Arabidopsis thaliana
  peptide (1)..(198): Ceres Seq. ID no. 12482595
  misc_feature (1)..(96): Homolog of NCBI NO: 25372975 NR Description: hypothetical protein [imported] - Arabidopsis
  misc_feature (1)..(96): Homolog of NCBI NO: 15220918 NR Description: hypothetical protein; protein id: At1g09290.1
  misc_feature (1)..(198): Homolog of NCBI NO: 24030215 NR Description: unknown protein [Arabidopsis thaliana]
  misc_feature (1)..(198): Homolog of NCBI NO: 14334964 NR Description: unknown protein [Arabidopsis thaliana]
MSLVKLTKSGLLLFTFPVENSPNTTNIVSRVFQSMESGALKAPIWCHRIFPVQATCGLTEKELRETVSKLVQRFVNDKDNTLSKPVKFAAGYQRRGAEETKGKIRKDASDVLVQCPLLDRIKCFETVAAGVKDIVPDSVVDLKSPELCVLVELLPLSRISSGSFVAAVSVLPHRLVSTKPKLCIKPLVPESKHKKGPN

SEQ ID NO: 38845 - protein, 164 aa, Arabidopsis thaliana
  peptide (1)..(164): Ceres Seq. ID no. 12482596
  misc_feature (1)..(62): Homolog of NCBI NO: 25372975 NR Description: hypothetical protein [imported] - Arabidopsis
  misc_feature (1)..(62): Homolog of NCBI NO: 15220918 NR Description: hypothetical protein; protein id: At1g09290.1
  misc_feature (1)..(164): Homolog of NCBI NO: 24030215 NR Description: unknown protein [Arabidopsis thaliana]
  misc_feature (1)..(164): Homolog of NCBI NO: 14334964 NR Description: unknown protein [Arabidopsis thaliana]
MESGALKAPIWCHRIFPVQATCGLTEKELRETVSKLVQRFVNDKDNTLSKPVKFAAGYQRRGAEETKGKIRKDASDVLVQCPLLDRIKCFETVAAGVKDIVPDSVVDLKSPELCVLVELLPLSRISSGSFVAAVSVLPHRLVSTKPKLCIKPLVPESKHKKGPN

SEQ ID NO: 38846 - DNA, 1234 bp, Arabidopsis thaliana
  misc_feature (1)..(1234): Ceres Seq. ID no. 12562567
  misc_feature: MA Experiment ID: 108434 Result: Down-regulated in Transcription
  misc_feature: MA Experiment 108434 PARAMETER Experiment Name: At_Root_Tips_cDNA_P Parameter: Tissue Value: Root Tips
  misc_feature: MA Experiment ID: 108461 Result: Down-regulated in Transcription
  misc_feature: MA Experiment 108461 PARAMETER Experiment Name: At_Germinating_Seeds_cDNA_P Parameter: Age (day) Value: 1 vs. 0
  misc_feature: MA Experiment 108461 PARAMETER Experiment Name: At_Germinating_Seeds_cDNA_P Parameter: Tissue Value: Germinating Seeds
  misc_feature: MA Experiment ID: 108462 Result: Down-regulated in Transcription
  misc_feature: MA Experiment 108462 PARAMETER Experiment Name: At_Germinating_Seeds_cDNA_P Parameter: Age (day) Value: 2 vs. 0
  misc_feature: MA Experiment 108462 PARAMETER Experiment Name: At_Germinating_Seeds_cDNA_P Parameter: Tissue Value: Germinating Seeds
  misc_feature: MA Experiment ID: 108488 Result: Down-regulated in Transcription
  misc_feature: MA Experiment ID: 108577 Result: Down-regulated in Transcription
  misc_feature: MA Experiment 108577 PARAMETER Experiment Name: At_42deg_Heat_cDNA_P Parameter: Temperature (deg C) Value: 42 vs. 22
  misc_feature: MA Experiment 108577 PARAMETER Experiment Name: At_42deg_Heat_cDNA_P Parameter: Timepoint (hr) Value: 6
  misc_feature: MA Experiment 108577 PARAMETER Experiment Name: At_42deg_Heat_cDNA_P Parameter: Tissue Value: Aerial
  misc_feature: MA Experiment ID: 20000069 Result: Up-regulated in Transcription
  misc_feature: MA Experiment 20000069 PARAMETER Experiment Name: At_100uM_ABA_Mutants_cDNA_P Parameter: Plant Line Value: CS23
  misc_feature: MA Experiment 20000069 PARAMETER Experiment Name: At_100uM_ABA_Mutants_cDNA_P Parameter: Timepoint (hr) Value: 6
  misc_feature: MA Experiment 20000069 PARAMETER Experiment Name: At_100uM_ABA_Mutants_cDNA_P Parameter: Tissue Value: Aerial
  misc_feature: MA Experiment 20000069 PARAMETER Experiment Name: At_100uM_ABA_Mutants_cDNA_P Parameter: Treatment Value: 100uM ABA vs. No Treatment
  misc_feature: MA Experiment ID: 20000070 Result: Up-regulated in Transcription
  misc_feature: MA Experiment 20000070 PARAMETER Experiment Name: At_100uM_ABA_Mutants_cDNA_P Parameter: Plant Line Value: CS24
  misc_feature: MA Experiment 20000070 PARAMETER Experiment Name: At_100uM_ABA_Mutants_cDNA_P Parameter: Timepoint (hr) Value: 6
  misc_feature: MA Experiment 20000070 PARAMETER Experiment Name: At_100uM_ABA_Mutants_cDNA_P Parameter: Tissue Value: Aerial
  misc_feature: MA Experiment 20000070 PARAMETER Experiment Name: At_100uM_ABA_Mutants_cDNA_P Parameter: Treatment Value: 100uM ABA vs. No Treatment
  misc_feature: MA Experiment ID: 20000071 Result: Up-regulated in Transcription
  misc_feature: MA Experiment 20000071 PARAMETER Experiment Name: At_100uM_ABA_Mutants_cDNA_P Parameter: Plant Line Value: CS8104
  misc_feature: MA Experiment 20000071 PARAMETER Experiment Name: At_100uM_ABA_Mutants_cDNA_P Parameter: Timepoint (hr) Value: 6
  misc_feature: MA Experiment 20000071 PARAMETER Experiment Name: At_100uM_ABA_Mutants_cDNA_P Parameter: Tissue Value: Aerial
  misc_feature: MA Experiment 20000071 PARAMETER Experiment Name: At_100uM_ABA_Mutants_cDNA_P Parameter: Treatment Value: 100uM ABA vs. No Treatment
  misc_feature: MA Experiment ID: 20000072 Result: Up-regulated in Transcription
  misc_feature: MA Experiment 20000072 PARAMETER Experiment Name: At_100uM_ABA_Mutants_cDNA_P Parameter: Plant Line Value: CS8105
  misc_feature: MA Experiment 20000072 PARAMETER Experiment Name: At_100uM_ABA_Mutants_cDNA_P Parameter: Timepoint (hr) Value: 6
  misc_feature: MA Experiment 20000072 PARAMETER Experiment Name: At_100uM_ABA_Mutants_cDNA_P Parameter: Tissue Value: Aerial
  misc_feature: MA Experiment 20000072 PARAMETER Experiment Name: At_100uM_ABA_Mutants_cDNA_P Parameter: Treatment Value: 100uM ABA vs. No Treatment
  misc_feature: MA Experiment ID: 20000086 Result: Up-regulated in Transcription
  misc_feature: MA Experiment 20000086 PARAMETER Experiment Name: At_100uM_ABA_Mutants_cDNA_P Parameter: Plant Line Value: CS22
  misc_feature: MA Experiment 20000086 PARAMETER Experiment Name: At_100uM_ABA_Mutants_cDNA_P Parameter: Timepoint (hr) Value: 6
  misc_feature: MA Experiment 20000086 PARAMETER Experiment Name: At_100uM_ABA_Mutants_cDNA_P Parameter: Tissue Value: Aerial
  misc_feature: MA Experiment 20000086 PARAMETER Experiment Name: At_100uM_ABA_Mutants_cDNA_P Parameter: Treatment Value: 100uM ABA vs. No Treatment
  misc_feature: MA Experiment ID: 20000088 Result: Up-regulated in Transcription
  misc_feature: MA Experiment 20000088 PARAMETER Experiment Name: At_100uM_ABA_Mutants_cDNA_P Parameter: Plant Line Value: Landsberg
  misc_feature: MA Experiment 20000088 PARAMETER Experiment Name: At_100uM_ABA_Mutants_cDNA_P Parameter: Timepoint (hr) Value: 6
  misc_feature: MA Experiment 20000088 PARAMETER Experiment Name: At_100uM_ABA_Mutants_cDNA_P Parameter: Tissue Value: Aerial
  misc_feature: MA Experiment 20000088 PARAMETER Experiment Name: At_100uM_ABA_Mutants_cDNA_P Parameter: Treatment Value: 100uM ABA vs. No Treatment
  misc_feature: MA Experiment ID: 20000089 Result: Up-regulated in Transcription
  misc_feature: MA Experiment ID: 20000090 Result: Up-regulated in Transcription
  misc_feature: MA Experiment ID: 20000111 Result: Down-regulated in Transcription
  misc_feature: MA Experiment 20000111 PARAMETER Experiment Name: At_42deg_Heat_cDNA_P Parameter: Temperature (deg C) Value: 42 vs. 22
  misc_feature: MA Experiment 20000111 PARAMETER Experiment Name: At_42deg_Heat_cDNA_P Parameter: Timepoint (hr) Value: 6
  misc_feature: MA Experiment 20000111 PARAMETER Experiment Name: At_42deg_Heat_cDNA_P Parameter: Tissue Value: Aerial
  misc_feature: MA Experiment ID: 20000113 Result: Down-regulated in Transcription
  misc_feature: MA Experiment 20000113 PARAMETER Experiment Name: At_42deg_Heat_cDNA_P Parameter: Temperature (deg C) Value: 42 vs. 22
  misc_feature: MA Experiment 20000113 PARAMETER Experiment Name: At_42deg_Heat_cDNA_P Parameter: Timepoint (hr) Value: 8
  misc_feature: MA Experiment 20000113 PARAMETER Experiment Name: At_42deg_Heat_cDNA_P Parameter: Tissue Value: Aerial
  misc_feature: MA Experiment ID: 20000117 Result: Up-regulated in Transcription
  misc_feature: MA Experiment 20000117 PARAMETER Experiment Name: At_100uM_ABA_Mutants_cDNA_P Parameter: Plant Line Value: Columbia
  misc_feature: MA Experiment 20000117 PARAMETER Experiment Name: At_100uM_ABA_Mutants_cDNA_P Parameter: Timepoint (hr) Value: 6
  misc_feature: MA Experiment 20000117 PARAMETER Experiment Name: At_100uM_ABA_Mutants_cDNA_P Parameter: Tissue Value: Aerial
  misc_feature: MA Experiment 20000117 PARAMETER Experiment Name: At_100uM_ABA_Mutants_cDNA_P Parameter: Treatment Value: 100uM ABA vs. No Treatment
  misc_feature: MA Experiment ID: 20000173 Result: Down-regulated in Transcription
  misc_feature: MA Experiment 20000173 PARAMETER Experiment Name: At_42deg_Heat_P Parameter: Age (day) Value: 14
  misc_feature: MA Experiment 20000173 PARAMETER Experiment Name: At_42deg_Heat_P Parameter: Organism Value: A. thaliana
  misc_feature: MA Experiment 20000173 PARAMETER Experiment Name: At_42deg_Heat_P Parameter: Plant Line Value: WS
  misc_feature: MA Experiment 20000173 PARAMETER Experiment Name: At_42deg_Heat_P Parameter: Temperature (deg C) Value: 42 vs. 22
  misc_feature: MA Experiment 20000173 PARAMETER Experiment Name: At_42deg_Heat_P Parameter: Timepoint (hr) Value: 6
  misc_feature: MA Experiment 20000173 PARAMETER Experiment Name: At_42deg_Heat_P Parameter: Tissue Value: Aerial
  misc_feature: MA Experiment ID: 20000179 Result: Down-regulated in Transcription
  misc_feature: MA Experiment 20000179 PARAMETER Experiment Name: At_Germinating_Seeds_P Parameter: Age (hr) Value: 6 vs. 0
  misc_feature: MA Experiment 20000179 PARAMETER Experiment Name: At_Germinating_Seeds_P Parameter: Tissue Value: Germinating Seeds
  misc_feature: MA Experiment ID: 20000180 Result: Down-regulated in Transcription
  misc_feature: MA Experiment 20000180 PARAMETER Experiment Name: At_Germinating_Seeds_P Parameter: Age (hr) Value: 24 vs. 0
  misc_feature: MA Experiment 20000180 PARAMETER Experiment Name: At_Germinating_Seeds_P Parameter: Tissue Value: Germinating Seeds
  misc_feature: MA Experiment ID: 20000184 Result: Down-regulated in Transcription
  misc_feature: MA Experiment 20000184 PARAMETER Experiment Name: At_Shoots__P Parameter: Age (day) Value: 7
  misc_feature: MA Experiment 20000184 PARAMETER Experiment Name: At_Shoots__P Parameter: Tissue Value: Shoots vs. Whole Plant
  misc_feature: MA Experiment ID: 20000227 Result: Down-regulated in Transcription
  misc_feature: MA Experiment 20000227 PARAMETER Experiment Name: At_Root-Tips-vs-Tops_P Parameter: Tissue Value: Root Tips vs. Root Tops
  misc_feature: MA Experiment ID: 20000437 Result: Up-regulated in Transcription
  misc_feature: MA Experiment 20000437 PARAMETER Experiment Name: At_Drought_P Parameter: Age (day) Value: 8
  misc_feature: MA Experiment 20000437 PARAMETER Experiment Name: At_Drought_P Parameter: Organism Value: A. thaliana
  misc_feature: MA Experiment 20000437 PARAMETER Experiment Name: At_Drought_P Parameter: Plant Line Value: WS
  misc_feature: MA Experiment 20000437 PARAMETER Experiment Name: At_Drought_P Parameter: Timepoint (hr) Value: 24
  misc_feature: MA Experiment 20000437 PARAMETER Experiment Name: At_Drought_P Parameter: Tissue Value: Whole Plant
  misc_feature: MA Experiment 20000437 PARAMETER Experiment Name: At_Drought_P Parameter: Treatment Value: Drought vs. No Drought
  misc_feature: MA Experiment ID: 20000438 Result: Down-regulated in Transcription
  misc_feature: MA Experiment 20000438 PARAMETER Experiment Name: At_Shoots__P Parameter: Age (day) Value: 14
  misc_feature: MA Experiment 20000438 PARAMETER Experiment Name: At_Shoots__P Parameter: Tissue Value: Shoots vs. Whole Plant
  misc_feature: MA Experiment ID: 20000794 Result: Up-regulated in Transcription
  misc_feature: MA Experiment 20000794 PARAMETER Experiment Name: At_Petals_P Parameter: Age (day) Value: 23-25 days
  misc_feature: MA Experiment 20000794 PARAMETER Experiment Name: At_Petals_P Parameter: Plant Line Value: WS
  misc_feature: MA Experiment 20000794 PARAMETER Experiment Name: At_Petals_P Parameter: Tissue Value: Petals vs. Whole plant
  misc_feature: MA Experiment ID: 20001557 Result: Down-regulated in Transcription
  misc_feature: MA Experiment 20001557 PARAMETER Experiment Name: At_Drought_Soil_Dry_P Parameter: Age (day) Value: 27
  misc_feature: MA Experiment 20001557 PARAMETER Experiment Name: At_Drought_Soil_Dry_P Parameter: Organism Value: A. thaliana
  misc_feature: MA Experiment 20001557 PARAMETER Experiment Name: At_Drought_Soil_Dry_P Parameter: Plant Line Value: WS
  misc_feature: MA Experiment 20001557 PARAMETER Experiment Name: At_Drought_Soil_Dry_P Parameter: Post Timepoint (hr) Value: 3
  misc_feature: MA Experiment 20001557 PARAMETER Experiment Name: At_Drought_Soil_Dry_P Parameter: Post-Treatment Value: Re-Water vs. No Drought
  misc_feature: MA Experiment 20001557 PARAMETER Experiment Name: At_Drought_Soil_Dry_P Parameter: Timepoint (day) Value: 13
  misc_feature: MA Experiment 20001557 PARAMETER Experiment Name: At_Drought_Soil_Dry_P Parameter: Treatment Value: Drought vs. No Drought
  misc_feature: MA Experiment ID: 20001558 Result: Down-regulated in Transcription
  misc_feature: MA Experiment 20001558 PARAMETER Experiment Name: At_Drought_Soil_Dry_P Parameter: Age (day) Value: 27
  misc_feature: MA Experiment 20001558 PARAMETER Experiment Name: At_Drought_Soil_Dry_P Parameter: Organism Value: A. thaliana
  misc_feature: MA Experiment 20001558 PARAMETER Experiment Name: At_Drought_Soil_Dry_P Parameter: Plant Line Value: WS
  misc_feature: MA Experiment 20001558 PARAMETER Experiment Name: At_Drought_Soil_Dry_P Parameter: Post Timepoint (hr) Value: 6
  misc_feature: MA Experiment 20001558 PARAMETER Experiment Name: At_Drought_Soil_Dry_P Parameter: Post-Treatment Value: Re-Water vs. No Drought
  misc_feature: MA Experiment 20001558 PARAMETER Experiment Name: At_Drought_Soil_Dry_P Parameter: Timepoint (day) Value: 13
  misc_feature: MA Experiment 20001558 PARAMETER Experiment Name: At_Drought_Soil_Dry_P Parameter: Treatment Value: Drought vs. No Drought
  misc_feature: MA Experiment ID: 20001757 Result: Down-regulated in Transcription
  misc_feature: MA Experiment 20001757 PARAMETER Experiment Name: At_50mM_NH4NO3_L-to-H_P Parameter: Timepoint (hr) Value: 6
  misc_feature: MA Experiment 20001757 PARAMETER Experiment Name: At_50mM_NH4NO3_L-to-H_P Parameter: Tissue Value: Leaf
  misc_feature: MA Experiment 20001757 PARAMETER Experiment Name: At_50mM_NH4NO3_L-to-H_P Parameter: Treatment Value: 50mM NH4NO3 vs 100mM Mannitol
aagattgtcgctttagcttctccggtttttaagcaaagaagggtatatgagtttgttggagatgggtggagatatgatggaagatgattgggaatttgcgtcatcatcaaaccctaaaagaaccctagttcttgtgggccgtactggaaacggaaagagtgcgacaggtaacagtatccttgggaggaaagcttttaggtcaagagctagaactgtaggagtgacaagcacgtgcgagtcacagagagttgttcaagaagatggtgatatcattaatgttgttgatactcctggtttgtttgatttgtctactgcagctgattttattggtaaagagattgtgaggtgtataagtttggcagaagatgggattcatgcgatcttgttggtattctctgtgaggcggcttgctgaagaggaacaaactgtgcttagtttcttgcaagcgttattcggcagtaagatcgctgactatatgatcgttgtttttaccggtggtgatgagttggaagagaatgaggagacattggaggagtatttggctgactattgccctgagtttcttaaagaaattcttgggatatgtgacaatcggttggtgttgtttaataacaagactactgataatgtcaaaaaggctgagcaagttcagaagcttctctcgcttgttgaatctgttgtcaaacagaacaatggaaaaccgtattcagatgagttgttccatgagctacaggaagaggctatcaagctaagggaccagaaaaaggaggttgagttacttcagggttactctaataatgagatagatgagttcaagaagcaaatcgatatgtcctatgacaggcagcttagccgcatcaccgagatggtggagactaagctgagagacactgctaagagactagagcagcaactaggtgaagagcaagctgcaagacttgaagcggagaagagggcaaacgaagttcagaagcggtcaagcgatgagattaagaaactcagagagaatctggagagggcggagaaagagacgaaggaactccagaagaaactgggaaagtgcatcaatctatgatatattgagatgttgtagctccagtgaaatctgataagattattcatgtcaagttttttatgtagtttattttttcttttggttttttaacaatatggttttattaaagacagtgtgttataaggtttgcttaaatcatactaccccttaaatcttccc

SEQ ID NO: 38847 - protein, 342 aa, Arabidopsis thaliana
  peptide (1)..(342): Ceres Seq. ID no. 12562568
  misc_feature (25)..(239): Pfam Name: AIG1 family Pfam Description: AIG1 family
  misc_feature (11)..(314): Homolog of NCBI NO: 15217719 NR Description: AIG1-like protein; protein id: At1g33900.1
  misc_feature (16)..(335): Homolog of NCBI NO: 10092442 NR Description: disease resistance protein AIG1; 916-2572
  misc_feature (16)..(335): Homolog of NCBI NO: 15217731 NR Description: AIG1; protein id: At1g33960.1, supported by cDNA:
  misc_feature (11)..(338): Homolog of NCBI NO: 15234871 NR Description: AIG1-like protein; protein id: At4g09950.1
  misc_feature (8)..(330): Homolog of NCBI NO: 15234855 NR Description: AIG1-like protein; protein id: At4g09940.1
  misc_feature (5)..(333): Homolog of NCBI NO: 4097585 NR Description: NTGP4 [Nicotiana tabacum]
  misc_feature (49)..(342): Homolog of NCBI NO: 12324509 NR Description: AIG1-like protein, 5' partial; 1-1205
  misc_feature (6)..(342): Homolog of NCBI NO: 24417378 NR Description: unknown [Arabidopsis thaliana]
  misc_feature (6)..(342): Homolog of NCBI NO: 25373414 NR Description: hypothetical protein F12G12.21 - Arabidopsis
  misc_feature (1)..(342): Homolog of NCBI NO: 18399081 NR Description: expressed protein
MSLLEMGGDMMEDDWEFASSSNPKRTLVLVGRTGNGKSATGNSILGRKAFRSRARTVGVTSTCESQRVVQEDGDIINVVDTPGLFDLSTAADFIGKEIVRCISLAEDGIHAILLVFSVRRLAEEEQTVLSFLQALFGSKIADYMIVVFTGGDELEENEETLEEYLADYCPEFLKEILGICDNRLVLFNNKTTDNVKKAEQVQKLLSLVESVVKQNNGKPYSDELFHELQEEAIKLRDQKKEVELLQGYSNNEIDEFKKQIDMSYDRQLSRITEMVETKLRDTAKRLEQQLGEEQAARLEAEKRANEVQKRSSDEIKKLRENLERAEKETKELQKKLGKCINL

SEQ ID NO: 38848 - protein, 337 aa, Arabidopsis thaliana
  peptide (1)..(337): Ceres Seq. ID no. 12562569
  misc_feature (20)..(234): Pfam Name: AIG1 family Pfam Description: AIG1 family
  misc_feature (6)..(309): Homolog of NCBI NO: 15217719 NR Description: AIG1-like protein; protein id: At1g33900.1
  misc_feature (11)..(330): Homolog of NCBI NO: 10092442 NR Description: disease resistance protein AIG1; 916-2572
  misc_feature (11)..(330): Homolog of NCBI NO: 15217731 NR Description: AIG1; protein id: At1g33960.1, supported by cDNA:
  misc_feature (6)..(333): Homolog of NCBI NO: 15234871 NR Description: AIG1-like protein; protein id: At4g09950.1
  misc_feature (3)..(325): Homolog of NCBI NO: 15234855 NR Description: AIG1-like protein; protein id: At4g09940.1
  misc_feature (1)..(328): Homolog of NCBI NO: 4097585 NR Description: NTGP4 [Nicotiana tabacum]
  misc_feature (44)..(337): Homolog of NCBI NO: 12324509 NR Description: AIG1-like protein, 5' partial; 1-1205
  misc_feature (1)..(337): Homolog of NCBI NO: 24417378 NR Description: unknown [Arabidopsis thaliana]
  misc_feature (1)..(337): Homolog of NCBI NO: 25373414 NR Description: hypothetical protein F12G12.21 - Arabidopsis
  misc_feature (1)..(337): Homolog of NCBI NO: 18399081 NR Description: expressed protein
MGGDMMEDDWEFASSSNPKRTLVLVGRTGNGKSATGNSILGRKAFRSRARTVGVTSTCESQRVVQEDGDIINVVDTPGLFDLSTAADFIGKEIVRCISLAEDGIHAILLVFSVRRLAEEEQTVLSFLQALFGSKIADYMIVVFTGGDELEENEETLEEYLADYCPEFLKEILGICDNRLVLFNNKTTDNVKKAEQVQKLLSLVESVVKQNNGKPYSDELFHELQEEAIKLRDQKKEVELLQGYSNNEIDEFKKQIDMSYDRQLSRITEMVETKLRDTAKRLEQQLGEEQAARLEAEKRANEVQKRSSDEIKKLRENLERAEKETKELQKKLGKCINL

SEQ ID NO: 38849 - protein, 333 aa, Arabidopsis thaliana
  peptide (1)..(333): Ceres Seq. ID no. 12562570
  misc_feature (16)..(230): Pfam Name: AIG1 family Pfam Description: AIG1 family
  misc_feature (2)..(305): Homolog of NCBI NO: 15217719 NR Description: AIG1-like protein; protein id: At1g33900.1
  misc_feature (7)..(326): Homolog of NCBI NO: 10092442 NR Description: disease resistance protein AIG1; 916-2572
  misc_feature (7)..(326): Homolog of NCBI NO: 15217731 NR Description: AIG1; protein id: At1g33960.1, supported by cDNA:
  misc_feature (2)..(329): Homolog of NCBI NO: 15234871 NR Description: AIG1-like protein; protein id: At4g09950.1
  misc_feature (1)..(321): Homolog of NCBI NO: 15234855 NR Description: AIG1-like protein; protein id: At4g09940.1
  misc_feature (1)..(324): Homolog of NCBI NO: 4097585 NR Description: NTGP4 [Nicotiana tabacum]
  misc_feature (40)..(333): Homolog of NCBI NO: 12324509 NR Description: AIG1-like protein, 5' partial; 1-1205
  misc_feature (1)..(333): Homolog of NCBI NO: 24417378 NR Description: unknown [Arabidopsis thaliana]
  misc_feature (1)..(333): Homolog of NCBI NO: 25373414 NR Description: hypothetical protein F12G12.21 - Arabidopsis
  misc_feature (1)..(333): Homolog of NCBI NO: 18399081 NR Description: expressed protein
MMEDDWEFASSSNPKRTLVLVGRTGNGKSATGNSILGRKAFRSRARTVGVTSTCESQRVVQEDGDIINVVDTPGLFDLSTAADFIGKEIVRCISLAEDGIHAILLVFSVRRLAEEEQTVLSFLQALFGSKIADYMIVVFTGGDELEENEETLEEYLADYCPEFLKEILGICDNRLVLFNNKTTDNVKKAEQVQKLLSLVESVVKQNNGKPYSDELFHELQEEAIKLRDQKKEVELLQGYSNNEIDEFKKQIDMSYDRQLSRITEMVETKLRDTAKRLEQQLGEEQAARLEAEKRANEVQKRSSDEIKKLRENLERAEKETKELQKKLGKCINL

SEQ ID NO: 38850 - DNA, 1204 bp, Arabidopsis thaliana; identical to SEQ ID NO: 26605
  misc_feature (1)..(1204): Ceres Seq. ID no. 12371447
  misc_feature: MA Experiment ID: 20000184 Result: Up-regulated in Transcription
  misc_feature: MA Experiment 20000184 PARAMETER Experiment Name: At_Shoots__P Parameter: Age (day) Value: 7
  misc_feature: MA Experiment 20000184 PARAMETER Experiment Name: At_Shoots__P Parameter: Tissue Value: Shoots vs. Whole Plant
  misc_feature: MA Experiment ID: 20000234 Result: Up-regulated in Transcription
  misc_feature: MA Experiment 20000234 PARAMETER Experiment Name: At_Siliques_P Parameter: Age (day) Value: 21
  misc_feature: MA Experiment 20000234 PARAMETER Experiment Name: At_Siliques_P Parameter: Organism Value: A. thaliana
  misc_feature: MA Experiment 20000234 PARAMETER Experiment Name: At_Siliques_P Parameter: Plant Line Value: WS
  misc_feature: MA Experiment 20000234 PARAMETER Experiment Name: At_Siliques_P Parameter: Tissue Value: Less Than 5mm Siliques vs. Whole Plant
  misc_feature: MA Experiment ID: 20000264 Result: Up-regulated in Transcription
  misc_feature: MA Experiment 20000264 PARAMETER Experiment Name: At_Open_Flower_P Parameter: Age (day) Value: 21
  misc_feature: MA Experiment 20000264 PARAMETER Experiment Name: At_Open_Flower_P Parameter: Plant Line Value: WS
  misc_feature: MA Experiment 20000264 PARAMETER Experiment Name: At_Open_Flower_P Parameter: Tissue Value: Open Flower vs. Whole Plant
  misc_feature: MA Experiment ID: 20000265 Result: Up-regulated in Transcription
  misc_feature: MA Experiment 20000265 PARAMETER Experiment Name: At_Open_Flower_P Parameter: Age (day) Value: 21
  misc_feature: MA Experiment 20000265 PARAMETER Experiment Name: At_Open_Flower_P Parameter: Plant Line Value: WS
  misc_feature: MA Experiment 20000265 PARAMETER Experiment Name: At_Open_Flower_P Parameter: Tissue Value: Closed Flower vs. Whole Plant
  misc_feature: MA Experiment ID: 20000436 Result: Down-regulated in Transcription
  misc_feature: MA Experiment 20000436 PARAMETER Experiment Name: At_Drought_P Parameter: Age (day) Value: 7
  misc_feature: MA Experiment 20000436 PARAMETER Experiment Name: At_Drought_P Parameter: Organism Value: A. thaliana
  misc_feature: MA Experiment 20000436 PARAMETER Experiment Name: At_Drought_P Parameter: Plant Line Value: WS
  misc_feature: MA Experiment 20000436 PARAMETER Experiment Name: At_Drought_P Parameter: Timepoint (hr) Value: 12
  misc_feature: MA Experiment 20000436 PARAMETER Experiment Name: At_Drought_P Parameter: Tissue Value: Whole Plant
  misc_feature: MA Experiment 20000436 PARAMETER Experiment Name: At_Drought_P Parameter: Treatment Value: Drought vs. No Drought
  misc_feature: MA Experiment ID: 20000437 Result: Down-regulated in Transcription
  misc_feature: MA Experiment 20000437 PARAMETER Experiment Name: At_Drought_P Parameter: Age (day) Value: 8
  misc_feature: MA Experiment 20000437 PARAMETER Experiment Name: At_Drought_P Parameter: Organism Value: A. thaliana
  misc_feature: MA Experiment 20000437 PARAMETER Experiment Name: At_Drought_P Parameter: Plant Line Value: WS
  misc_feature: MA Experiment 20000437 PARAMETER Experiment Name: At_Drought_P Parameter: Timepoint (hr) Value: 24
  misc_feature: MA Experiment 20000437 PARAMETER Experiment Name: At_Drought_P Parameter: Tissue Value: Whole Plant
  misc_feature: MA Experiment 20000437 PARAMETER Experiment Name: At_Drought_P Parameter: Treatment Value: Drought vs. No Drought
  misc_feature: MA Experiment ID: 20000453 Result: Down-regulated in Transcription
  misc_feature: MA Experiment 20000453 PARAMETER Experiment Name: At_100uM_ABA_P Parameter: Age (day) Value: 15
  misc_feature: MA Experiment 20000453 PARAMETER Experiment Name: At_100uM_ABA_P Parameter: Organism Value: A. thaliana
  misc_feature: MA Experiment 20000453 PARAMETER Experiment Name: At_100uM_ABA_P Parameter: Plant Line Value: WS
  misc_feature: MA Experiment 20000453 PARAMETER Experiment Name: At_100uM_ABA_P Parameter: Timepoint (hr) Value: 24
  misc_feature: MA Experiment 20000453 PARAMETER Experiment Name: At_100uM_ABA_P Parameter: Tissue Value: Aerial
  misc_feature: MA Experiment 20000453 PARAMETER Experiment Name: At_100uM_ABA_P Parameter: Treatment Value: 100uM ABA vs. No Treatment
  misc_feature: MA Experiment ID: 20000794 Result: Down-regulated in Transcription
  misc_feature: MA Experiment 20000794 PARAMETER Experiment Name: At_Petals_P Parameter: Age (day) Value: 23-25 days
  misc_feature: MA Experiment 20000794 PARAMETER Experiment Name: At_Petals_P Parameter: Plant Line Value: WS
  misc_feature: MA Experiment 20000794 PARAMETER Experiment Name: At_Petals_P Parameter: Tissue Value: Petals vs. Whole plant
  misc_feature: MA Experiment ID: 20001451 Result: Down-regulated in Transcription
  misc_feature: MA Experiment 20001451 PARAMETER Experiment Name: At_Far-red-induction_P Parameter: Age (day) Value: 7
  misc_feature: MA Experiment 20001451 PARAMETER Experiment Name: At_Far-red-induction_P Parameter: Light Value: Far-red vs. White
  misc_feature: MA Experiment 20001451 PARAMETER Experiment Name: At_Far-red-induction_P Parameter: Organism Value: A. thaliana
  misc_feature: MA Experiment 20001451 PARAMETER Experiment Name: At_Far-red-induction_P Parameter: Plant Line Value: Columbia
  misc_feature: MA Experiment 20001451 PARAMETER Experiment Name: At_Far-red-induction_P Parameter: Timepoint (hr) Value: 24
  misc_feature: MA Experiment 20001451 PARAMETER Experiment Name: At_Far-red-induction_P Parameter: Tissue Value: Whole Plant
  misc_feature: MA Experiment ID: 20001458 Result: Up-regulated in Transcription
  misc_feature: MA Experiment 20001458 PARAMETER Experiment Name: At_50mM_NH4NO3_L-to-H_P Parameter: Age (day) Value: Undefined
  misc_feature: MA Experiment 20001458 PARAMETER Experiment Name: At_50mM_NH4NO3_L-to-H_P Parameter: Organism Value: Undefined
  misc_feature: MA Experiment 20001458 PARAMETER Experiment Name: At_50mM_NH4NO3_L-to-H_P Parameter: Plant Line Value: Undefined
  misc_feature: MA Experiment 20001458 PARAMETER Experiment Name: At_50mM_NH4NO3_L-to-H_P Parameter: Timepoint (hr) Value: 2
  misc_feature: MA Experiment 20001458 PARAMETER Experiment Name: At_50mM_NH4NO3_L-to-H_P Parameter: Tissue Value: Siliques
  misc_feature: MA Experiment 20001458 PARAMETER Experiment Name: At_50mM_NH4NO3_L-to-H_P Parameter: Treatment Value: 50mM NH4NO3 vs. 100mM Manitol
  misc_feature: MA Experiment ID: 20001557 Result: Up-regulated in Transcription
  misc_feature: MA Experiment 20001557 PARAMETER Experiment Name: At_Drought_Soil_Dry_P Parameter: Age (day) Value: 27
  misc_feature: MA Experiment 20001557 PARAMETER Experiment Name: At_Drought_Soil_Dry_P Parameter: Organism Value: A. thaliana
  misc_feature: MA Experiment 20001557 PARAMETER Experiment Name: At_Drought_Soil_Dry_P Parameter: Plant Line Value: WS
  misc_feature: MA Experiment 20001557 PARAMETER Experiment Name: At_Drought_Soil_Dry_P Parameter: Post Timepoint (hr) Value: 3
  misc_feature: MA Experiment 20001557 PARAMETER Experiment Name: At_Drought_Soil_Dry_P Parameter: Post-Treatment Value: Re-Water vs. No Drought
  misc_feature: MA Experiment 20001557 PARAMETER Experiment Name: At_Drought_Soil_Dry_P Parameter: Timepoint (day) Value: 13
  misc_feature: MA Experiment 20001557 PARAMETER Experiment Name: At_Drought_Soil_Dry_P Parameter: Treatment Value: Drought vs. No Drought
  misc_feature: MA Experiment ID: 20001558 Result: Up-regulated in Transcription
  misc_feature: MA Experiment 20001558 PARAMETER Experiment Name: At_Drought_Soil_Dry_P Parameter: Age (day) Value: 27
  misc_feature: MA Experiment 20001558 PARAMETER Experiment Name: At_Drought_Soil_Dry_P Parameter: Organism Value: A. thaliana
  misc_feature: MA Experiment 20001558 PARAMETER Experiment Name: At_Drought_Soil_Dry_P Parameter: Plant Line Value: WS
  misc_feature: MA Experiment 20001558 PARAMETER Experiment Name: At_Drought_Soil_Dry_P Parameter: Post Timepoint (hr) Value: 6
  misc_feature: MA Experiment 20001558 PARAMETER Experiment Name: At_Drought_Soil_Dry_P Parameter: Post-Treatment Value: Re-Water vs. No Drought
  misc_feature: MA Experiment 20001558 PARAMETER Experiment Name: At_Drought_Soil_Dry_P Parameter: Timepoint (day) Value: 13
  misc_feature: MA Experiment 20001558 PARAMETER Experiment Name: At_Drought_Soil_Dry_P Parameter: Treatment Value: Drought vs. No Drought
  misc_feature: MA Experiment ID: 20001560 Result: Up-regulated in Transcription
  misc_feature: MA Experiment 20001560 PARAMETER Experiment Name: At_Drought_Soil_Dry_P Parameter: Age (day) Value: 28
  misc_feature: MA Experiment 20001560 PARAMETER Experiment Name: At_Drought_Soil_Dry_P Parameter: Organism Value: A. thaliana
  misc_feature: MA Experiment 20001560 PARAMETER Experiment Name: At_Drought_Soil_Dry_P Parameter: Plant Line Value: WS
  misc_feature: MA Experiment 20001560 PARAMETER Experiment Name: At_Drought_Soil_Dry_P Parameter: Post Timepoint (hr) Value: None
  misc_feature: MA Experiment 20001560 PARAMETER Experiment Name: At_Drought_Soil_Dry_P Parameter: Post-Treatment Value: None
  misc_feature: MA Experiment 20001560 PARAMETER Experiment Name: At_Drought_Soil_Dry_P Parameter: Timepoint (day) Value: 14
  misc_feature: MA Experiment 20001560 PARAMETER Experiment Name: At_Drought_Soil_Dry_P Parameter: Treatment Value: Drought vs. No Drought
  misc_feature: MA Experiment ID: 20001757 Result: Up-regulated in Transcription
  misc_feature: MA Experiment 20001757 PARAMETER Experiment Name: At_50mM_NH4NO3_L-to-H_P Parameter: Timepoint (hr) Value: 6
  misc_feature: MA Experiment 20001757 PARAMETER Experiment Name: At_50mM_NH4NO3_L-to-H_P Parameter: Tissue Value: Leaf
  misc_feature: MA Experiment 20001757 PARAMETER Experiment Name: At_50mM_NH4NO3_L-to-H_P Parameter: Treatment Value: 50mM NH4NO3 vs 100mM Mannitol
  misc_feature: MA Experiment ID: 20001911 Result: Down-regulated in Transcription
  misc_feature: MA Experiment 20001911 PARAMETER Experiment Name: At_Drought_Reproduction_P Parameter: Age (day) Value: 40
  misc_feature: MA Experiment 20001911 PARAMETER Experiment Name: At_Drought_Reproduction_P Parameter: Organism Value: A. thaliana
  misc_feature: MA Experiment 20001911 PARAMETER Experiment Name: At_Drought_Reproduction_P Parameter: Plant Line Value: WS
  misc_feature: MA Experiment 20001911 PARAMETER Experiment Name: At_Drought_Reproduction_P Parameter: Timepoint (day) Value: 10
  misc_feature: MA Experiment 20001911 PARAMETER Experiment Name: At_Drought_Reproduction_P Parameter: Tissue Value: Flowers
  misc_feature: MA Experiment 20001911 PARAMETER Experiment Name: At_Drought_Reproduction_P Parameter: Treatment Value: Drought vs. No Drought

SEQ ID NO: 38851 - protein, 326 aa, Arabidopsis thaliana [sequence omitted]

SEQ ID NO: 38852 - protein, 316 aa, Arabidopsis thaliana; identical to SEQ ID NO: 26607
  peptide (1)..(316): Ceres Seq. ID no. 12371449
  misc_feature (1)..(316): Homolog of NCBI NO: 3023857 NR Description: GUANINE NUCLEOTIDE-BINDING PROTEIN BETA
  misc_feature (1)..(316): Homolog of NCBI NO: 2289095 NR Description: WD-40 repeat protein [Arabidopsis thaliana]
  misc_feature (1)..(316): Homolog of NCBI NO: 15220941 NR Description: G-protein beta family
  misc_feature (1)..(316): Homolog of NCBI NO: 15229589 NR Description: protein kinase C-receptor/G-protein, putative
  misc_feature (1)..(316): Homolog of NCBI NO: 21593440 NR Description: guanine nucleotide-binding protein, putative
  misc_feature (1)..(316): Homolog of NCBI NO: 15221916 NR Description: guanine nucleotide-binding protein, putative
  misc_feature (1)..(316): Homolog of NCBI NO: 3023857 NR Description: GUANINE NUCLEOTIDE-BINDING PROTEIN BETA
  misc_feature (1)..(316): Homolog of NCBI NO: 2289095 NR Description: WD-40 repeat protein [Arabidopsis thaliana]
  misc_feature (1)..(316): Homolog of NCBI NO: 15220941 NR Description: G-protein beta family
  misc_feature (1)..(316): Homolog of NCBI NO: 15229589 NR Description: protein kinase C-receptor/G-protein, putative
  misc_feature (1)..(316): Homolog of NCBI NO: 21593440 NR Description: guanine nucleotide-binding protein, putative
  misc_feature (1)..(316): Homolog of NCBI NO: 15221916 NR Description: guanine nucleotide-binding protein, putative

SEQ ID NO: 38853 - protein, 310 aa, Arabidopsis thaliana; identical to SEQ ID NO: 26608
  peptide (1)..(310): Ceres Seq. ID no. 12371450
  misc_feature (1)..(310): Homolog of NCBI NO: 3023857 NR Description: GUANINE NUCLEOTIDE-BINDING PROTEIN BETA
  misc_feature (1)..(310): Homolog of NCBI NO: 2289095 NR Description: WD-40 repeat protein [Arabidopsis thaliana]
  misc_feature (1)..(310): Homolog of NCBI NO: 15220941 NR Description: G-protein beta family
  misc_feature (1)..(310): Homolog of NCBI NO: 15229589 NR Description: protein kinase C-receptor/G-protein, putative
  misc_feature (1)..(310): Homolog of NCBI NO: 21593440 NR Description: guanine nucleotide-binding protein, putative
  misc_feature (1)..(310): Homolog of NCBI NO: 15221916 NR Description: guanine nucleotide-binding protein, putative
  misc_feature (1)..(310): Homolog of NCBI NO: 3023857 NR Description: GUANINE NUCLEOTIDE-BINDING PROTEIN BETA
  misc_feature (1)..(310): Homolog of NCBI NO: 2289095 NR Description: WD-40 repeat protein [Arabidopsis thaliana]
  misc_feature (1)..(310): Homolog of NCBI NO: 15220941 NR Description: G-protein beta family
  misc_feature (1)..(310): Homolog of NCBI NO: 15229589 NR Description: protein kinase C-receptor/G-protein, putative
  misc_feature (1)..(310): Homolog of NCBI NO: 21593440 NR Description: guanine nucleotide-binding protein, putative
  misc_feature (1)..(310): Homolog of NCBI NO: 15221916 NR Description: guanine nucleotide-binding protein, putative

SEQ ID NO: 38854 - DNA, 1164 bp, Arabidopsis thaliana
  misc_feature (1)..(1164): Ceres Seq. ID no. 12395652
  misc_feature: MA Experiment ID: 108569 Result: Up-regulated in Transcription
  misc_feature: MA Experiment 108569 PARAMETER Experiment Name: At_0.001%_MeJA__cDNA_P Parameter: Timepoint (hr) Value: 6
  misc_feature: MA Experiment 108569 PARAMETER Experiment Name: At_0.001%_MeJA__cDNA_P Parameter: Tissue Value: Aerial
  misc_feature: MA Experiment 108569 PARAMETER Experiment Name: At_0.001%_MeJA__cDNA_P Parameter: Treatment Value: 0.001% MeJA vs. No Treatment
  misc_feature: MA Experiment ID: 108577 Result: Up-regulated in Transcription
  misc_feature: MA Experiment 108577 PARAMETER Experiment Name: At_42deg_Heat_cDNA_P Parameter: Temperature (deg C) Value: 42 vs. 22
  misc_feature: MA Experiment 108577 PARAMETER Experiment Name: At_42deg_Heat_cDNA_P Parameter: Timepoint (hr) Value: 6
  misc_feature: MA Experiment 108577 PARAMETER Experiment Name: At_42deg_Heat_cDNA_P Parameter: Tissue Value: Aerial
  misc_feature: MA Experiment ID: 108595 Result: Down-regulated in Transcription
  misc_feature: MA Experiment 108595 PARAMETER Experiment Name: At_Ler-pi_Ovule_cDNA_P Parameter: Plant Line Value: null
  misc_feature: MA Experiment ID: 20000180 Result: Up-regulated in Transcription
  misc_feature: MA Experiment 20000180 PARAMETER Experiment Name: At_Germinating_Seeds_P Parameter: Age (hr) Value: 24 vs. 0
  misc_feature: MA Experiment 20000180 PARAMETER Experiment Name: At_Germinating_Seeds_P Parameter: Tissue Value: Germinating Seeds
  misc_feature: MA Experiment ID: 20000185 Result: Up-regulated in Transcription
  misc_feature: MA Experiment 20000185 PARAMETER Experiment Name: At_Roots__P Parameter: Age (day) Value: 7 vs. 21
  misc_feature: MA Experiment 20000185 PARAMETER Experiment Name: At_Roots__P Parameter: Organism Value: A. thaliana
  misc_feature: MA Experiment 20000185 PARAMETER Experiment Name: At_Roots__P Parameter: Tissue Value: Roots vs. Whole Plant
  misc_feature: MA Experiment ID: 20000227 Result: Up-regulated in Transcription
  misc_feature: MA Experiment 20000227 PARAMETER Experiment Name: At_Root-Tips-vs-Tops_P Parameter: Tissue Value: Root Tips vs. Root Tops
  misc_feature: MA Experiment ID: 20000234 Result: Up-regulated in Transcription
  misc_feature: MA Experiment 20000234 PARAMETER Experiment Name: At_Siliques_P Parameter: Age (day) Value: 21
  misc_feature: MA Experiment 20000234 PARAMETER Experiment Name: At_Siliques_P Parameter: Organism Value: A. thaliana
  misc_feature: MA Experiment 20000234 PARAMETER Experiment Name: At_Siliques_P Parameter: Plant Line Value: WS
  misc_feature: MA Experiment 20000234 PARAMETER Experiment Name: At_Siliques_P Parameter: Tissue Value: Less Than 5mm Siliques vs. Whole Plant
  misc_feature: MA Experiment ID: 20000235 Result: Up-regulated in Transcription
  misc_feature: MA Experiment 20000235 PARAMETER Experiment Name: At_Siliques_P Parameter: Age (day) Value: 21
  misc_feature: MA Experiment 20000235 PARAMETER Experiment Name: At_Siliques_P Parameter: Organism Value: A. thaliana
  misc_feature: MA Experiment 20000235 PARAMETER Experiment Name: At_Siliques_P Parameter: Plant Line Value: WS
  misc_feature: MA Experiment 20000235 PARAMETER Experiment Name: At_Siliques_P Parameter: Tissue Value: 5-10mm Siliques vs. Whole Plant
  misc_feature: MA Experiment ID: 20000439 Result: Up-regulated in Transcription
  misc_feature: MA Experiment 20000439 PARAMETER Experiment Name: At_Roots__P Parameter: Age (day) Value: 14 vs. 21
  misc_feature: MA Experiment 20000439 PARAMETER Experiment Name: At_Roots__P Parameter: Organism Value: A. thaliana
  misc_feature: MA Experiment 20000439 PARAMETER Experiment Name: At_Roots__P Parameter: Tissue Value: Roots vs. Whole Plant
  misc_feature: MA Experiment ID: 20000794 Result: Down-regulated in Transcription
  misc_feature: MA Experiment 20000794 PARAMETER Experiment Name: At_Petals_P Parameter: Age (day) Value: 23-25 days
  misc_feature: MA Experiment 20000794 PARAMETER Experiment Name: At_Petals_P Parameter: Plant Line Value: WS
  misc_feature: MA Experiment 20000794 PARAMETER Experiment Name: At_Petals_P Parameter: Tissue Value: Petals vs. Whole plant
  misc_feature: MA Experiment ID: 20001451 Result: Down-regulated in Transcription
  misc_feature: MA Experiment 20001451 PARAMETER Experiment Name: At_Far-red-induction_P Parameter: Age (day) Value: 7
  misc_feature: MA Experiment 20001451 PARAMETER Experiment Name: At_Far-red-induction_P Parameter: Light Value: Far-red vs. White
  misc_feature: MA Experiment 20001451 PARAMETER Experiment Name: At_Far-red-induction_P Parameter: Organism Value: A. thaliana
  misc_feature: MA Experiment 20001451 PARAMETER Experiment Name: At_Far-red-induction_P Parameter: Plant Line Value: Columbia
  misc_feature: MA Experiment 20001451 PARAMETER Experiment Name: At_Far-red-induction_P Parameter: Timepoint (hr) Value: 24
  misc_feature: MA Experiment 20001451 PARAMETER Experiment Name: At_Far-red-induction_P Parameter: Tissue Value: Whole Plant
  misc_feature: MA Experiment ID: 20001555 Result: Down-regulated in Transcription
  misc_feature: MA Experiment 20001555 PARAMETER Experiment Name: At_Drought_Soil_Dry_P Parameter: Age (day) Value: 24
  misc_feature: MA Experiment 20001555 PARAMETER Experiment Name: At_Drought_Soil_Dry_P Parameter: Organism Value: A. thaliana
  misc_feature: MA Experiment 20001555 PARAMETER Experiment Name: At_Drought_Soil_Dry_P Parameter: Plant Line Value: WS
  misc_feature: MA Experiment 20001555 PARAMETER Experiment Name: At_Drought_Soil_Dry_P Parameter: Post Timepoint (hr) Value: None
  misc_feature: MA Experiment 20001555 PARAMETER Experiment Name: At_Drought_Soil_Dry_P Parameter: Post-Treatment Value: None
  misc_feature: MA Experiment 20001555 PARAMETER Experiment Name: At_Drought_Soil_Dry_P Parameter: Timepoint (day) Value: 10
  misc_feature: MA Experiment 20001555 PARAMETER Experiment Name: At_Drought_Soil_Dry_P Parameter: Treatment Value: Drought vs. No Drought
  misc_feature: MA Experiment ID: 20001556 Result: Down-regulated in Transcription
  misc_feature: MA Experiment 20001556 PARAMETER Experiment Name: At_Drought_Soil_Dry_P Parameter: Age (day) Value: 26
  misc_feature: MA Experiment 20001556 PARAMETER Experiment Name: At_Drought_Soil_Dry_P Parameter: Organism Value: A. thaliana
  misc_feature: MA Experiment 20001556 PARAMETER Experiment Name: At_Drought_Soil_Dry_P Parameter: Plant Line Value: WS
  misc_feature: MA Experiment 20001556 PARAMETER Experiment Name: At_Drought_Soil_Dry_P Parameter: Post Timepoint (hr) Value: None
  misc_feature: MA Experiment 20001556 PARAMETER Experiment Name: At_Drought_Soil_Dry_P Parameter: Post-Treatment Value: None
  misc_feature: MA Experiment 20001556 PARAMETER Experiment Name: At_Drought_Soil_Dry_P Parameter: Timepoint (day) Value: 12
  misc_feature: MA Experiment 20001556 PARAMETER Experiment Name: At_Drought_Soil_Dry_P Parameter: Treatment Value: Drought vs. No Drought
  misc_feature: MA Experiment ID: 20001560 Result: Up-regulated in Transcription
  misc_feature: MA Experiment 20001560 PARAMETER Experiment Name: At_Drought_Soil_Dry_P Parameter: Age (day) Value: 28
  misc_feature: MA Experiment 20001560 PARAMETER Experiment Name: At_Drought_Soil_Dry_P Parameter: Organism Value: A. thaliana
  misc_feature: MA Experiment 20001560 PARAMETER Experiment Name: At_Drought_Soil_Dry_P Parameter: Plant Line Value: WS
  misc_feature: MA Experiment 20001560 PARAMETER Experiment Name: At_Drought_Soil_Dry_P Parameter: Post Timepoint (hr) Value: None
  misc_feature: MA Experiment 20001560 PARAMETER Experiment Name: At_Drought_Soil_Dry_P Parameter: Post-Treatment Value: None
  misc_feature: MA Experiment 20001560 PARAMETER Experiment Name: At_Drought_Soil_Dry_P Parameter: Timepoint (day) Value: 14
  misc_feature: MA Experiment 20001560 PARAMETER Experiment Name: At_Drought_Soil_Dry_P Parameter: Treatment Value: Drought vs. No Drought
  misc_feature: MA Experiment ID: 20001911 Result: Down-regulated in Transcription
  misc_feature: MA Experiment 20001911 PARAMETER Experiment Name: At_Drought_Reproduction_P Parameter: Age (day) Value: 40
  misc_feature: MA Experiment 20001911 PARAMETER Experiment Name: At_Drought_Reproduction_P Parameter: Organism Value: A. thaliana
  misc_feature: MA Experiment 20001911 PARAMETER Experiment Name: At_Drought_Reproduction_P Parameter: Plant Line Value: WS
  misc_feature: MA Experiment 20001911 PARAMETER Experiment Name: At_Drought_Reproduction_P Parameter: Timepoint (day) Value: 10
  misc_feature: MA Experiment 20001911 PARAMETER Experiment Name: At_Drought_Reproduction_P Parameter: Tissue Value: Flowers
  misc_feature: MA Experiment 20001911 PARAMETER Experiment Name: At_Drought_Reproduction_P Parameter: Treatment Value: Drought vs. No Drought
cagattctttcgaatccggagtttcttgctgaaggaactgctatcgctgatctttttaaccctgaccgtgttttgatcggagggcgagaaacacctgaaggattcaaagctgttcagacacttaaagaggtttatgctaattgggttcctgaaggtcagatcatcacaactaatctctggtctgctgagctttctaagctagctgcaaatgctttcttggctcagaggatttcatcagtcaatgccatgtctgctctttgtgaatccactggtgctgatgttactcaagtgtcttacgctgttggtactgattcaagaatcggttccaaattcttgaacgctagtgttggatttggcggttcttgtttccagaaggacattctgaatcttgtctacatctgtcaatcaacggacttccagaagtggcggaatactggaaacaagtgatcaagatcaacgattaccaaaagaaccggttcgtgaacagaatcgtgtcctctatgttcaacactgtctccaacaagaaggttgcgattcttggattcgcattcaagaaagacactggtgacacaagggaaacacctgccattgatgtgtgtaaaggtctattaggagacaaagcacagatcagtatctatgatcctcaagtcacagaggaacatattcagagagatctctcgatgaaaaagttcgactgggaccatcctcttcacttgcagccaatgagtccaaccacagtgaaacaagtgagtgtgacttgggacgcatatgaagctacaaaagacgcacacgcggtttgcgttttgactgagtgggacgagtttaagtcgttagattaccagaagatcttcgacaacatgcagaaaccggcttttatcttcgacggaagaaacattatgaatgttaacaagttaagagagattggtttcattgtttactccattggtaagccacttgacccatggctcaaggacatgcctgcctttgtctaatcacaaggcaaaacctggttgattcttgtttcttactttcattgtttgtgcttttttgctttcgttttcatataaattttagtctcaagattcgatttgtgaagtcttgaagagttgtttcttacattttacaatgtgtttcttatgctaagctcttataattttgtgttcc

SEQ ID NO: 38855 - protein, 163 aa, Arabidopsis thaliana
  peptide (1)..(163): Ceres Seq. ID no. 12395653
  misc_feature (11)..(135): Pfam Name: UDP-glucose/GDP-mannose dehydrogenase family, Pfam Description: UDP-glucose/GDP-mannose dehydrogenase family,
  misc_feature (1)..(161): Homolog of NCBI NO: 15983404 NR Description: AT3g29360/MUO10_6 [Arabidopsis thaliana]
  misc_feature (1)..(161): Homolog of NCBI NO: 15228687 NR Description: UDP-glucose dehydrogenase, putative
  misc_feature (1)..(161): Homolog of NCBI NO: 21618158 NR Description: UDP-glucose dehydrogenase, putative [Arabidopsis
  misc_feature (1)..(163): Homolog of NCBI NO: 30102540 NR Description: At5g39320 [Arabidopsis thaliana]
  misc_feature (1)..(163): Homolog of NCBI NO: 15241704 NR Description: UDP-glucose dehydrogenase-like protein; protein
MFNTVSNKKVAILGFAFKKDTGDTRETPAIDVCKGLLGDKAQISIYDPQVTEEHIQRDLSMKKFDWDHPLHLQPMSPTTVKQVSVTWDAYEATKDAHAVCVLTEWDEFKSLDYQKIFDNMQKPAFIFDGRNIMNVNKLREIGFIVYSIGKPLDPWLKDMPAFV

SEQ ID NO: 38856 - protein, 148 aa, Arabidopsis thaliana
  peptide (1)..(148): Ceres Seq. ID no. 12395654
  misc_feature (59)..(135): Pfam Name: UDP-glucose/GDP-mannose dehydrogenase family, Pfam Description: UDP-glucose/GDP-mannose dehydrogenase family,
  misc_feature (1)..(135): Homolog of NCBI NO: 15983404 NR Description: AT3g29360/MUO10_6 [Arabidopsis thaliana]
  misc_feature (1)..(135): Homolog of NCBI NO: 15228687 NR Description: UDP-glucose dehydrogenase, putative
  misc_feature (1)..(135): Homolog of NCBI NO: 21618158 NR Description: UDP-glucose dehydrogenase, putative [Arabidopsis
  misc_feature (1)..(135): Homolog of NCBI NO: 30102540 NR Description: At5g39320 [Arabidopsis thaliana]
  misc_feature (1)..(135): Homolog of NCBI NO: 15241704 NR Description: UDP-glucose dehydrogenase-like protein; protein
QILSNPEFLAEGTAIADLFNPDRVLIGGRETPEGFKAVQTLKEVYANWVPEGQIITTNLWSAELSKLAANAFLAQRISSVNAMSALCESTGADVTQVSYAVGTDSRIGSKFLNASVGFGGSCFQKDILNLVYICQSTDFQKWRNTGNK

SEQ ID NO: 38857 - protein, 103 aa, Arabidopsis thaliana
  peptide (1)..(103): Ceres Seq. ID no. 12395655
  misc_feature (1)..(75): Pfam Name: UDP-glucose/GDP-mannose dehydrogenase family, Pfam Description: UDP-glucose/GDP-mannose dehydrogenase family,
  misc_feature (1)..(101): Homolog of NCBI NO: 15983404 NR Description: AT3g29360/MUO10_6 [Arabidopsis thaliana]
  misc_feature (1)..(101): Homolog of NCBI NO: 15228687 NR Description: UDP-glucose dehydrogenase, putative
  misc_feature (1)..(101): Homolog of NCBI NO: 21618158 NR Description: UDP-glucose dehydrogenase, putative [Arabidopsis
  misc_feature (1)..(103): Homolog of NCBI NO: 30102540 NR Description: At5g39320 [Arabidopsis thaliana]
  misc_feature (1)..(103): Homolog of NCBI NO: 15241704 NR Description: UDP-glucose dehydrogenase-like protein; protein
MKKFDWDHPLHLQPMSPTTVKQVSVTWDAYEATKDAHAVCVLTEWDEFKSLDYQKIFDNMQKPAFIFDGRNIMNVNKLREIGFIVYSIGKPLDPWLKDMPAFV

SEQ ID NO: 38858 - DNA, 1378 bp, Arabidopsis thaliana
  misc_feature (1)..(1378): Ceres Seq. ID no. 12323175
  misc_feature: MA Experiment ID: 20000171 Result: Down-regulated in Transcription
  misc_feature: MA Experiment 20000171 PARAMETER Experiment Name: At_42deg_Heat_P Parameter: Age (day) Value: 14
  misc_feature: MA Experiment 20000171 PARAMETER Experiment Name: At_42deg_Heat_P Parameter: Organism Value: A. thaliana
  misc_feature: MA Experiment 20000171 PARAMETER Experiment Name: At_42deg_Heat_P Parameter: Plant Line Value: WS
  misc_feature: MA Experiment 20000171 PARAMETER Experiment Name: At_42deg_Heat_P Parameter: Temperature (deg C) Value: 42 vs. 22
  misc_feature: MA Experiment 20000171 PARAMETER Experiment Name: At_42deg_Heat_P Parameter: Timepoint (hr) Value: 1
  misc_feature: MA Experiment 20000171 PARAMETER Experiment Name: At_42deg_Heat_P Parameter: Tissue Value: Aerial
  misc_feature: MA Experiment ID: 20000173 Result: Down-regulated in Transcription
  misc_feature: MA Experiment 20000173 PARAMETER Experiment Name: At_42deg_Heat_P Parameter: Age (day) Value: 14
  misc_feature: MA Experiment 20000173 PARAMETER Experiment Name: At_42deg_Heat_P Parameter: Organism Value: A. thaliana
  misc_feature: MA Experiment 20000173 PARAMETER Experiment Name: At_42deg_Heat_P Parameter: Plant Line Value: WS
  misc_feature: MA Experiment 20000173 PARAMETER Experiment Name: At_42deg_Heat_P Parameter: Temperature (deg C) Value: 42 vs. 22
  misc_feature: MA Experiment 20000173 PARAMETER Experiment Name: At_42deg_Heat_P Parameter: Timepoint (hr) Value: 6
  misc_feature: MA Experiment 20000173 PARAMETER Experiment Name: At_42deg_Heat_P Parameter: Tissue Value: Aerial
  misc_feature: MA Experiment ID: 20000184 Result: Down-regulated in Transcription
  misc_feature: MA Experiment 20000184 PARAMETER Experiment Name: At_Shoots__P Parameter: Age (day) Value: 7
  misc_feature: MA Experiment 20000184 PARAMETER Experiment Name: At_Shoots__P Parameter: Tissue Value: Shoots vs. Whole Plant
  misc_feature: MA Experiment ID: 20000185 Result: Down-regulated in Transcription
  misc_feature: MA Experiment 20000185 PARAMETER Experiment Name: At_Roots__P Parameter: Age (day) Value: 7 vs. 21
  misc_feature: MA Experiment 20000185 PARAMETER Experiment Name: At_Roots__P Parameter: Organism Value: A. thaliana
  misc_feature: MA Experiment 20000185 PARAMETER Experiment Name: At_Roots__P Parameter: Tissue Value: Roots vs. Whole Plant
  misc_feature: MA Experiment ID: 20000234 Result: Down-regulated in Transcription
  misc_feature: MA Experiment 20000234 PARAMETER Experiment Name: At_Siliques_P Parameter: Age (day) Value: 21
  misc_feature: MA Experiment 20000234 PARAMETER Experiment Name: At_Siliques_P Parameter: Organism Value: A. thaliana
  misc_feature: MA Experiment 20000234 PARAMETER Experiment Name: At_Siliques_P Parameter: Plant Line Value: WS
  misc_feature: MA Experiment 20000234 PARAMETER Experiment Name: At_Siliques_P Parameter: Tissue Value: Less Than 5mm Siliques vs. Whole Plant
  misc_feature: MA Experiment ID: 20000235 Result: Down-regulated in Transcription
  misc_feature: MA Experiment 20000235 PARAMETER Experiment Name: At_Siliques_P Parameter: Age (day) Value: 21
  misc_feature: MA Experiment 20000235 PARAMETER Experiment Name: At_Siliques_P Parameter: Organism Value: A. thaliana
  misc_feature: MA Experiment 20000235 PARAMETER Experiment Name: At_Siliques_P Parameter: Plant Line Value: WS
  misc_feature: MA Experiment 20000235 PARAMETER Experiment Name: At_Siliques_P Parameter: Tissue Value: 5-10mm Siliques vs. Whole Plant
  misc_feature: MA Experiment ID: 20000264 Result: Down-regulated in Transcription
  misc_feature: MA Experiment 20000264 PARAMETER Experiment Name: At_Open_Flower_P Parameter: Age (day) Value: 21
  misc_feature: MA Experiment 20000264 PARAMETER Experiment Name: At_Open_Flower_P Parameter: Plant Line Value: WS
  misc_feature: MA Experiment 20000264 PARAMETER Experiment Name: At_Open_Flower_P Parameter: Tissue Value: Open Flower vs. Whole Plant
  misc_feature: MA Experiment ID: 20000265 Result: Down-regulated in Transcription
  misc_feature: MA Experiment 20000265 PARAMETER Experiment Name: At_Open_Flower_P Parameter: Age (day) Value: 21
  misc_feature: MA Experiment 20000265 PARAMETER Experiment Name: At_Open_Flower_P Parameter: Plant Line Value: WS
  misc_feature: MA Experiment 20000265 PARAMETER Experiment Name: At_Open_Flower_P Parameter: Tissue Value: Closed Flower vs. Whole Plant
  misc_feature: MA Experiment ID: 20000286 Result: Down-regulated in Transcription
  misc_feature: MA Experiment 20000286 PARAMETER Experiment Name: At_Open_Flower_P Parameter: Age (day) Value: 21
  misc_feature: MA Experiment 20000286 PARAMETER Experiment Name: At_Open_Flower_P Parameter: Plant Line Value: WS
  misc_feature: MA Experiment 20000286 PARAMETER Experiment Name: At_Open_Flower_P Parameter: Tissue Value: Half Open vs. Whole Plant
  misc_feature: MA Experiment ID: 20000438 Result: Down-regulated in Transcription
  misc_feature: MA Experiment 20000438 PARAMETER Experiment Name: At_Shoots__P Parameter: Age (day) Value: 14
  misc_feature: MA Experiment 20000438 PARAMETER Experiment Name: At_Shoots__P Parameter: Tissue Value: Shoots vs. Whole Plant
  misc_feature: MA Experiment ID: 20000439 Result: Down-regulated in Transcription
  misc_feature: MA Experiment 20000439 PARAMETER Experiment Name: At_Roots__P Parameter: Age (day) Value: 14 vs. 21
  misc_feature: MA Experiment 20000439 PARAMETER Experiment Name: At_Roots__P Parameter: Organism Value: A. thaliana
  misc_feature: MA Experiment 20000439 PARAMETER Experiment Name: At_Roots__P Parameter: Tissue Value: Roots vs. Whole Plant
  misc_feature: MA Experiment ID: 20000451 Result: Up-regulated in Transcription
  misc_feature: MA Experiment 20000451 PARAMETER Experiment Name: At_CS6879_Shoots-Roots_P Parameter: Age (day) Value: 14
  misc_feature: MA Experiment 20000451 PARAMETER Experiment Name: At_CS6879_Shoots-Roots_P Parameter: Organism Value: A. thaliana
  misc_feature: MA Experiment 20000451 PARAMETER Experiment Name: At_CS6879_Shoots-Roots_P Parameter: Plant Line Value: CS6879 vs. WS
  misc_feature: MA Experiment 20000451 PARAMETER Experiment Name: At_CS6879_Shoots-Roots_P Parameter: Tissue Value: Roots
  misc_feature: MA Experiment ID: 20000452 Result: Up-regulated in Transcription
  misc_feature: MA Experiment 20000452 PARAMETER Experiment Name: At_CS6879_Shoots-Roots_P Parameter: Age (day) Value: 14
  misc_feature: MA Experiment 20000452 PARAMETER Experiment Name: At_CS6879_Shoots-Roots_P Parameter: Organism Value: A. thaliana
  misc_feature: MA Experiment 20000452 PARAMETER Experiment Name: At_CS6879_Shoots-Roots_P Parameter: Plant Line Value: CS6879 vs. WS
  misc_feature: MA Experiment 20000452 PARAMETER Experiment Name: At_CS6879_Shoots-Roots_P Parameter: Tissue Value: Shoots
  misc_feature: MA Experiment ID: 20000453 Result: Up-regulated in Transcription
  misc_feature: MA Experiment 20000453 PARAMETER Experiment Name: At_100uM_ABA_P Parameter: Age (day) Value: 15
  misc_feature: MA Experiment 20000453 PARAMETER Experiment Name: At_100uM_ABA_P Parameter: Organism Value: A. thaliana
  misc_feature: MA Experiment 20000453 PARAMETER Experiment Name: At_100uM_ABA_P Parameter: Plant Line Value: WS
  misc_feature: MA Experiment 20000453 PARAMETER Experiment Name: At_100uM_ABA_P Parameter: Timepoint (hr) Value: 24
  misc_feature: MA Experiment 20000453 PARAMETER Experiment Name: At_100uM_ABA_P Parameter: Tissue Value: Aerial
  misc_feature: MA Experiment 20000453 PARAMETER Experiment Name: At_100uM_ABA_P Parameter: Treatment Value: 100uM ABA vs. No Treatment
  misc_feature: MA Experiment ID: 20000460 Result: Up-regulated in Transcription
  misc_feature: MA Experiment 20000460 PARAMETER Experiment Name: At_10percent_PEG_P Parameter: Age (day) Value: 12
  misc_feature: MA Experiment 20000460 PARAMETER Experiment Name: At_10percent_PEG_P Parameter: Organism Value: A. thaliana
  misc_feature: MA Experiment 20000460 PARAMETER Experiment Name: At_10percent_PEG_P Parameter: Plant Line Value: WS
  misc_feature: MA Experiment 20000460 PARAMETER Experiment Name: At_10percent_PEG_P Parameter: Timepoint (day) Value: 12
  misc_feature: MA Experiment 20000460 PARAMETER Experiment Name: At_10percent_PEG_P Parameter: Tissue Value: Whole Plant
  misc_feature: MA Experiment 20000460 PARAMETER Experiment Name: At_10percent_PEG_P Parameter: Treatment Value: 10percent PEG vs. No Treatment
  misc_feature: MA Experiment ID: 20000573 Result: Down-regulated in Transcription
  misc_feature: MA Experiment 20000573 PARAMETER Experiment Name: At_100uM_ABA_Mutants__P Parameter: Organism Value: A. thaliana
  misc_feature: MA Experiment 20000573 PARAMETER Experiment Name: At_100uM_ABA_Mutants__P Parameter: Plant Line Value: CS22 vs. Ler wt
  misc_feature: MA Experiment 20000573 PARAMETER Experiment Name: At_100uM_ABA_Mutants__P Parameter: Timepoint (hr) Value: N/A
  misc_feature: MA Experiment 20000573 PARAMETER Experiment Name: At_100uM_ABA_Mutants__P Parameter: Tissue Value: Whole Plant
  misc_feature: MA Experiment 20000573 PARAMETER Experiment Name: At_100uM_ABA_Mutants__P Parameter: Treatment Value: None
  misc_feature: MA Experiment ID: 20000574 Result: Down-regulated in Transcription
  misc_feature: MA Experiment 20000574 PARAMETER Experiment Name: At_100uM_ABA_Mutants__P Parameter: Organism Value: A. thaliana
  misc_feature: MA Experiment 20000574 PARAMETER Experiment Name: At_100uM_ABA_Mutants__P Parameter: Plant Line Value: CS23 vs. Ler wt
  misc_feature: MA Experiment 20000574 PARAMETER Experiment Name: At_100uM_ABA_Mutants__P Parameter: Timepoint (hr) Value: N/A
  misc_feature: MA Experiment 20000574 PARAMETER Experiment Name: At_100uM_ABA_Mutants__P Parameter: Tissue Value: Whole Plant
  misc_feature: MA Experiment 20000574 PARAMETER Experiment Name: At_100uM_ABA_Mutants__P Parameter: Treatment Value: None
  misc_feature: MA Experiment ID: 20000794 Result: Down-regulated in Transcription
  misc_feature: MA Experiment 20000794 PARAMETER Experiment Name: At_Petals_P Parameter: Age (day) Value: 23-25 days
  misc_feature: MA Experiment 20000794 PARAMETER Experiment Name: At_Petals_P Parameter: Plant Line Value: WS
  misc_feature: MA Experiment 20000794 PARAMETER Experiment Name: At_Petals_P Parameter: Tissue Value: Petals vs. Whole plant
  misc_feature: MA Experiment ID: 20001560 Result: Down-regulated in Transcription
  misc_feature: MA Experiment 20001560 PARAMETER Experiment Name: At_Drought_Soil_Dry_P Parameter: Age (day) Value: 28
  misc_feature: MA Experiment 20001560 PARAMETER Experiment Name: At_Drought_Soil_Dry_P Parameter: Organism Value: A. thaliana
  misc_feature: MA Experiment 20001560 PARAMETER Experiment Name: At_Drought_Soil_Dry_P Parameter: Plant Line Value: WS
  misc_feature: MA Experiment 20001560 PARAMETER Experiment Name: At_Drought_Soil_Dry_P Parameter: Post Timepoint (hr) Value: None
  misc_feature: MA Experiment 20001560 PARAMETER Experiment Name: At_Drought_Soil_Dry_P Parameter: Post-Treatment Value: None
  misc_feature: MA Experiment 20001560 PARAMETER Experiment Name: At_Drought_Soil_Dry_P Parameter: Timepoint (day) Value: 14
  misc_feature: MA Experiment 20001560 PARAMETER Experiment Name: At_Drought_Soil_Dry_P Parameter: Treatment Value: Drought vs. No Drought
  misc_feature: MA Experiment ID: 20001905 Result: Up-regulated in Transcription
  misc_feature: MA Experiment 20001905 PARAMETER Experiment Name: At_Drought_Reproduction_P Parameter: Age (day) Value: 40
  misc_feature: MA Experiment 20001905 PARAMETER Experiment Name: At_Drought_Reproduction_P Parameter: Organism Value: A. thaliana
  misc_feature: MA Experiment 20001905 PARAMETER Experiment Name: At_Drought_Reproduction_P Parameter: Plant Line Value: WS
  misc_feature: MA Experiment 20001905 PARAMETER Experiment Name: At_Drought_Reproduction_P Parameter: Timepoint (day) Value: 10
  misc_feature: MA Experiment 20001905 PARAMETER Experiment Name: At_Drought_Reproduction_P Parameter: Tissue Value: Rosettes
  misc_feature: MA Experiment 20001905 PARAMETER Experiment Name: At_Drought_Reproduction_P Parameter: Treatment Value: Drought vs. No Drought
attagtctttttcttcgtgagaccctttgaaacgaggacggaggaagtttcctttgaataatgcagcattttcaacatagaaaattctccaaacgcaacgcagaaatgacctctgctttctccaacgtcaaacttgtttagttttatctatgtcatctctctaattctcttgtaaatctcaataatacctcttcacttaatctttttaatatttttcttttggatggtgaggatttgtgttttcatggttttcttgttgttcttcgctccttctccagtctccgctggtttctatacaaactcctcagccattccgccgcagcttctccgaaacgccaccgggaacccctggaactcattcttgaatttcactggatgtcacgccggcaagaagtacgatggtctctatatgctcaaacaatattttcaacattttggctacatcaccgaaactaatctctccggaaacttcactgacgacttcgacgatattctcaagaacgccgtcgaaatgtaccagagaaacttccagctaaacgtcaccggagtactcgacgagctcactctcaaacacgttgtgatcccacgttgcggcaaccccgacgtagtcaacggcacctcaactatgcatagcggtaggaaaaccttcgaggtttccttcgccgggcggggacaacgcttccacgccgttaaacactactctttcttccccggagagccacggtggccgagaaatcgtcgtgatctaacctacgctttcgacccgcgaaacgcgttgaccgaagaggtcaagagcgtgttctcacgcgctttcactcgttgggaggaggtgactccactaacgttcacacgcgtggagaggttctcgacctctgacatcagcatcggattctactccggagagcacggagacggagaaccgttcgacggcccaatgagaacgctagcacatgcgttctcgcccccgacgggacacttccatctagacggagaagagaactggatcgtctccggcgaaggaggcgacggttttatctccgtgtctgaggctgttgatctagaatcggtggctgttcacgagattggacatcttctagggttaggccattcctcggtagaaggttcgatcatgtatccaaccatcaggacgggtaggcgtaaagttgatttaacgaccgatgacgtggaaggagtccaatatttgtacggtgcgaatcctaacttcaatggttctagatctccaccaccgtccactcaacaacgagacactggcgattctggtgctcctggtagaagcgacggttctagatcggttttgactaatctacttcagtattatttttggattatatttggattatttttgtatttagtgtag

SEQ ID NO: 38859 - protein, 384 aa, Arabidopsis thaliana
  peptide (1)..(384): Ceres Seq. ID no. 12323176
  misc_feature (161)..(265): Pfam Name: Matrixin Pfam Description: Matrixin
  misc_feature (88)..(373): Homolog of NCBI NO: 15225398 NR Description: putative metalloproteinase
  misc_feature (24)..(328): Homolog of NCBI NO: 7159629 NR Description: matrix metalloproteinase [Cucumis sativus]
  misc_feature (40)..(369): Homolog of NCBI NO: 37536782 NR Description: putative metalloproteinase
  misc_feature (37)..(383): Homolog of NCBI NO: 21553383 NR Description: proteinase like protein [Arabidopsis thaliana]
  misc_feature (37)..(383): Homolog of NCBI NO: 28393482 NR Description: putative proteinase [Arabidopsis thaliana]
  misc_feature (37)..(383): Homolog of NCBI NO: 15235820 NR Description: proteinase like protein
  misc_feature (2)..(352): Homolog of NCBI NO: 15218963 NR Description: metalloproteinase, putative; protein id:
  misc_feature (2)..(369): Homolog of NCBI NO: 15223067 NR Description: matrix metalloproteinase, putative; protein id:
  misc_feature (8)..(384): Homolog of NCBI NO: 7488435 NR Description: zinc metalloproteinase homolog F3I6.6 -
  misc_feature (1)..(384): Homolog of NCBI NO: 30688744 NR Description: metallo proteinase -related [Arabidopsis thaliana]
MVRICVFMVFLLFFAPSPVSAGFYTNSSAIPPQLLRNATGNPWNSFLNFTGCHAGKKYDGLYMLKQYFQHFGYITETNLSGNFTDDFDDILKNAVEMYQRNFQLNVTGVLDELTLKHVVIPRCGNPDVVNGTSTMHSGRKTFEVSFAGRGQRFHAVKHYSFFPGEPRWPRNRRDLTYAFDPRNALTEEVKSVFSRAFTRWEEVTPLTFTRVERFSTSDISIGFYSGEHGDGEPFDGPMRTLAHAFSPPTGHFHLDGEENWIVSGEGGDGFISVSEAVDLESVAVHEIGHLLGLGHSSVEGSIMYPTIRTGRRKVDLTTDDVEGVQYLYGANPNFNGSRSPPPSTQQRDTGDSGAPGRSDGSRSVLTNLLQYYFWIIFGLFLYLV

SEQ ID NO: 38860 - protein, 377 aa, Arabidopsis thaliana
  peptide (1)..(377): Ceres Seq. ID no. 12323177
  misc_feature (154)..(258): Pfam Name: Matrixin Pfam Description: Matrixin
  misc_feature (81)..(366): Homolog of NCBI NO: 15225398 NR Description: putative metalloproteinase
  misc_feature (17)..(321): Homolog of NCBI NO: 7159629 NR Description: matrix metalloproteinase [Cucumis sativus]
  misc_feature (33)..(362): Homolog of NCBI NO: 37536782 NR Description: putative metalloproteinase
  misc_feature (30)..(376): Homolog of NCBI NO: 21553383 NR Description: proteinase like protein [Arabidopsis thaliana]
  misc_feature (30)..(376): Homolog of NCBI NO: 28393482 NR Description: putative proteinase [Arabidopsis thaliana]
  misc_feature (30)..(376): Homolog of NCBI NO: 15235820 NR Description: proteinase like protein
  misc_feature (1)..(345): Homolog of NCBI NO: 15218963 NR Description: metalloproteinase, putative; protein id:
  misc_feature (1)..(362): Homolog of NCBI NO: 15223067 NR Description: matrix metalloproteinase, putative; protein id:
  misc_feature (1)..(377): Homolog of NCBI NO: 7488435 NR Description: zinc metalloproteinase homolog F3I6.6 -
  misc_feature (1)..(377): Homolog of NCBI NO: 30688744 NR Description: metallo proteinase -related [Arabidopsis thaliana]
MVFLLFFAPSPVSAGFYTNSSAIPPQLLRNATGNPWNSFLNFTGCHAGKKYDGLYMLKQYFQHFGYITETNLSGNFTDDFDDILKNAVEMYQRNFQLNVTGVLDELTLKHVVIPRCGNPDVVNGTSTMHSGRKTFEVSFAGRGQRFHAVKHYSFFPGEPRWPRNRRDLTYAFDPRNALTEEVKSVFSRAFTRWEEVTPLTFTRVERFSTSDISIGFYSGEHGDGEPFDGPMRTLAHAFSPPTGHFHLDGEENWIVSGEGGDGFISVSEAVDLESVAVHEIGHLLGLGHSSVEGSIMYPTIRTGRRKVDLTTDDVEGVQYLYGANPNFNGSRSPPPSTQQRDTGDSGAPGRSDGSRSVLTNLLQYYFWIIFGLFLYLV

SEQ ID NO: 38861 - protein, 322 aa, Arabidopsis thaliana
  peptide (1)..(322): Ceres Seq. ID no. 12323178
  misc_feature (99)..(203): Pfam Name: Matrixin Pfam Description: Matrixin
  misc_feature (26)..(311): Homolog of NCBI NO: 15225398 NR Description: putative metalloproteinase
  misc_feature (1)..(266): Homolog of NCBI NO: 7159629 NR Description: matrix metalloproteinase [Cucumis sativus]
  misc_feature (1)..(307): Homolog of NCBI NO: 37536782 NR Description: putative metalloproteinase
  misc_feature (1)..(321): Homolog of NCBI NO: 21553383 NR Description: proteinase like protein [Arabidopsis thaliana]
  misc_feature (1)..(321): Homolog of NCBI NO: 28393482 NR Description: putative proteinase [Arabidopsis thaliana]
  misc_feature (1)..(321): Homolog of NCBI NO: 15235820 NR Description: proteinase like protein
  misc_feature (1)..(290): Homolog of NCBI NO: 15218963 NR Description: metalloproteinase, putative; protein id:
  misc_feature (1)..(307): Homolog of NCBI NO: 15223067 NR Description: matrix metalloproteinase, putative; protein id:
  misc_feature (1)..(322): Homolog of NCBI NO: 7488435 NR Description: zinc metalloproteinase homolog F3I6.6 -
  misc_feature (1)..(322): Homolog of NCBI NO: 30688744 NR Description: metallo proteinase -related [Arabidopsis thaliana]
MLKQYFQHFGYITETNLSGNFTDDFDDILKNAVEMYQRNFQLNVTGVLDELTLKHVVIPRCGNPDVVNGTSTMHSGRKTFEVSFAGRGQRFHAVKHYSFFPGEPRWPRNRRDLTYAFDPRNALTEEVKSVFSRAFTRWEEVTPLTFTRVERFSTSDISIGFYSGEHGDGEPFDGPMRTLAHAFSPPTGHFHLDGEENWIVSGEGGDGFISVSEAVDLESVAVHEIGHLLGLGHSSVEGSIMYPTIRTGRRKVDLTTDDVEGVQYLYGANPNFNGSRSPPPSTQQRDTGDSGAPGRSDGSRSVLTNLLQYYFWIIFGLFLYLV

SEQ ID NO: 38862 - DNA, 850 bp, Arabidopsis thaliana
  misc_feature (1)..(850): Ceres Seq. ID no. 13487193
  misc_feature: MA Experiment ID: 20000184 Result: Up-regulated in Transcription
  misc_feature: MA Experiment 20000184 PARAMETER Experiment Name: At_Shoots__P Parameter: Age (day) Value: 7
  misc_feature: MA Experiment 20000184 PARAMETER Experiment Name: At_Shoots__P Parameter: Tissue Value: Shoots vs. Whole Plant
  misc_feature: MA Experiment ID: 20000185 Result: Up-regulated in Transcription
  misc_feature: MA Experiment 20000185 PARAMETER Experiment Name: At_Roots__P Parameter: Age (day) Value: 7 vs. 21
  misc_feature: MA Experiment 20000185 PARAMETER Experiment Name: At_Roots__P Parameter: Organism Value: A. thaliana
  misc_feature: MA Experiment 20000185 PARAMETER Experiment Name: At_Roots__P Parameter: Tissue Value: Roots vs. Whole Plant
  misc_feature: MA Experiment ID: 20000437 Result: Down-regulated in Transcription
  misc_feature: MA Experiment 20000437 PARAMETER Experiment Name: At_Drought_P Parameter: Age (day) Value: 8
  misc_feature: MA Experiment 20000437 PARAMETER Experiment Name: At_Drought_P Parameter: Organism Value: A. thaliana
  misc_feature: MA Experiment 20000437 PARAMETER Experiment Name: At_Drought_P Parameter: Plant Line Value: WS
  misc_feature: MA Experiment 20000437 PARAMETER Experiment Name: At_Drought_P Parameter: Timepoint (hr) Value: 24
  misc_feature: MA Experiment 20000437 PARAMETER Experiment Name: At_Drought_P Parameter: Tissue Value: Whole Plant
  misc_feature: MA Experiment 20000437 PARAMETER Experiment Name: At_Drought_P Parameter: Treatment Value: Drought vs. No Drought
  misc_feature: MA Experiment ID: 20000439 Result: Up-regulated in Transcription
  misc_feature: MA Experiment 20000439 PARAMETER Experiment Name: At_Roots__P Parameter: Age (day) Value: 14 vs. 21
  misc_feature: MA Experiment 20000439 PARAMETER Experiment Name: At_Roots__P Parameter: Organism Value: A. thaliana
  misc_feature: MA Experiment 20000439 PARAMETER Experiment Name: At_Roots__P Parameter: Tissue Value: Roots vs. Whole Plant
  misc_feature: MA Experiment ID: 20000452 Result: Up-regulated in Transcription
  misc_feature: MA Experiment 20000452 PARAMETER Experiment Name: At_CS6879_Shoots-Roots_P Parameter: Age (day) Value: 14
  misc_feature: MA Experiment 20000452 PARAMETER Experiment Name: At_CS6879_Shoots-Roots_P Parameter: Organism Value: A. thaliana
  misc_feature: MA Experiment 20000452 PARAMETER Experiment Name: At_CS6879_Shoots-Roots_P Parameter: Plant Line Value: CS6879 vs. WS
  misc_feature: MA Experiment 20000452 PARAMETER Experiment Name: At_CS6879_Shoots-Roots_P Parameter: Tissue Value: Shoots
  misc_feature: MA Experiment ID: 20000495 Result: Down-regulated in Transcription
  misc_feature: MA Experiment 20000495 PARAMETER Experiment Name: At_Guard_Cells_P Parameter: Harvest Date Value: 8/2/2002
  misc_feature: MA Experiment 20000495 PARAMETER Experiment Name: At_Guard_Cells_P Parameter: Organism Value: A. thaliana
  misc_feature: MA Experiment 20000495 PARAMETER Experiment Name: At_Guard_Cells_P Parameter: Tissue Value: Guard Cells vs. Leaves
  misc_feature: MA Experiment ID: 20000573 Result: Down-regulated in Transcription
  misc_feature: MA Experiment 20000573 PARAMETER Experiment Name: At_100uM_ABA_Mutants__P Parameter: Organism Value: A. thaliana
  misc_feature: MA Experiment 20000573 PARAMETER Experiment Name: At_100uM_ABA_Mutants__P Parameter: Plant Line Value: CS22 vs. Ler wt
  misc_feature: MA Experiment 20000573 PARAMETER Experiment Name: At_100uM_ABA_Mutants__P Parameter: Timepoint (hr) Value: N/A
  misc_feature: MA Experiment 20000573 PARAMETER Experiment Name: At_100uM_ABA_Mutants__P Parameter: Tissue Value: Whole Plant
  misc_feature: MA Experiment 20000573 PARAMETER Experiment Name: At_100uM_ABA_Mutants__P Parameter: Treatment Value: None
  misc_feature: MA Experiment ID: 20000574 Result: Down-regulated in Transcription
  misc_feature: MA Experiment 20000574 PARAMETER Experiment Name: At_100uM_ABA_Mutants__P Parameter: Organism Value: A. thaliana
  misc_feature: MA Experiment 20000574 PARAMETER Experiment Name: At_100uM_ABA_Mutants__P Parameter: Plant Line Value: CS23 vs. Ler wt
  misc_feature: MA Experiment 20000574 PARAMETER Experiment Name: At_100uM_ABA_Mutants__P Parameter: Timepoint (hr) Value: N/A
  misc_feature: MA Experiment 20000574 PARAMETER Experiment Name: At_100uM_ABA_Mutants__P Parameter: Tissue Value: Whole Plant
  misc_feature: MA Experiment 20000574 PARAMETER Experiment Name: At_100uM_ABA_Mutants__P Parameter: Treatment Value: None
  misc_feature: MA Experiment ID: 20001248 Result: Down-regulated in Transcription
  misc_feature: MA Experiment 20001248 PARAMETER Experiment Name: At_Far-red-induction_P Parameter: Age (day) Value: 7
  misc_feature: MA Experiment 20001248 PARAMETER Experiment Name: At_Far-red-induction_P Parameter: Light Value: Far-red vs. White
  misc_feature: MA Experiment 20001248 PARAMETER Experiment Name: At_Far-red-induction_P Parameter: Organism Value: A. thaliana
  misc_feature: MA Experiment 20001248 PARAMETER Experiment Name: At_Far-red-induction_P Parameter: Plant Line Value: Columbia
  misc_feature: MA Experiment 20001248 PARAMETER Experiment Name: At_Far-red-induction_P Parameter: Timepoint (hr) Value: 4
  misc_feature: MA Experiment 20001248 PARAMETER Experiment Name: At_Far-red-induction_P Parameter: Tissue Value: Whole Plant
  misc_feature: MA Experiment ID: 20001450 Result: Down-regulated in Transcription
  misc_feature: MA Experiment 20001450 PARAMETER Experiment Name: At_Far-red-induction_P Parameter: Age (day) Value: 7
  misc_feature: MA Experiment 20001450 PARAMETER Experiment Name: At_Far-red-induction_P Parameter: Light Value: Far-red vs. White
  misc_feature: MA Experiment 20001450 PARAMETER Experiment Name: At_Far-red-induction_P Parameter: Organism Value: A. thaliana
  misc_feature: MA Experiment 20001450 PARAMETER Experiment Name: At_Far-red-induction_P Parameter: Plant Line Value: Columbia
  misc_feature: MA Experiment 20001450 PARAMETER Experiment Name: At_Far-red-induction_P Parameter: Timepoint (hr) Value: 8
  misc_feature: MA Experiment 20001450 PARAMETER Experiment Name: At_Far-red-induction_P Parameter: Tissue Value: Whole Plant
  misc_feature: MA Experiment ID: 20001459 Result: Up-regulated in Transcription
  misc_feature: MA Experiment 20001459 PARAMETER Experiment Name: At_50mM_NH4NO3_L-to-H_P Parameter: Age (day) Value: Undefined
  misc_feature: MA Experiment 20001459 PARAMETER Experiment Name: At_50mM_NH4NO3_L-to-H_P Parameter: Organism Value: Undefined
  misc_feature: MA Experiment 20001459 PARAMETER Experiment Name: At_50mM_NH4NO3_L-to-H_P Parameter: Plant Line Value: Undefined
  misc_feature: MA Experiment 20001459 PARAMETER Experiment Name: At_50mM_NH4NO3_L-to-H_P Parameter: Timepoint (hr) Value: 4
  misc_feature: MA Experiment 20001459 PARAMETER Experiment Name: At_50mM_NH4NO3_L-to-H_P Parameter: Tissue Value: Siliques
  misc_feature: MA Experiment 20001459 PARAMETER Experiment Name: At_50mM_NH4NO3_L-to-H_P Parameter: Treatment Value: 50mM NH4NO3 vs. 100mM Manitol
  misc_feature: MA Experiment ID: 20001557 Result: Up-regulated in Transcription
  misc_feature: MA Experiment 20001557 PARAMETER Experiment Name: At_Drought_Soil_Dry_P Parameter: Age (day) Value: 27
  misc_feature: MA Experiment 20001557 PARAMETER Experiment Name: At_Drought_Soil_Dry_P Parameter: Organism Value: A. thaliana
  misc_feature: MA Experiment 20001557 PARAMETER Experiment Name: At_Drought_Soil_Dry_P Parameter: Plant Line Value: WS
  misc_feature: MA Experiment 20001557 PARAMETER Experiment Name: At_Drought_Soil_Dry_P Parameter: Post Timepoint (hr) Value: 3
  misc_feature: MA Experiment 20001557 PARAMETER Experiment Name: At_Drought_Soil_Dry_P Parameter: Post-Treatment Value: Re-Water vs. No Drought
  misc_feature: MA Experiment 20001557 PARAMETER Experiment Name: At_Drought_Soil_Dry_P Parameter: Timepoint (day) Value: 13
  misc_feature: MA Experiment 20001557 PARAMETER Experiment Name: At_Drought_Soil_Dry_P Parameter: Treatment Value: Drought vs. No Drought
  misc_feature: MA Experiment ID: 20001560 Result: Down-regulated in Transcription
  misc_feature: MA Experiment 20001560 PARAMETER Experiment Name: At_Drought_Soil_Dry_P Parameter: Age (day) Value: 28
  misc_feature: MA Experiment 20001560 PARAMETER Experiment Name: At_Drought_Soil_Dry_P Parameter: Organism Value: A. thaliana
  misc_feature: MA Experiment 20001560 PARAMETER Experiment Name: At_Drought_Soil_Dry_P Parameter: Plant Line Value: WS
  misc_feature: MA Experiment 20001560 PARAMETER Experiment Name: At_Drought_Soil_Dry_P Parameter: Post Timepoint (hr) Value: None
  misc_feature: MA Experiment 20001560 PARAMETER Experiment Name: At_Drought_Soil_Dry_P Parameter: Post-Treatment Value: None
  misc_feature: MA Experiment 20001560 PARAMETER Experiment Name: At_Drought_Soil_Dry_P Parameter: Timepoint (day) Value: 14
  misc_feature: MA Experiment 20001560 PARAMETER Experiment Name: At_Drought_Soil_Dry_P Parameter: Treatment Value: Drought vs. No Drought
  misc_feature: MA Experiment ID: 20001911 Result: Up-regulated in Transcription
  misc_feature: MA Experiment 20001911 PARAMETER Experiment Name: At_Drought_Reproduction_P Parameter: Age (day) Value: 40
  misc_feature: MA Experiment 20001911 PARAMETER Experiment Name: At_Drought_Reproduction_P Parameter: Organism Value: A. thaliana
  misc_feature: MA Experiment 20001911 PARAMETER Experiment Name: At_Drought_Reproduction_P Parameter: Plant Line Value: WS
  misc_feature: MA Experiment 20001911 PARAMETER Experiment Name: At_Drought_Reproduction_P Parameter: Timepoint (day) Value: 10
  misc_feature: MA Experiment 20001911 PARAMETER Experiment Name: At_Drought_Reproduction_P Parameter: Tissue Value: Flowers
  misc_feature: MA Experiment 20001911 PARAMETER Experiment Name: At_Drought_Reproduction_P Parameter: Treatment Value: Drought vs. No Drought
tctttacctttttcattccaaaatatctctccttctctctctctttctctggctcgggaagaagatgtcacgtagttgctcacagtgtggaaacaacggccacaactctcgcacatgtccgacggacataactaccaccggtgacaacaacgacaaaggcggcggggagaaagccatcatgctttttggcgtccgcgtcacggaagcttcatcatcttgttttagaaaaagtgttagtatgaacaatctctctcaattcgatcaaactcctgatcccaacccaaccgatgacggtggttacgcttcagacgacgtcgttcacgcctccggtagaaaccgtgaacgcaaacgaggaactccatggacagaggaagaacatagattgtttcttactggattgcataaagttggaaaaggtgattggagaggaatctctagaaactttgttaaaactcgaacacctactcaggtagcgagtcatgctcagaaatattttctccggcggactaatcagaatcgtcgtcgtcgtagatcaagcctcttcgatatcactcccgattcgtttataggatcatcaaaagaagagaatcagttacagactccattggagctaatccgtccagttccgattcctattccgattccaccgtcgcggaagatggctgatttgaatcttaacaagaaaaaaactccagcgacaacggagatgtttccgctgtcgctgaatttgcagaggccgtcttcgtcgacatcgtcatcgtccaatgaacagaaggcacgtggctcacgtgcctcctcggggttcgaggcgatgtcgagtaatggagatagtataatgggagtggcttga

SEQ ID NO: 38863 - protein, 282 aa, Arabidopsis thaliana
  peptide (1)..(282): Ceres Seq. ID no. 13487194
  misc_feature (118)..(165): Pfam Name: Myb-like DNA-binding domain Pfam Description: Myb-like DNA-binding domain
  misc_feature (99)..(183): Homolog of NCBI NO: 34906444 NR Description: P0671B11.14 [Oryza sativa (japonica
  misc_feature (22)..(235): Homolog of NCBI NO: 24850307 NR Description: transcription factor MYBS3
  misc_feature (22)..(235): Homolog of NCBI NO: 37536856 NR Description: putative Myb-related protein
  misc_feature (53)..(222): Homolog of NCBI NO: 28629811 NR Description: transcription factor Myb1 [Malus xiaojinensis]
  misc_feature (22)..(84): Homolog of NCBI NO: 2062176 NR Description: Myb-related transcription activator (MybSt1)
  misc_feature (79)..(200): Homolog of NCBI NO: 2062176 NR Description: Myb-related transcription activator (MybSt1)
  misc_feature (22)..(266): Homolog of NCBI NO: 15238083 NR Description: Myb-related transcription activator-like
  misc_feature (22)..(84): Homolog of NCBI NO: 15228185 NR Description: myb family transcription factor [Arabidopsis
  misc_feature (79)..(200): Homolog of NCBI NO: 15228185 NR Description: myb family transcription factor [Arabidopsis
  misc_feature (22)..(282): Homolog of NCBI NO: 15222521 NR Description: DNA binding protein MybSt1 -related [Arabidopsis
LYLFHSKISLLLSLFLWLGKKMSRSCSQCGNNGHNSRTCPTDITTTGDNNDKGGGEKAIMLFGVRVTEASSSCFRKSVSMNNLSQFDQTPDPNPTDDGGYASDDVVHASGRNRERKRGTPWTEEEHRLFLTGLHKVGKGDWRGISRNFVKTRTPTQVASHAQKYFLRRTNQNRRRRRSSLFDITPDSFIGSSKEENQLQTPLELIRPVPIPIPIPPSRKMADLNLNKKKTPATTEMFPLSLNLQRPSSSTSSSSNEQKARGSRASSGFEAMSSNGDSIMGVA

SEQ ID NO: 38864 - protein, 261 aa, Arabidopsis thaliana
  peptide (1)..(261): Ceres Seq. ID no. 13487195
  misc_feature (97)..(144): Pfam Name: Myb-like DNA-binding domain Pfam Description: Myb-like DNA-binding domain
  misc_feature (78)..(162): Homolog of NCBI NO: 34906444 NR Description: P0671B11.14 [Oryza sativa (japonica
  misc_feature (1)..(214): Homolog of NCBI NO: 24850307 NR Description: transcription factor MYBS3
  misc_feature (1)..(214): Homolog of NCBI NO: 37536856 NR Description: putative Myb-related protein
  misc_feature (32)..(201): Homolog of NCBI NO: 28629811 NR Description: transcription factor Myb1 [Malus xiaojinensis]
  misc_feature (1)..(63): Homolog of NCBI NO: 2062176 NR Description: Myb-related transcription activator (MybSt1)
  misc_feature (58)..(179): Homolog of NCBI NO: 2062176 NR Description: Myb-related transcription activator (MybSt1)
  misc_feature (1)..(245): Homolog of NCBI NO: 15238083 NR Description: Myb-related transcription activator-like
  misc_feature (1)..(63): Homolog of NCBI NO: 15228185 NR Description: myb family transcription factor [Arabidopsis
  misc_feature (58)..(179): Homolog of NCBI NO: 15228185 NR Description: myb family transcription factor [Arabidopsis
  misc_feature (1)..(261): Homolog of NCBI NO: 15222521 NR Description: DNA binding protein MybSt1 -related [Arabidopsis
MSRSCSQCGNNGHNSRTCPTDITTTGDNNDKGGGEKAIMLFGVRVTEASSSCFRKSVSMNNLSQFDQTPDPNPTDDGGYASDDVVHASGRNRERKRGTPWTEEEHRLFLTGLHKVGKGDWRGISRNFVKTRTPTQVASHAQKYFLRRTNQNRRRRRSSLFDITPDSFIGSSKEENQLQTPLELIRPVPIPIPIPPSRKMADLNLNKKKTPATTEMFPLSLNLQRPSSSTSSSSNEQKARGSRASSGFEAMSSNGDSIMGVA

SEQ ID NO: 38865 - protein, 223 aa, Arabidopsis thaliana
  peptide (1)..(223): Ceres Seq. ID no. 13487196
  misc_feature (59)..(106): Pfam Name: Myb-like DNA-binding domain Pfam Description: Myb-like DNA-binding domain
  misc_feature (40)..(124): Homolog of NCBI NO: 34906444 NR Description: P0671B11.14 [Oryza sativa (japonica
  misc_feature (1)..(176): Homolog of NCBI NO: 24850307 NR Description: transcription factor MYBS3
  misc_feature (1)..(176): Homolog of NCBI NO: 37536856 NR Description: putative Myb-related protein
  misc_feature (1)..(163): Homolog of NCBI NO: 28629811 NR Description: transcription factor Myb1 [Malus xiaojinensis]
  misc_feature (1)..(25): Homolog of NCBI NO: 2062176 NR Description: Myb-related transcription activator (MybSt1)
  misc_feature (20)..(141): Homolog of NCBI NO: 2062176 NR Description: Myb-related transcription activator (MybSt1)
  misc_feature (1)..(207): Homolog of NCBI NO: 15238083 NR Description: Myb-related transcription activator-like
  misc_feature (1)..(25): Homolog of NCBI NO: 15228185 NR Description: myb family transcription factor [Arabidopsis
  misc_feature (20)..(141): Homolog of NCBI NO: 15228185 NR Description: myb family transcription factor [Arabidopsis
  misc_feature (1)..(223): Homolog of NCBI NO: 15222521 NR Description: DNA binding protein MybSt1 -related [Arabidopsis
MLFGVRVTEASSSCFRKSVSMNNLSQFDQTPDPNPTDDGGYASDDVVHASGRNRERKRGTPWTEEEHRLFLTGLHKVGKGDWRGISRNFVKTRTPTQVASHAQKYFLRRTNQNRRRRRSSLFDITPDSFIGSSKEENQLQTPLELIRPVPIPIPIPPSRKMADLNLNKKKTPATTEMFPLSLNLQRPSSSTSSSSNEQKARGSRASSGFEAMSSNGDSIMGVA

SEQ ID NO: 38866 - DNA, 1368 bp, Arabidopsis thaliana
  misc_feature (1)..(1368): Ceres Seq. ID no. 13574974
  misc_feature: MA Experiment ID: 20000087 Result: Up-regulated in Transcription
  misc_feature: MA Experiment 20000087 PARAMETER Experiment Name: At_100uM_ABA_Mutants_cDNA_P Parameter: Plant Line Value: WS
  misc_feature: MA Experiment 20000087 PARAMETER Experiment Name: At_100uM_ABA_Mutants_cDNA_P Parameter: Timepoint (hr) Value: 6
  misc_feature: MA Experiment 20000087 PARAMETER Experiment Name: At_100uM_ABA_Mutants_cDNA_P Parameter: Tissue Value: Aerial
  misc_feature: MA Experiment 20000087 PARAMETER Experiment Name: At_100uM_ABA_Mutants_cDNA_P Parameter: Treatment Value: 100uM ABA vs. No Treatment
  misc_feature: MA Experiment ID: 20000173 Result: Down-regulated in Transcription
  misc_feature: MA Experiment 20000173 PARAMETER Experiment Name: At_42deg_Heat_P Parameter: Age (day) Value: 14
  misc_feature: MA Experiment 20000173 PARAMETER Experiment Name: At_42deg_Heat_P Parameter: Organism Value: A. thaliana
  misc_feature: MA Experiment 20000173 PARAMETER Experiment Name: At_42deg_Heat_P Parameter: Plant Line Value: WS
  misc_feature: MA Experiment 20000173 PARAMETER Experiment Name: At_42deg_Heat_P Parameter: Temperature (deg C) Value: 42 vs. 22
  misc_feature: MA Experiment 20000173 PARAMETER Experiment Name: At_42deg_Heat_P Parameter: Timepoint (hr) Value: 6
  misc_feature: MA Experiment 20000173 PARAMETER Experiment Name: At_42deg_Heat_P Parameter: Tissue Value: Aerial
  misc_feature: MA Experiment ID: 20000185 Result: Down-regulated in Transcription
  misc_feature: MA Experiment 20000185 PARAMETER Experiment Name: At_Roots__P Parameter: Age (day) Value: 7 vs. 21
  misc_feature: MA Experiment 20000185 PARAMETER Experiment Name: At_Roots__P Parameter: Organism Value: A. thaliana
  misc_feature: MA Experiment 20000185 PARAMETER Experiment Name: At_Roots__P Parameter: Tissue Value: Roots vs. Whole Plant
  misc_feature: MA Experiment ID: 20000234 Result: Down-regulated in Transcription
  misc_feature: MA Experiment 20000234 PARAMETER Experiment Name: At_Siliques_P Parameter: Age (day) Value: 21
  misc_feature: MA Experiment 20000234 PARAMETER Experiment Name: At_Siliques_P Parameter: Organism Value: A. thaliana
  misc_feature: MA Experiment 20000234 PARAMETER Experiment Name: At_Siliques_P Parameter: Plant Line Value: WS
  misc_feature: MA Experiment 20000234 PARAMETER Experiment Name: At_Siliques_P Parameter: Tissue Value: Less Than 5mm Siliques vs. Whole Plant
  misc_feature: MA Experiment ID: 20000264 Result: Up-regulated in Transcription
  misc_feature: MA Experiment 20000264 PARAMETER Experiment Name: At_Open_Flower_P Parameter: Age (day) Value: 21
  misc_feature: MA Experiment 20000264 PARAMETER Experiment Name: At_Open_Flower_P Parameter: Plant Line Value: WS
  misc_feature: MA Experiment 20000264 PARAMETER Experiment Name: At_Open_Flower_P Parameter: Tissue Value: Open Flower vs. Whole Plant
  misc_feature: MA Experiment ID: 20000265 Result: Up-regulated in Transcription
  misc_feature: MA Experiment 20000265 PARAMETER Experiment Name: At_Open_Flower_P Parameter: Age (day) Value: 21
  misc_feature: MA Experiment 20000265 PARAMETER Experiment Name: At_Open_Flower_P Parameter: Plant Line Value: WS
  misc_feature: MA Experiment 20000265 PARAMETER Experiment Name: At_Open_Flower_P Parameter: Tissue Value: Closed Flower vs. Whole Plant
  misc_feature: MA Experiment ID: 20000286 Result: Up-regulated in Transcription
  misc_feature: MA Experiment 20000286 PARAMETER Experiment Name: At_Open_Flower_P Parameter: Age (day) Value: 21
  misc_feature: MA Experiment 20000286 PARAMETER Experiment Name: At_Open_Flower_P Parameter: Plant Line Value: WS
  misc_feature: MA Experiment 20000286 PARAMETER Experiment Name: At_Open_Flower_P Parameter: Tissue Value: Half Open vs. Whole Plant
  misc_feature: MA Experiment ID: 20000439 Result: Down-regulated in Transcription
  misc_feature: MA Experiment 20000439 PARAMETER Experiment Name: At_Roots__P Parameter: Age (day) Value: 14 vs. 21
  misc_feature: MA Experiment 20000439 PARAMETER Experiment Name: At_Roots__P Parameter: Organism Value: A. thaliana
  misc_feature: MA Experiment 20000439 PARAMETER Experiment Name: At_Roots__P Parameter: Tissue Value: Roots vs. Whole Plant
  misc_feature: MA Experiment ID: 20000794 Result: Up-regulated in Transcription
  misc_feature: MA Experiment 20000794 PARAMETER Experiment Name: At_Petals_P Parameter: Age (day) Value: 23-25 days
  misc_feature: MA Experiment 20000794 PARAMETER Experiment Name: At_Petals_P Parameter: Plant Line Value: WS
  misc_feature: MA Experiment 20000794 PARAMETER Experiment Name: At_Petals_P Parameter: Tissue Value: Petals vs. Whole plant
  misc_feature: MA Experiment ID: 20001248 Result: Up-regulated in Transcription
  misc_feature: MA Experiment 20001248 PARAMETER Experiment Name: At_Far-red-induction_P Parameter: Age (day) Value: 7
  misc_feature: MA Experiment 20001248 PARAMETER Experiment Name: At_Far-red-induction_P Parameter: Light Value: Far-red vs. White
  misc_feature: MA Experiment 20001248 PARAMETER Experiment Name: At_Far-red-induction_P Parameter: Organism Value: A. thaliana
  misc_feature: MA Experiment 20001248 PARAMETER Experiment Name: At_Far-red-induction_P Parameter: Plant Line Value: Columbia
  misc_feature: MA Experiment 20001248 PARAMETER Experiment Name: At_Far-red-induction_P Parameter: Timepoint (hr) Value: 4
  misc_feature: MA Experiment 20001248 PARAMETER Experiment Name: At_Far-red-induction_P Parameter: Tissue Value: Whole Plant
  misc_feature: MA Experiment ID: 20001450 Result: Up-regulated in Transcription
  misc_feature: MA Experiment 20001450 PARAMETER Experiment Name: At_Far-red-induction_P Parameter: Age (day) Value: 7
  misc_feature: MA Experiment 20001450 PARAMETER Experiment Name: At_Far-red-induction_P Parameter: Light Value: Far-red vs. White
  misc_feature: MA Experiment 20001450 PARAMETER Experiment Name: At_Far-red-induction_P Parameter: Organism Value: A. thaliana
  misc_feature: MA Experiment 20001450 PARAMETER Experiment Name: At_Far-red-induction_P Parameter: Plant Line Value: Columbia
  misc_feature: MA Experiment 20001450 PARAMETER Experiment Name: At_Far-red-induction_P Parameter: Timepoint (hr) Value: 8
  misc_feature: MA Experiment 20001450 PARAMETER Experiment Name: At_Far-red-induction_P Parameter: Tissue Value: Whole Plant
  misc_feature: MA Experiment ID: 20001557 Result: Up-regulated in Transcription
  misc_feature: MA Experiment 20001557 PARAMETER Experiment Name: At_Drought_Soil_Dry_P Parameter: Age (day) Value: 27
  misc_feature: MA Experiment 20001557 PARAMETER Experiment Name: At_Drought_Soil_Dry_P Parameter: Organism Value: A. thaliana
  misc_feature: MA Experiment 20001557 PARAMETER Experiment Name: At_Drought_Soil_Dry_P Parameter: Plant Line Value: WS
  misc_feature: MA Experiment 20001557 PARAMETER Experiment Name: At_Drought_Soil_Dry_P Parameter: Post Timepoint (hr) Value: 3
  misc_feature: MA Experiment 20001557 PARAMETER Experiment Name: At_Drought_Soil_Dry_P Parameter: Post-Treatment Value: Re-Water vs. No Drought
  misc_feature: MA Experiment 20001557 PARAMETER Experiment Name: At_Drought_Soil_Dry_P Parameter: Timepoint (day) Value: 13
  misc_feature: MA Experiment 20001557 PARAMETER Experiment Name: At_Drought_Soil_Dry_P Parameter: Treatment Value: Drought vs. No Drought
  misc_feature: MA Experiment ID: 20001911 Result: Down-regulated in Transcription
  misc_feature: MA Experiment 20001911 PARAMETER Experiment Name: At_Drought_Reproduction_P Parameter: Age (day) Value: 40
  misc_feature: MA Experiment 20001911 PARAMETER Experiment Name: At_Drought_Reproduction_P Parameter: Organism Value: A. thaliana
  misc_feature: MA Experiment 20001911 PARAMETER Experiment Name: At_Drought_Reproduction_P Parameter: Plant Line Value: WS
  misc_feature: MA Experiment 20001911 PARAMETER Experiment Name: At_Drought_Reproduction_P Parameter: Timepoint (day) Value: 10
  misc_feature: MA Experiment 20001911 PARAMETER Experiment Name: At_Drought_Reproduction_P Parameter: Tissue Value: Flowers
  misc_feature: MA Experiment 20001911 PARAMETER Experiment Name: At_Drought_Reproduction_P Parameter: Treatment Value: Drought vs. No Drought
taggatcctctacacctatcaataagagatatattttagagtttcactttggtgcacaaacaaagctcgtacaacattcttcgtatatggctcttcgtcgctgcttacctcaatattcaacaacttcatcttatctctccaagatctggggatttcgtatgcatgggaccaaggcagcagcttctgttgtagaagaacatgtctcgggggcagaacgtgaggatgaagaatatgctgatgtagattgggacaaccttggattcagtcttgtacggacagatttcatgttcgccaccaaaagttgcagagacggaaacttcgaacagggttaccttagccgttacggcaacatcgagctcaaccctgctgctggaattctcaactatggccagggactaatagaggggatgaaagcgtacagaggagaagacggtagggttcttctcttccgtccagagctaaacgcgatgcgtatgaagataggagctgagagaatgtgtatgcattctccttctgttcatcagtttattgaaggtgttaagcagaccgttcttgcaaacaggcgttgggttcctcctccgggcaaaggctcgttgtatctcagaccgttgttgttcggaagtggagcaagcttgggtgtggctgcagcatcagagtacacgtttcttgtgtttggctctcctgttcaaaactacttcaaggaaggcacagcggcgttgaacctgtatgtggaggaggtgattccacgcgcttatcttggaggaactggtggtgtaaaggcaatatccaattacggtccagtgcttgaagtgatgagaagagcaaaatcaagagggttttcggatgttttgtatcttgatgcagatactgggaagaacatagaagaagtctctgctgctaatatattccttgtgaagggcaatacaatagtgacaccagctacgagcggaacgattctcggagggatcacacgtaagagcataatcgaaatcgcccttgatcttggttacaaagtggaagaacgaagtgttccggtagaagaactgaaggaagctgaagaagttttctgcactggaactgccgctggagttgcttctgttggaagcatcacttttaagaacacaaggactgagtacaaagttggagatgggattgttacacagcaacttcgatctattcttgtcggaatacaaactggttctatccaagacactaaagattgggttttgcagattgcctaagttactttcatatcctataaataatgttgcactctcttgatcacccatcaaaagcttttgaaatagtttttggtaaatttgtgacataaatttgtgatatatcaccacatcgtattagtatggatcc

SEQ ID NO: 38867 - protein, 412 aa, Arabidopsis thaliana
  peptide (1)..(412): Ceres Seq. ID no. 13574975
  misc_feature (78)..(411): Homolog of NCBI NO: 6319165 NR Description: branched-chain amino acid aminotransferase
  misc_feature (72)..(411): Homolog of NCBI NO: 15222881 NR Description: branched-chain amino acid aminotransferase
  misc_feature (73)..(411): Homolog of NCBI NO: 34902362 NR Description: Putative aminotransferase
  misc_feature (67)..(412): Homolog of NCBI NO: 26391655 NR Description: Branched-chain amino acid aminotransferase 5,
  misc_feature (95)..(411): Homolog of NCBI NO: 7450517 NR Description: branched-chain amino acid aminotransferase
  misc_feature (76)..(411): Homolog of NCBI NO: 6319167 NR Description: branched-chain amino acid aminotransferase
  misc_feature (74)..(411): Homolog of NCBI NO: 14280354 NR Description: branched-chain amino acid aminotransferase
  misc_feature (51)..(411): Homolog of NCBI NO: 15218409 NR Description: tat-binding protein -related [Arabidopsis
  misc_feature (29)..(324): Homolog of NCBI NO: 18391105 NR Description: branched-chain amino acid aminotransferase
  misc_feature (29)..(412): Homolog of NCBI NO: 30681524 NR Description: branched-chain amino acid aminotransferase
GSSTPINKRYILEFHFGAQTKLVQHSSYMALRRCLPQYSTTSSYLSKIWGFRMHGTKAAASVVEEHVSGAEREDEEYADVDWDNLGFSLVRTDFMFATKSCRDGNFEQGYLSRYGNIELNPAAGILNYGQGLIEGMKAYRGEDGRVLLFRPELNAMRMKIGAERMCMHSPSVHQFIEGVKQTVLANRRWVPPPGKGSLYLRPLLFGSGASLGVAAASEYTFLVFGSPVQNYFKEGTAALNLYVEEVIPRAYLGGTGGVKAISNYGPVLEVMRRAKSRGFSDVLYLDADTGKNIEEVSAANIFLVKGNTIVTPATSGTILGGITRKSIIEIALDLGYKVEERSVPVEELKEAEEVFCTGTAAGVASVGSITFKNTRTEYKVGDGIVTQQLRSILVGIQTGSIQDTKDWVLQIA

SEQ ID NO: 38868 - protein, 384 aa, Arabidopsis thaliana
  peptide (1)..(384): Ceres Seq. ID no. 13574976
  misc_feature (50)..(383): Homolog of NCBI NO: 6319165 NR Description: branched-chain amino acid aminotransferase
  misc_feature (44)..(383): Homolog of NCBI NO: 15222881 NR Description: branched-chain amino acid aminotransferase
  misc_feature (45)..(383): Homolog of NCBI NO: 34902362 NR Description: Putative aminotransferase
  misc_feature (39)..(384): Homolog of NCBI NO: 26391655 NR Description: Branched-chain amino acid aminotransferase 5,
  misc_feature (67)..(383): Homolog of NCBI NO: 7450517 NR Description: branched-chain amino acid aminotransferase
  misc_feature (48)..(383): Homolog of NCBI NO: 6319167 NR Description: branched-chain amino acid aminotransferase
  misc_feature (46)..(383): Homolog of NCBI NO: 14280354 NR Description: branched-chain amino acid aminotransferase
  misc_feature (23)..(383): Homolog of NCBI NO: 15218409 NR Description: tat-binding protein -related [Arabidopsis
  misc_feature (1)..(296): Homolog of NCBI NO: 18391105 NR Description: branched-chain amino acid aminotransferase
  misc_feature (1)..(384): Homolog of NCBI NO: 30681524 NR Description: branched-chain amino acid aminotransferase
MALRRCLPQYSTTSSYLSKIWGFRMHGTKAAASVVEEHVSGAEREDEEYADVDWDNLGFSLVRTDFMFATKSCRDGNFEQGYLSRYGNIELNPAAGILNYGQGLIEGMKAYRGEDGRVLLFRPELNAMRMKIGAERMCMHSPSVHQFIEGVKQTVLANRRWVPPPGKGSLYLRPLLFGSGASLGVAAASEYTFLVFGSPVQNYFKEGTAALNLYVEEVIPRAYLGGTGGVKAISNYGPVLEVMRRAKSRGFSDVLYLDADTGKNIEEVSAANIFLVKGNTIVTPATSGTILGGITRKSIIEIALDLGYKVEERSVPVEELKEAEEVFCTGTAAGVASVGSITFKNTRTEYKVGDGIVTQQLRSILVGIQTGSIQDTKDWVLQIA

SEQ ID NO: 38869 - protein, 360 aa, Arabidopsis thaliana
  peptide (1)..(360): Ceres Seq. ID no. 13574977
  misc_feature (26)..(359): Homolog of NCBI NO: 6319165 NR Description: branched-chain amino acid aminotransferase
  misc_feature (20)..(359): Homolog of NCBI NO: 15222881 NR Description: branched-chain amino acid aminotransferase
  misc_feature (21)..(359): Homolog of NCBI NO: 34902362 NR Description: Putative aminotransferase
  misc_feature (15)..(360): Homolog of NCBI NO: 26391655 NR Description: Branched-chain amino acid aminotransferase 5,
  misc_feature (43)..(359): Homolog of NCBI NO: 7450517 NR Description: branched-chain amino acid aminotransferase
  misc_feature (24)..(359): Homolog of NCBI NO: 6319167 NR Description: branched-chain amino acid aminotransferase
  misc_feature (22)..(359): Homolog of NCBI NO: 14280354 NR Description: branched-chain amino acid aminotransferase
  misc_feature (1)..(359): Homolog of NCBI NO: 15218409 NR Description: tat-binding protein -related [Arabidopsis
  misc_feature (1)..(272): Homolog of NCBI NO: 18391105 NR Description: branched-chain amino acid aminotransferase
  misc_feature (1)..(360): Homolog of NCBI NO: 30681524 NR Description: branched-chain amino acid aminotransferase
MHGTKAAASVVEEHVSGAEREDEEYADVDWDNLGFSLVRTDFMFATKSCRDGNFEQGYLSRYGNIELNPAAGILNYGQGLIEGMKAYRGEDGRVLLFRPELNAMRMKIGAERMCMHSPSVHQFIEGVKQTVLANRRWVPPPGKGSLYLRPLLFGSGASLGVAAASEYTFLVFGSPVQNYFKEGTAALNLYVEEVIPRAYLGGTGGVKAISNYGPVLEVMRRAKSRGFSDVLYLDADTGKNIEEVSAANIFLVKGNTIVTPATSGTILGGITRKSIIEIALDLGYKVEERSVPVEELKEAEEVFCTGTAAGVASVGSITFKNTRTEYKVGDGIVTQQLRSILVGIQTGSIQDTKDWVLQIA

SEQ ID NO: 38870 - DNA, 1370 bp, Arabidopsis thaliana; identical to SEQ ID NO: 30580
  misc_feature (1)..(1370): Ceres Seq. ID no. 13574978
  misc_feature: MA Experiment ID: 20000171 Result: Down-regulated in Transcription
  misc_feature: MA Experiment 20000171 PARAMETER Experiment Name: At_42deg_Heat_P Parameter: Age (day) Value: 14
  misc_feature: MA Experiment 20000171 PARAMETER Experiment Name: At_42deg_Heat_P Parameter: Organism Value: A. thaliana
  misc_feature: MA Experiment 20000171 PARAMETER Experiment Name: At_42deg_Heat_P Parameter: Plant Line Value: WS
  misc_feature: MA Experiment 20000171 PARAMETER Experiment Name: At_42deg_Heat_P Parameter: Temperature (deg C) Value: 42 vs. 22
  misc_feature: MA Experiment 20000171 PARAMETER Experiment Name: At_42deg_Heat_P Parameter: Timepoint (hr) Value: 1
  misc_feature: MA Experiment 20000171 PARAMETER Experiment Name: At_42deg_Heat_P Parameter: Tissue Value: Aerial
  misc_feature: MA Experiment ID: 20000173 Result: Down-regulated in Transcription
  misc_feature: MA Experiment 20000173 PARAMETER Experiment Name: At_42deg_Heat_P Parameter: Age (day) Value: 14
  misc_feature: MA Experiment 20000173 PARAMETER Experiment Name: At_42deg_Heat_P Parameter: Organism Value: A. thaliana
  misc_feature: MA Experiment 20000173 PARAMETER Experiment Name: At_42deg_Heat_P Parameter: Plant Line Value: WS
  misc_feature: MA Experiment 20000173 PARAMETER Experiment Name: At_42deg_Heat_P Parameter: Temperature (deg C) Value: 42 vs. 22
  misc_feature: MA Experiment 20000173 PARAMETER Experiment Name: At_42deg_Heat_P Parameter: Timepoint (hr) Value: 6
  misc_feature: MA Experiment 20000173 PARAMETER Experiment Name: At_42deg_Heat_P Parameter: Tissue Value: Aerial
  misc_feature: MA Experiment ID: 20000179 Result: Up-regulated in Transcription
  misc_feature: MA Experiment 20000179 PARAMETER Experiment Name: At_Germinating_Seeds_P Parameter: Age (hr) Value: 6 vs. 0
  misc_feature: MA Experiment 20000179 PARAMETER Experiment Name: At_Germinating_Seeds_P Parameter: Tissue Value: Germinating Seeds
  misc_feature: MA Experiment ID: 20000182 Result: Down-regulated in Transcription
  misc_feature: MA Experiment 20000182 PARAMETER Experiment Name: At_2mM_SA_P Parameter: Age (day) Value: 14
  misc_feature: MA Experiment 20000182 PARAMETER Experiment Name: At_2mM_SA_P Parameter: Organism Value: A. thaliana
  misc_feature: MA Experiment 20000182 PARAMETER Experiment Name: At_2mM_SA_P Parameter: Plant Line Value: WS
  misc_feature: MA Experiment 20000182 PARAMETER Experiment Name: At_2mM_SA_P Parameter: Timepoint (hr) Value: 6
  misc_feature: MA Experiment 20000182 PARAMETER Experiment Name: At_2mM_SA_P Parameter: Tissue Value: Aerial
  misc_feature: MA Experiment 20000182 PARAMETER Experiment Name: At_2mM_SA_P Parameter: Treatment Value: 2mM SA vs. No Treatment
  misc_feature: MA Experiment ID: 20000184 Result: Up-regulated in Transcription
  misc_feature: MA Experiment 20000184 PARAMETER Experiment Name: At_Shoots__P Parameter: Age (day) Value: 7
  misc_feature: MA Experiment 20000184 PARAMETER Experiment Name: At_Shoots__P Parameter: Tissue Value: Shoots vs. Whole Plant
  misc_feature: MA Experiment ID: 20000185 Result: Down-regulated in Transcription
  misc_feature: MA Experiment 20000185 PARAMETER Experiment Name: At_Roots__P Parameter: Age (day) Value: 7 vs. 21
  misc_feature: MA Experiment 20000185 PARAMETER Experiment Name: At_Roots__P Parameter: Organism Value: A. thaliana
  misc_feature: MA Experiment 20000185 PARAMETER Experiment Name: At_Roots__P Parameter: Tissue Value: Roots vs. Whole Plant
  misc_feature: MA Experiment ID: 20000234 Result: Up-regulated in Transcription
  misc_feature: MA Experiment 20000234 PARAMETER Experiment Name: At_Siliques_P Parameter: Age (day) Value: 21
  misc_feature: MA Experiment 20000234 PARAMETER Experiment Name: At_Siliques_P Parameter: Organism Value: A. thaliana
  misc_feature: MA Experiment 20000234 PARAMETER Experiment Name: At_Siliques_P Parameter: Plant Line Value: WS
  misc_feature: MA Experiment 20000234 PARAMETER Experiment Name: At_Siliques_P Parameter: Tissue Value: Less Than 5mm Siliques vs. Whole Plant
  misc_feature: MA Experiment ID: 20000264 Result: Up-regulated in Transcription
  misc_feature: MA Experiment 20000264 PARAMETER Experiment Name: At_Open_Flower_P Parameter: Age (day) Value: 21
  misc_feature: MA Experiment 20000264 PARAMETER Experiment Name: At_Open_Flower_P Parameter: Plant Line Value: WS
  misc_feature: MA Experiment 20000264 PARAMETER Experiment Name: At_Open_Flower_P Parameter: Tissue Value: Open Flower vs. Whole Plant
  misc_feature: MA Experiment ID: 20000265 Result: Up-regulated in Transcription
  misc_feature: MA Experiment 20000265 PARAMETER Experiment Name: At_Open_Flower_P Parameter: Age (day) Value: 21
  misc_feature: MA Experiment 20000265 PARAMETER Experiment Name: At_Open_Flower_P Parameter: Plant Line Value: WS
  misc_feature: MA Experiment 20000265 PARAMETER Experiment Name: At_Open_Flower_P Parameter: Tissue Value: Closed Flower vs. Whole Plant
  misc_feature: MA Experiment ID: 20000286 Result: Up-regulated in Transcription
  misc_feature: MA Experiment 20000286 PARAMETER Experiment Name: At_Open_Flower_P Parameter: Age (day) Value: 21
  misc_feature: MA Experiment 20000286 PARAMETER Experiment Name: At_Open_Flower_P Parameter: Plant Line Value: WS
  misc_feature: MA Experiment 20000286 PARAMETER Experiment Name: At_Open_Flower_P Parameter: Tissue Value: Half Open vs. Whole Plant
  misc_feature: MA Experiment ID: 20000436 Result: Down-regulated in Transcription
  misc_feature: MA Experiment 20000436 PARAMETER Experiment Name: At_Drought_P Parameter: Age (day) Value: 7
  misc_feature: MA Experiment 20000436 PARAMETER Experiment Name: At_Drought_P Parameter: Organism Value: A. thaliana
  misc_feature: MA Experiment 20000436 PARAMETER Experiment Name: At_Drought_P Parameter: Plant Line Value: WS
  misc_feature: MA Experiment 20000436 PARAMETER Experiment Name: At_Drought_P Parameter: Timepoint (hr) Value: 12
  misc_feature: MA Experiment 20000436 PARAMETER Experiment Name: At_Drought_P Parameter: Tissue Value: Whole Plant
  misc_feature: MA Experiment 20000436 PARAMETER Experiment Name: At_Drought_P Parameter: Treatment Value: Drought vs. No Drought
  misc_feature: MA Experiment ID: 20000437 Result: Down-regulated in Transcription
  misc_feature: MA Experiment 20000437 PARAMETER Experiment Name: At_Drought_P Parameter: Age (day) Value: 8
  misc_feature: MA Experiment 20000437 PARAMETER Experiment Name: At_Drought_P Parameter: Organism Value: A. thaliana
  misc_feature: MA Experiment 20000437 PARAMETER Experiment Name: At_Drought_P Parameter: Plant Line Value: WS
  misc_feature: MA Experiment 20000437 PARAMETER Experiment Name: At_Drought_P Parameter: Timepoint (hr) Value: 24
  misc_feature: MA Experiment 20000437 PARAMETER Experiment Name: At_Drought_P Parameter: Tissue Value: Whole Plant
  misc_feature: MA Experiment 20000437 PARAMETER Experiment Name: At_Drought_P Parameter: Treatment Value: Drought vs. No Drought
  misc_feature: MA Experiment ID: 20000438 Result: Up-regulated in Transcription
  misc_feature: MA Experiment 20000438 PARAMETER Experiment Name: At_Shoots__P Parameter: Age (day) Value: 14
  misc_feature: MA Experiment 20000438 PARAMETER Experiment Name: At_Shoots__P Parameter: Tissue Value: Shoots vs. Whole Plant
  misc_feature: MA Experiment ID: 20000439 Result: Down-regulated in Transcription
  misc_feature: MA Experiment 20000439 PARAMETER Experiment Name: At_Roots__P Parameter: Age (day) Value: 14 vs. 21
  misc_feature: MA Experiment 20000439 PARAMETER Experiment Name: At_Roots__P Parameter: Organism Value: A. thaliana
  misc_feature: MA Experiment 20000439 PARAMETER Experiment Name: At_Roots__P Parameter: Tissue Value: Roots vs. Whole Plant
  misc_feature: MA Experiment ID: 20000445 Result: Down-regulated in Transcription
  misc_feature: MA Experiment 20000445 PARAMETER Experiment Name: At_100uM_NAA__P Parameter: Age (day) Value: 14
  misc_feature: MA Experiment 20000445 PARAMETER Experiment Name: At_100uM_NAA__P Parameter: Organism Value: A. thaliana
  misc_feature: MA Experiment 20000445 PARAMETER Experiment Name: At_100uM_NAA__P Parameter: Plant Line Value: WS
  misc_feature: MA Experiment 20000445 PARAMETER Experiment Name: At_100uM_NAA__P Parameter: Timepoint (hr) Value: 6
  misc_feature: MA Experiment 20000445 PARAMETER Experiment Name: At_100uM_NAA__P Parameter: Tissue Value: Aerial
  misc_feature: MA Experiment 20000445 PARAMETER Experiment Name: At_100uM_NAA__P Parameter: Treatment Value: 100uM NAA vs. No Treatment
  misc_feature: MA Experiment ID: 20000451 Result: Up-regulated in Transcription
  misc_feature: MA Experiment 20000451 PARAMETER Experiment Name: At_CS6879_Shoots-Roots_P Parameter: Age (day) Value: 14
  misc_feature: MA Experiment 20000451 PARAMETER Experiment Name: At_CS6879_Shoots-Roots_P Parameter: Organism Value: A. thaliana
  misc_feature: MA Experiment 20000451 PARAMETER Experiment Name: At_CS6879_Shoots-Roots_P Parameter: Plant Line Value: CS6879 vs. WS
  misc_feature: MA Experiment 20000451 PARAMETER Experiment Name: At_CS6879_Shoots-Roots_P Parameter: Tissue Value: Roots
  misc_feature: MA Experiment ID: 20000453 Result: Down-regulated in Transcription
  misc_feature: MA Experiment 20000453 PARAMETER Experiment Name: At_100uM_ABA_P Parameter: Age (day) Value: 15
  misc_feature: MA Experiment 20000453 PARAMETER Experiment Name: At_100uM_ABA_P Parameter: Organism Value: A. thaliana
  misc_feature: MA Experiment 20000453 PARAMETER Experiment Name: At_100uM_ABA_P Parameter: Plant Line Value: WS
  misc_feature: MA Experiment 20000453 PARAMETER Experiment Name: At_100uM_ABA_P Parameter: Timepoint (hr) Value: 24
  misc_feature: MA Experiment 20000453 PARAMETER Experiment Name: At_100uM_ABA_P Parameter: Tissue Value: Aerial
  misc_feature: MA Experiment 20000453 PARAMETER Experiment Name: At_100uM_ABA_P Parameter: Treatment Value: 100uM ABA vs. No Treatment
  misc_feature: MA Experiment ID: 20000573 Result: Down-regulated in Transcription
  misc_feature: MA Experiment 20000573 PARAMETER Experiment Name: At_100uM_ABA_Mutants__P Parameter: Organism Value: A. thaliana
  misc_feature: MA Experiment 20000573 PARAMETER Experiment Name: At_100uM_ABA_Mutants__P Parameter: Plant Line Value: CS22 vs. Ler wt
  misc_feature: MA Experiment 20000573 PARAMETER Experiment Name: At_100uM_ABA_Mutants__P Parameter: Timepoint (hr) Value: N/A
  misc_feature: MA Experiment 20000573 PARAMETER Experiment Name: At_100uM_ABA_Mutants__P Parameter: Tissue Value: Whole Plant
  misc_feature: MA Experiment 20000573 PARAMETER Experiment Name: At_100uM_ABA_Mutants__P Parameter: Treatment Value: None
  misc_feature: MA Experiment ID: 20000574 Result: Down-regulated in Transcription
  misc_feature: MA Experiment 20000574 PARAMETER Experiment Name: At_100uM_ABA_Mutants__P Parameter: Organism Value: A. thaliana
  misc_feature: MA Experiment 20000574 PARAMETER Experiment Name: At_100uM_ABA_Mutants__P Parameter: Plant Line Value: CS23 vs. Ler wt
  misc_feature: MA Experiment 20000574 PARAMETER Experiment Name: At_100uM_ABA_Mutants__P Parameter: Timepoint (hr) Value: N/A
  misc_feature: MA Experiment 20000574 PARAMETER Experiment Name: At_100uM_ABA_Mutants__P Parameter: Tissue Value: Whole Plant
  misc_feature: MA Experiment 20000574 PARAMETER Experiment Name: At_100uM_ABA_Mutants__P Parameter: Treatment Value: None
  misc_feature: MA Experiment ID: 20000794 Result: Down-regulated in Transcription
  misc_feature: MA Experiment 20000794 PARAMETER Experiment Name: At_Petals_P Parameter: Age (day) Value: 23-25 days
  misc_feature: MA Experiment 20000794 PARAMETER Experiment Name: At_Petals_P Parameter: Plant Line Value: WS
  misc_feature: MA Experiment 20000794 PARAMETER Experiment Name: At_Petals_P Parameter: Tissue Value: Petals vs. Whole plant
  misc_feature: MA Experiment ID: 20001248 Result: Down-regulated in Transcription
  misc_feature: MA Experiment 20001248 PARAMETER Experiment Name: At_Far-red-induction_P Parameter: Age (day) Value: 7
  misc_feature: MA Experiment 20001248 PARAMETER Experiment Name: At_Far-red-induction_P Parameter: Light Value: Far-red vs. White
  misc_feature: MA Experiment 20001248 PARAMETER Experiment Name: At_Far-red-induction_P Parameter: Organism Value: A. thaliana
  misc_feature: MA Experiment 20001248 PARAMETER Experiment Name: At_Far-red-induction_P Parameter: Plant Line Value: Columbia
  misc_feature: MA Experiment 20001248 PARAMETER Experiment Name: At_Far-red-induction_P Parameter: Timepoint (hr) Value: 4
  misc_feature: MA Experiment 20001248 PARAMETER Experiment Name: At_Far-red-induction_P Parameter: Tissue Value: Whole Plant
  misc_feature: MA Experiment ID: 20001457 Result: Up-regulated in Transcription
  misc_feature: MA Experiment 20001457 PARAMETER Experiment Name: At_50mM_NH4NO3_L-to-H_P Parameter: Age (day) Value: Undefined
  misc_feature: MA Experiment 20001457 PARAMETER Experiment Name: At_50mM_NH4NO3_L-to-H_P Parameter: Organism Value: Undefined
  misc_feature: MA Experiment 20001457 PARAMETER Experiment Name: At_50mM_NH4NO3_L-to-H_P Parameter: Plant Line Value: Undefined
  misc_feature: MA Experiment 20001457 PARAMETER Experiment Name: At_50mM_NH4NO3_L-to-H_P Parameter: Timepoint (hr) Value: 0.5
  misc_feature: MA Experiment 20001457 PARAMETER Experiment Name: At_50mM_NH4NO3_L-to-H_P Parameter: Tissue Value: Siliques
  misc_feature: MA Experiment 20001457 PARAMETER Experiment Name: At_50mM_NH4NO3_L-to-H_P Parameter: Treatment Value: 50mM NH4NO3 vs. 100mM Manitol
  misc_feature: MA Experiment ID: 20001555 Result: Down-regulated in Transcription
  misc_feature: MA Experiment 20001555 PARAMETER Experiment Name: At_Drought_Soil_Dry_P Parameter: Age (day) Value: 24
  misc_feature: MA Experiment 20001555 PARAMETER Experiment Name: At_Drought_Soil_Dry_P Parameter: Organism Value: A. thaliana
  misc_feature: MA Experiment 20001555 PARAMETER Experiment Name: At_Drought_Soil_Dry_P Parameter: Plant Line Value: WS
  misc_feature: MA Experiment 20001555 PARAMETER Experiment Name: At_Drought_Soil_Dry_P Parameter: Post Timepoint (hr) Value: None
  misc_feature: MA Experiment 20001555 PARAMETER Experiment Name: At_Drought_Soil_Dry_P Parameter: Post-Treatment Value: None
  misc_feature: MA Experiment 20001555 PARAMETER Experiment Name: At_Drought_Soil_Dry_P Parameter: Timepoint (day) Value: 10
  misc_feature: MA Experiment 20001555 PARAMETER Experiment Name: At_Drought_Soil_Dry_P Parameter: Treatment Value: Drought vs. No Drought
  misc_feature: MA Experiment ID: 20001556 Result: Down-regulated in Transcription
  misc_feature: MA Experiment 20001556 PARAMETER Experiment Name: At_Drought_Soil_Dry_P Parameter: Age (day) Value: 26
  misc_feature: MA Experiment 20001556 PARAMETER Experiment Name: At_Drought_Soil_Dry_P Parameter: Organism Value: A. thaliana
  misc_feature: MA Experiment 20001556 PARAMETER Experiment Name: At_Drought_Soil_Dry_P Parameter: Plant Line Value: WS
  misc_feature: MA Experiment 20001556 PARAMETER Experiment Name: At_Drought_Soil_Dry_P Parameter: Post Timepoint (hr) Value: None
  misc_feature: MA Experiment 20001556 PARAMETER Experiment Name: At_Drought_Soil_Dry_P Parameter: Post-Treatment Value: None
  misc_feature: MA Experiment 20001556 PARAMETER Experiment Name: At_Drought_Soil_Dry_P Parameter: Timepoint (day) Value: 12
  misc_feature: MA Experiment 20001556 PARAMETER Experiment Name: At_Drought_Soil_Dry_P Parameter: Treatment Value: Drought vs. No Drought
  misc_feature: MA Experiment ID: 20001557 Result: Up-regulated in Transcription
  misc_feature: MA Experiment 20001557 PARAMETER Experiment Name: At_Drought_Soil_Dry_P Parameter: Age (day) Value: 27
  misc_feature: MA Experiment 20001557 PARAMETER Experiment Name: At_Drought_Soil_Dry_P Parameter: Organism Value: A. thaliana
  misc_feature: MA Experiment 20001557 PARAMETER Experiment Name: At_Drought_Soil_Dry_P Parameter: Plant Line Value: WS
  misc_feature: MA Experiment 20001557 PARAMETER Experiment Name: At_Drought_Soil_Dry_P Parameter: Post Timepoint (hr) Value: 3
  misc_feature: MA Experiment 20001557 PARAMETER Experiment Name: At_Drought_Soil_Dry_P Parameter: Post-Treatment Value: Re-Water vs. No Drought
  misc_feature: MA Experiment 20001557 PARAMETER Experiment Name: At_Drought_Soil_Dry_P Parameter: Timepoint (day) Value: 13
  misc_feature: MA Experiment 20001557 PARAMETER Experiment Name: At_Drought_Soil_Dry_P Parameter: Treatment Value: Drought vs. No Drought
  misc_feature: MA Experiment ID: 20001558 Result: Up-regulated in Transcription
  misc_feature: MA Experiment 20001558 PARAMETER Experiment Name: At_Drought_Soil_Dry_P Parameter: Age (day) Value: 27
  misc_feature: MA Experiment 20001558 PARAMETER Experiment Name: At_Drought_Soil_Dry_P Parameter: Organism Value: A. thaliana
  misc_feature: MA Experiment 20001558 PARAMETER Experiment Name: At_Drought_Soil_Dry_P Parameter: Plant Line Value: WS
  misc_feature: MA Experiment 20001558 PARAMETER Experiment Name: At_Drought_Soil_Dry_P Parameter: Post Timepoint (hr) Value: 6
  misc_feature: MA Experiment 20001558 PARAMETER Experiment Name: At_Drought_Soil_Dry_P Parameter: Post-Treatment Value: Re-Water vs. No Drought
  misc_feature: MA Experiment 20001558 PARAMETER Experiment Name: At_Drought_Soil_Dry_P Parameter: Timepoint (day) Value: 13
  misc_feature: MA Experiment 20001558 PARAMETER Experiment Name: At_Drought_Soil_Dry_P Parameter: Treatment Value: Drought vs. No Drought
  misc_feature: MA Experiment ID: 20001560 Result: Up-regulated in Transcription
  misc_feature: MA Experiment 20001560 PARAMETER Experiment Name: At_Drought_Soil_Dry_P Parameter: Age (day) Value: 28
  misc_feature: MA Experiment 20001560 PARAMETER Experiment Name: At_Drought_Soil_Dry_P Parameter: Organism Value: A. thaliana
  misc_feature: MA Experiment 20001560 PARAMETER Experiment Name: At_Drought_Soil_Dry_P Parameter: Plant Line Value: WS
  misc_feature: MA Experiment 20001560 PARAMETER Experiment Name: At_Drought_Soil_Dry_P Parameter: Post Timepoint (hr) Value: None
  misc_feature: MA Experiment 20001560 PARAMETER Experiment Name: At_Drought_Soil_Dry_P Parameter: Post-Treatment Value: None
  misc_feature: MA Experiment 20001560 PARAMETER Experiment Name: At_Drought_Soil_Dry_P Parameter: Timepoint (day) Value: 14
  misc_feature: MA Experiment 20001560 PARAMETER Experiment Name: At_Drought_Soil_Dry_P Parameter: Treatment Value: Drought vs. No Drought
  misc_feature: MA Experiment ID: 20001757 Result: Up-regulated in Transcription
  misc_feature: MA Experiment 20001757 PARAMETER Experiment Name: At_50mM_NH4NO3_L-to-H_P Parameter: Timepoint (hr) Value: 6
  misc_feature: MA Experiment 20001757 PARAMETER Experiment Name: At_50mM_NH4NO3_L-to-H_P Parameter: Tissue Value: Leaf
  misc_feature: MA Experiment 20001757 PARAMETER Experiment Name: At_50mM_NH4NO3_L-to-H_P Parameter: Treatment Value: 50mM NH4NO3 vs 100mM Mannitol
  misc_feature: MA Experiment ID: 20001911 Result: Down-regulated in Transcription
  misc_feature: MA Experiment 20001911 PARAMETER Experiment Name: At_Drought_Reproduction_P Parameter: Age (day) Value: 40
  misc_feature: MA Experiment 20001911 PARAMETER Experiment Name: At_Drought_Reproduction_P Parameter: Organism Value: A. thaliana
  misc_feature: MA Experiment 20001911 PARAMETER Experiment Name: At_Drought_Reproduction_P Parameter: Plant Line Value: WS
  misc_feature: MA Experiment 20001911 PARAMETER Experiment Name: At_Drought_Reproduction_P Parameter: Timepoint (day) Value: 10
  misc_feature: MA Experiment 20001911 PARAMETER Experiment Name: At_Drought_Reproduction_P Parameter: Tissue Value: Flowers
  misc_feature: MA Experiment 20001911 PARAMETER Experiment Name: At_Drought_Reproduction_P Parameter: Treatment Value: Drought vs. No Drought

SEQ ID NO: 38871 - protein, 362 aa, Arabidopsis thaliana; identical to SEQ ID NO: 30581
  peptide (1)..(362): Ceres Seq. ID no. 13574979
  misc_feature (30)..(342): Pfam Name: GDSL-like Lipase/Acylhydrolase Pfam Description: GDSL-like Lipase/Acylhydrolase
  misc_feature (30)..(342): Pfam Name: GDSL-like Lipase/Acylhydrolase Pfam Description: GDSL-like Lipase/Acylhydrolase
  misc_feature (1)..(362): Homolog of NCBI NO: 34910808 NR Description: GDSL-motif lipase/hydrolase-like protein
  misc_feature (10)..(362): Homolog of NCBI NO: 21594055 NR Description: lipase/hydrolase, putative [Arabidopsis thaliana]
  misc_feature (10)..(362): Homolog of NCBI NO: 15220512 NR Description: GDSL-motif lipase/hydrolase protein [Arabidopsis
  misc_feature (1)..(362): Homolog of NCBI NO: 21592417 NR Description: lipase/hydrolase, putative [Arabidopsis thaliana]
  misc_feature (1)..(362): Homolog of NCBI NO: 15220514 NR Description: GDSL-motif lipase/hydrolase protein [Arabidopsis
  misc_feature (1)..(362): Homolog of NCBI NO: 34910808 NR Description: GDSL-motif lipase/hydrolase-like protein
  misc_feature (10)..(362): Homolog of NCBI NO: 15220512 NR Description: GDSL-motif lipase/hydrolase protein [Arabidopsis
  misc_feature (1)..(362): Homolog of NCBI NO: 15220514 NR Description: GDSL-motif lipase/hydrolase protein [Arabidopsis
  misc_feature (1)..(362): Homolog of NCBI NO: 15242458 NR Description: GDSL-motif lipase/hydrolase protein [Arabidopsis
  misc_feature (1)..(362): Homolog of NCBI NO: 21553940 NR Description: GDSL-motif lipase/hydrolase-like protein
  misc_feature (1)..(362): Homolog of NCBI NO: 7485419 NR Description: hypothetical protein F13C5.140 - Arabidopsis
  misc_feature (1)..(362): Homolog of NCBI NO: 18415211 NR Description: GDSL-motif lipase/hydrolase protein [Arabidopsis
  misc_feature (1)..(362): Homolog of NCBI NO: 21618199 NR Description: GDSL-motif lipase/hydrolase-like protein
  misc_feature (1)..(362): Homolog of NCBI NO: 21592417 NR Description: lipase/hydrolase, putative [Arabidopsis thaliana]
  misc_feature (10)..(362): Homolog of NCBI NO: 21594055 NR Description: lipase/hydrolase, putative [Arabidopsis thaliana]
  misc_feature (1)..(362): Homolog of NCBI NO: 21618199 NR Description: GDSL-motif lipase/hydrolase-like protein
  misc_feature (1)..(362): Homolog of NCBI NO: 18415211 NR Description: GDSL-motif lipase/hydrolase protein [Arabidopsis
  misc_feature (1)..(362): Homolog of NCBI NO: 7485419 NR Description: hypothetical protein F13C5.140 - Arabidopsis
  misc_feature (1)..(362): Homolog of NCBI NO: 21553940 NR Description: GDSL-motif lipase/hydrolase-like protein
  misc_feature (1)..(362): Homolog of NCBI NO: 15242458 NR Description: GDSL-motif lipase/hydrolase protein [Arabidopsis

SEQ ID NO: 38872 - protein, 359 aa, Arabidopsis thaliana; identical to SEQ ID NO: 30582
  peptide (1)..(359): Ceres Seq. ID no. 13574980
  misc_feature (27)..(339): Pfam Name: GDSL-like Lipase/Acylhydrolase Pfam Description: GDSL-like Lipase/Acylhydrolase
  misc_feature (27)..(339): Pfam Name: GDSL-like Lipase/Acylhydrolase Pfam Description: GDSL-like Lipase/Acylhydrolase
  misc_feature (1)..(359): Homolog of NCBI NO: 34910808 NR Description: GDSL-motif lipase/hydrolase-like protein
  misc_feature (7)..(359): Homolog of NCBI NO: 21594055 NR Description: lipase/hydrolase, putative [Arabidopsis thaliana]
  misc_feature (7)..(359): Homolog of NCBI NO: 15220512 NR Description: GDSL-motif lipase/hydrolase protein [Arabidopsis
  misc_feature (1)..(359): Homolog of NCBI NO: 21592417 NR Description: lipase/hydrolase, putative [Arabidopsis thaliana]
  misc_feature (1)..(359): Homolog of NCBI NO: 15220514 NR Description: GDSL-motif lipase/hydrolase protein [Arabidopsis
  misc_feature (1)..(359): Homolog of NCBI NO: 34910808 NR Description: GDSL-motif lipase/hydrolase-like protein
  misc_feature (7)..(359): Homolog of NCBI NO: 15220512 NR Description: GDSL-motif lipase/hydrolase protein [Arabidopsis
  misc_feature (1)..(359): Homolog of NCBI NO: 15220514 NR Description: GDSL-motif lipase/hydrolase protein [Arabidopsis
  misc_feature (1)..(359): Homolog of NCBI NO: 15242458 NR Description: GDSL-motif lipase/hydrolase protein [Arabidopsis
  misc_feature (1)..(359): Homolog of NCBI NO: 21553940 NR Description: GDSL-motif lipase/hydrolase-like protein
  misc_feature (1)..(359): Homolog of NCBI NO: 7485419 NR Description: hypothetical protein F13C5.140 - Arabidopsis
  misc_feature (1)..(359): Homolog of NCBI NO: 18415211 NR Description: GDSL-motif lipase/hydrolase protein [Arabidopsis
  misc_feature (1)..(359): Homolog of NCBI NO: 21618199 NR Description: GDSL-motif lipase/hydrolase-like protein
  misc_feature (1)..(359): Homolog of NCBI NO: 21592417 NR Description: lipase/hydrolase, putative [Arabidopsis thaliana]
  misc_feature (7)..(359): Homolog of NCBI NO: 21594055 NR Description: lipase/hydrolase, putative [Arabidopsis thaliana]
  misc_feature (1)..(359): Homolog of NCBI NO: 21618199 NR Description: GDSL-motif lipase/hydrolase-like protein
  misc_feature (1)..(359): Homolog of NCBI NO: 18415211 NR Description: GDSL-motif lipase/hydrolase protein [Arabidopsis
  misc_feature (1)..(359): Homolog of NCBI NO: 7485419 NR Description: hypothetical protein F13C5.140 - Arabidopsis
  misc_feature (1)..(359): Homolog of NCBI NO: 21553940 NR Description: GDSL-motif lipase/hydrolase-like protein
  misc_feature (1)..(359): Homolog of NCBI NO: 15242458 NR Description: GDSL-motif lipase/hydrolase protein [Arabidopsis

SEQ ID NO: 38873 - protein, 356 aa, Arabidopsis thaliana; identical to SEQ ID NO: 30583
  peptide (1)..(356): Ceres Seq. ID no. 13574981
  misc_feature (24)..(336): Pfam Name: GDSL-like Lipase/Acylhydrolase Pfam Description: GDSL-like Lipase/Acylhydrolase
  misc_feature (24)..(336): Pfam Name: GDSL-like Lipase/Acylhydrolase Pfam Description: GDSL-like Lipase/Acylhydrolase
  misc_feature (1)..(356): Homolog of NCBI NO: 34910808 NR Description: GDSL-motif lipase/hydrolase-like protein
  misc_feature (4)..(356): Homolog of NCBI NO: 21594055 NR Description: lipase/hydrolase, putative [Arabidopsis thaliana]
  misc_feature (4)..(356): Homolog of NCBI NO: 15220512 NR Description: GDSL-motif lipase/hydrolase protein [Arabidopsis
  misc_feature (1)..(356): Homolog of NCBI NO: 21592417 NR Description: lipase/hydrolase, putative [Arabidopsis thaliana]
  misc_feature (1)..(356): Homolog of NCBI NO: 15220514 NR Description: GDSL-motif lipase/hydrolase protein [Arabidopsis
  misc_feature (1)..(356): Homolog of NCBI NO: 34910808 NR Description: GDSL-motif lipase/hydrolase-like protein
  misc_feature (4)..(356): Homolog of NCBI NO: 15220512 NR Description: GDSL-motif lipase/hydrolase protein [Arabidopsis
  misc_feature (1)..(356): Homolog of NCBI NO: 15220514 NR Description: GDSL-motif lipase/hydrolase protein [Arabidopsis
  misc_feature (1)..(356): Homolog of NCBI NO: 15242458 NR Description: GDSL-motif lipase/hydrolase protein [Arabidopsis
  misc_feature (1)..(356): Homolog of NCBI NO: 21553940 NR Description: GDSL-motif lipase/hydrolase-like protein
  misc_feature (1)..(356): Homolog of NCBI NO: 7485419 NR Description: hypothetical protein F13C5.140 - Arabidopsis
  misc_feature (1)..(356): Homolog of NCBI NO: 18415211 NR Description: GDSL-motif lipase/hydrolase protein [Arabidopsis
  misc_feature (1)..(356): Homolog of NCBI NO: 21618199 NR Description: GDSL-motif lipase/hydrolase-like protein
  misc_feature (1)..(356): Homolog of NCBI NO: 21592417 NR Description: lipase/hydrolase, putative [Arabidopsis thaliana]
  misc_feature (4)..(356): Homolog of NCBI NO: 21594055 NR Description: lipase/hydrolase, putative [Arabidopsis thaliana]
  misc_feature (1)..(356): Homolog of NCBI NO: 21618199 NR Description: GDSL-motif lipase/hydrolase-like protein
  misc_feature (1)..(356): Homolog of NCBI NO: 18415211 NR Description: GDSL-motif lipase/hydrolase protein [Arabidopsis
  misc_feature (1)..(356): Homolog of NCBI NO: 7485419 NR Description: hypothetical protein F13C5.140 - Arabidopsis
  misc_feature (1)..(356): Homolog of NCBI NO: 21553940 NR Description: GDSL-motif lipase/hydrolase-like protein
  misc_feature (1)..(356): Homolog of NCBI NO: 15242458 NR Description: GDSL-motif lipase/hydrolase protein [Arabidopsis

SEQ ID NO: 38874 - DNA, 1110 bp, Arabidopsis thaliana
  misc_feature (1)..(1110): Ceres Seq. ID no. 12338109
  misc_feature: MA Experiment ID: 108489 Result: Up-regulated in Transcription
  misc_feature: MA Experiment ID: 20000234 Result: Up-regulated in Transcription
  misc_feature: MA Experiment 20000234 PARAMETER Experiment Name: At_Siliques_P Parameter: Age (day) Value: 21
  misc_feature: MA Experiment 20000234 PARAMETER Experiment Name: At_Siliques_P Parameter: Organism Value: A. thaliana
  misc_feature: MA Experiment 20000234 PARAMETER Experiment Name: At_Siliques_P Parameter: Plant Line Value: WS
  misc_feature: MA Experiment 20000234 PARAMETER Experiment Name: At_Siliques_P Parameter: Tissue Value: Less Than 5mm Siliques vs. Whole Plant
  misc_feature: MA Experiment ID: 20000264 Result: Up-regulated in Transcription
  misc_feature: MA Experiment 20000264 PARAMETER Experiment Name: At_Open_Flower_P Parameter: Age (day) Value: 21
  misc_feature: MA Experiment 20000264 PARAMETER Experiment Name: At_Open_Flower_P Parameter: Plant Line Value: WS
  misc_feature: MA Experiment 20000264 PARAMETER Experiment Name: At_Open_Flower_P Parameter: Tissue Value: Open Flower vs. Whole Plant
  misc_feature: MA Experiment ID: 20000265 Result: Up-regulated in Transcription
  misc_feature: MA Experiment 20000265 PARAMETER Experiment Name: At_Open_Flower_P Parameter: Age (day) Value: 21
  misc_feature: MA Experiment 20000265 PARAMETER Experiment Name: At_Open_Flower_P Parameter: Plant Line Value: WS
  misc_feature: MA Experiment 20000265 PARAMETER Experiment Name: At_Open_Flower_P Parameter: Tissue Value: Closed Flower vs. Whole Plant
  misc_feature: MA Experiment ID: 20000286 Result: Up-regulated in Transcription
  misc_feature: MA Experiment 20000286 PARAMETER Experiment Name: At_Open_Flower_P Parameter: Age (day) Value: 21
  misc_feature: MA Experiment 20000286 PARAMETER Experiment Name: At_Open_Flower_P Parameter: Plant Line Value: WS
  misc_feature: MA Experiment 20000286 PARAMETER Experiment Name: At_Open_Flower_P Parameter: Tissue Value: Half Open vs. Whole Plant
  misc_feature: MA Experiment ID: 20000794 Result: Up-regulated in Transcription
  misc_feature: MA Experiment 20000794 PARAMETER Experiment Name: At_Petals_P Parameter: Age (day) Value: 23-25 days
  misc_feature: MA Experiment 20000794 PARAMETER Experiment Name: At_Petals_P Parameter: Plant Line Value: WS
  misc_feature: MA Experiment 20000794 PARAMETER Experiment Name: At_Petals_P Parameter: Tissue Value: Petals vs. Whole plant
  misc_feature: MA Experiment ID: 20001910 Result: Up-regulated in Transcription
  misc_feature: MA Experiment 20001910 PARAMETER Experiment Name: At_Drought_Reproduction_P Parameter: Age (day) Value: 37
  misc_feature: MA Experiment 20001910 PARAMETER Experiment Name: At_Drought_Reproduction_P Parameter: Organism Value: A. thaliana
  misc_feature: MA Experiment 20001910 PARAMETER Experiment Name: At_Drought_Reproduction_P Parameter: Plant Line Value: WS
  misc_feature: MA Experiment 20001910 PARAMETER Experiment Name: At_Drought_Reproduction_P Parameter: Timepoint (day) Value: 7
  misc_feature: MA Experiment 20001910 PARAMETER Experiment Name: At_Drought_Reproduction_P Parameter: Tissue Value: Flowers
  misc_feature: MA Experiment 20001910 PARAMETER Experiment Name: At_Drought_Reproduction_P Parameter: Treatment Value: Drought vs. No Drought
acattctgagaagaagaagaagaaaataagaaaaaacaaaagatgaaaaccattatcctttttgtaacatttcttgctctttcttcttcatctctagccgatgagacagagactgaatttcattacaaacccggtgagatagccgatccctcgaaatggagcagtatcaaggctgaatggaaaatttgcgggacagggaagaggcaatcgccaatcaatcttactccaaaaatagctcgcattgttcacaattctacacagattcttcagacatattacaaacctgtagaggctattcttaagaaccgtggattcgacatgaaggttaagtgggaagacgatgcagggaagatcgtgatcaatgataccgactataaattggttcaaagccactggcacgcaccttcagagcattttctcgatggacagaggttggcaatggaacttcacatggtacacaaaagtgtagaagggcacttggcagtgattggagttctcttcagagaaggagaaccaaatgctttcatttcgcggatcatggacaagatccataagatcgcagacgtacaagatggagaggtcagcatcggaaagatagatccaagagaatttggatgggatcttacaaagttttatgaatacagaggttctctcactactcctccttgcacggaagatgtcatgtggaccatcatcaacaaggtggggactgtttcacgtgagcaaattgatgtattgacagatgctcgtcgcggtggttatgagaagaacgcgagaccagctcaacctctgaacggacgtctggtttatttaaacgagcagtccagtccaagtccaactccacggctaagaataccacgagttggtccggtctaagacagtcttataggacaaggcaactccgagccctaatttccatacaaagaaaattcggaaaagaattttgaagatgtatgaaaattgggagccataactatttttttttaactattcttttgattaaaagataaaactacgcaatattatatgcataaagtttttcttttatacatgtattccaataaacaagatgtaataatatccaaccataatgagttgtttgattatttt

SEQ ID NO: 38875 - protein, 277 aa, Arabidopsis thaliana
  peptide (1)..(277): Ceres Seq. ID no. 12338110
  misc_feature (31)..(259): Pfam Name: Eukaryotic-type carbonic anhydrase Pfam Description: Eukaryotic-type carbonic anhydrase
  misc_feature (4)..(257): Homolog of NCBI NO: 25407021 NR Description: protein T6D22.16 [imported] - Arabidopsis
  misc_feature (23)..(264): Homolog of NCBI NO: 2147328 NR Description: dioscorin class B - Dioscorea cayenensis
  misc_feature (8)..(257): Homolog of NCBI NO: 37806288 NR Description: putative dioscorin [Oryza sativa (japonica
  misc_feature (2)..(221): Homolog of NCBI NO: 15233474 NR Description: carbonic anhydrase - like protein; protein id:
  misc_feature (21)..(223): Homolog of NCBI NO: 30683808 NR Description: carbonic anhydrase -related [Arabidopsis thaliana]
  misc_feature (3)..(258): Homolog of NCBI NO: 29468280 NR Description: nectarin III [Nicotiana langsdorffii x Nicotiana
  misc_feature (4)..(257): Homolog of NCBI NO: 15223122 NR Description: storage protein, putative; protein id:
  misc_feature (21)..(262): Homolog of NCBI NO: 25291473 NR Description: probable carbonic anhydrase [imported] -
  misc_feature (1)..(256): Homolog of NCBI NO: 15233471 NR Description: carbonic anhydrase -like protein; protein id:
  misc_feature (1)..(277): Homolog of NCBI NO: 15237646 NR Description: carbonate dehydratase - like protein
MKTIILFVTFLALSSSSLADETETEFHYKPGEIADPSKWSSIKAEWKICGTGKRQSPINLTPKIARIVHNSTQILQTYYKPVEAILKNRGFDMKVKWEDDAGKIVINDTDYKLVQSHWHAPSEHFLDGQRLAMELHMVHKSVEGHLAVIGVLFREGEPNAFISRIMDKIHKIADVQDGEVSIGKIDPREFGWDLTKFYEYRGSLTTPPCTEDVMWTIINKVGTVSREQIDVLTDARRGGYEKNARPAQPLNGRLVYLNEQSSPSPTPRLRIPRVGPV

SEQ ID NO: 38876 - protein, 185 aa, Arabidopsis thaliana; identical to SEQ ID NO: 38484
  peptide (1)..(185): Ceres Seq. ID no. 12338111
  misc_feature (1)..(167): Pfam Name: Eukaryotic-type carbonic anhydrase Pfam Description: Eukaryotic-type carbonic anhydrase
  misc_feature (1)..(165): Homolog of NCBI NO: 25407021 NR Description: protein T6D22.16 [imported] - Arabidopsis
  misc_feature (1)..(172): Homolog of NCBI NO: 2147328 NR Description: dioscorin class B - Dioscorea cayenensis
  misc_feature (1)..(165): Homolog of NCBI NO: 37806288 NR Description: putative dioscorin [Oryza sativa (japonica
  misc_feature (1)..(129): Homolog of NCBI NO: 15233474 NR Description: carbonic anhydrase - like protein; protein id:
  misc_feature (1)..(131): Homolog of NCBI NO: 30683808 NR Description: carbonic anhydrase -related [Arabidopsis thaliana]
  misc_feature (1)..(166): Homolog of NCBI NO: 29468280 NR Description: nectarin III [Nicotiana langsdorffii x Nicotiana
  misc_feature (1)..(165): Homolog of NCBI NO: 15223122 NR Description: storage protein, putative; protein id:
  misc_feature (1)..(170): Homolog of NCBI NO: 25291473 NR Description: probable carbonic anhydrase [imported] -
  misc_feature (1)..(164): Homolog of NCBI NO: 15233471 NR Description: carbonic anhydrase -like protein; protein id:
  misc_feature (1)..(185): Homolog of NCBI NO: 15237646 NR Description: carbonate dehydratase - like protein

SEQ ID NO: 38877 - protein, 145 aa, Arabidopsis thaliana; identical to SEQ ID NO: 38485
  peptide (1)..(145): Ceres Seq. ID no. 12338112
  misc_feature (1)..(127): Pfam Name: Eukaryotic-type carbonic anhydrase Pfam Description: Eukaryotic-type carbonic anhydrase
  misc_feature (1)..(125): Homolog of NCBI NO: 25407021 NR Description: protein T6D22.16 [imported] - Arabidopsis
  misc_feature (1)..(132): Homolog of NCBI NO: 2147328 NR Description: dioscorin class B - Dioscorea cayenensis
  misc_feature (1)..(125): Homolog of NCBI NO: 37806288 NR Description: putative dioscorin [Oryza sativa (japonica
  misc_feature (1)..(89): Homolog of NCBI NO: 15233474 NR Description: carbonic anhydrase - like protein; protein id:
  misc_feature (1)..(91): Homolog of NCBI NO: 30683808 NR Description: carbonic anhydrase -related [Arabidopsis thaliana]
  misc_feature (1)..(126): Homolog of NCBI NO: 29468280 NR Description: nectarin III [Nicotiana langsdorffii x Nicotiana
  misc_feature (1)..(125): Homolog of NCBI NO: 15223122 NR Description: storage protein, putative; protein id:
  misc_feature (1)..(130): Homolog of NCBI NO: 25291473 NR Description: probable carbonic anhydrase [imported] -
  misc_feature (1)..(124): Homolog of NCBI NO: 15233471 NR Description: carbonic anhydrase -like protein; protein id:
  misc_feature (1)..(145): Homolog of NCBI NO: 15237646 NR Description: carbonate dehydratase - like protein

SEQ ID NO: 38878 - DNA, 1586 bp, Arabidopsis thaliana
  misc_feature (1)..(1586): Ceres Seq. ID no. 13492196
  misc_feature: MA Experiment ID: 108573 Result: Up-regulated in Transcription
  misc_feature: MA Experiment 108573 PARAMETER Experiment Name: At_Drought_cDNA_P Parameter: Timepoint (hr) Value: 6
  misc_feature: MA Experiment 108573 PARAMETER Experiment Name: At_Drought_cDNA_P Parameter: Tissue Value: Aerial
  misc_feature: MA Experiment 108573 PARAMETER Experiment Name: At_Drought_cDNA_P Parameter: Treatment Value: Drought vs. No Drought
  misc_feature: MA Experiment ID: 20000184 Result: Down-regulated in Transcription
  misc_feature: MA Experiment 20000184 PARAMETER Experiment Name: At_Shoots__P Parameter: Age (day) Value: 7
  misc_feature: MA Experiment 20000184 PARAMETER Experiment Name: At_Shoots__P Parameter: Tissue Value: Shoots vs. Whole Plant
  misc_feature: MA Experiment ID: 20000224 Result: Up-regulated in Transcription
  misc_feature: MA Experiment ID: 20000227 Result: Up-regulated in Transcription
  misc_feature: MA Experiment 20000227 PARAMETER Experiment Name: At_Root-Tips-vs-Tops_P Parameter: Tissue Value: Root Tips vs. Root Tops
aatgaaatctgtcattttcacagaggaaaaaaacttacaaagacaaaatccattgcaaaagagcgagcaacaacgacgaaatttcgaaatgccatcgccaccgacgacgacttctctctcggtgacacagaccataaacggatcacacagcttcacaatcaaaggctattctttggctaaaggaatcgggatcggaaaacacatcgccagcgatactttcaccgtcgggggttatcaatgggctatctatttctatcctgatggcaagaatcctgaggataattcggcttatgtctccgttttcattgctttagctagcgatggtaccgatgttagggctctttttgagctttctttgcttgatcagagtggtaaagggaagcataaggttcatagccacttcgatcgtgctcttgagagcggtccttatactctcaagtatcgtggcagcatgtggggctacaagcgcttttttcgaagacttatgctggaaacatctgattttctgaaggatgattgtctgaaaattaattgcaccgtgggagttgtggtctcagaaatagattgcccacggttacattctattcatgtccctgcatctgatattggatctcatttcgggatgcttctagagaacgaggacggttcagatataacttttaacgtctctggtgaaaagttccgtgctcacaggttagtattggctgctcgatctcctgtctttgaaagcgagttcctcgatgttacgggagaagaagatcgtgatatcgaagttactgacatggagcctaaggttttcaaggctttgctccactacatatacaaggatgctctcattgaagatgcagagtcatcatcatcttccggttcatctgttggtccatctgcctcagacacattagctgcaaagctactaggagccgctgataaatacaagttgcctagattaagtctaatgtgcgagtcagtgctctgcaaggatatatcagtagattccgttgcaaatattttggcgcttgctgaccgttacaatgcttccgccttgaaatccgtttgtctgaaattcgcagcagaaaatctcatcgctgttatgaggtcagatgggtttgattatctaagggaacactgcccgtcacttcagtctgagcttctgaaaacagttgcgggttgcgaagaggagttaagcggaggaggagggaagacgagaagcgtatggggccaattctcagacggtggagctgagacaaacggaagacaagcacagacttggggagatatcaatggaggagcagagagaagccagagtgtttgggtcgaagttgtgaacgctaatggaagcggtagaaacaataatgacaacaataacagtgatgacccaatggcagaactagaagattgagcaaataaaaggtaataaaaaagccaaaggacaatccgagtaagctgaagttaggatcagacatcatgaagcggagatcttgtaacttagtgtttccactgtcgaatactatgtggatcataggagacgatttagtattgttgttgtaatacgctttccgtgtaataattggagttactagtatgat

SEQ ID NO: 38879 - protein, 465 aa, Arabidopsis thaliana
  peptide (1)..(465): Ceres Seq. ID no. 13492197
  misc_feature (206)..(328): Pfam Name: BTB/POZ domain Pfam Description: BTB/POZ domain
  misc_feature (32)..(421): Homolog of NCBI NO: 23617108 NR Description: contains ESTs
  misc_feature (36)..(413): Homolog of NCBI NO: 14596183 NR Description: Unknown protein [Arabidopsis thaliana]
  misc_feature (29)..(421): Homolog of NCBI NO: 30691638 NR Description: expressed protein [Arabidopsis thaliana]
  misc_feature (29)..(421): Homolog of NCBI NO: 11282376 NR Description: hypothetical protein F23N14.80 - Arabidopsis
  misc_feature (36)..(421): Homolog of NCBI NO: 21536843 NR Description: unknown [Arabidopsis thaliana]
  misc_feature (36)..(421): Homolog of NCBI NO: 15242126 NR Description: expressed protein [Arabidopsis thaliana]
  misc_feature (30)..(421): Homolog of NCBI NO: 28269444 NR Description: unknown protein [Oryza sativa (japonica
  misc_feature (29)..(421): Homolog of NCBI NO: 34900034 NR Description: OJ1641_C04.24 [Oryza sativa (japonica
  misc_feature (30)..(465): Homolog of NCBI NO: 21536509 NR Description: unknown [Arabidopsis thaliana]
  misc_feature (1)..(465): Homolog of NCBI NO: 30678912 NR Description: expressed protein [Arabidopsis thaliana]
MKSVIFTEEKNLQRQNPLQKSEQQRRNFEMPSPPTTTSLSVTQTINGSHSFTIKGYSLAKGIGIGKHIASDTFTVGGYQWAIYFYPDGKNPEDNSAYVSVFIALASDGTDVRALFELSLLDQSGKGKHKVHSHFDRALESGPYTLKYRGSMWGYKRFFRRLMLETSDFLKDDCLKINCTVGVVVSEIDCPRLHSIHVPASDIGSHFGMLLENEDGSDITFNVSGEKFRAHRLVLAARSPVFESEFLDVTGEEDRDIEVTDMEPKVFKALLHYIYKDALIEDAESSSSSGSSVGPSASDTLAAKLLGAADKYKLPRLSLMCESVLCKDISVDSVANILALADRYNASALKSVCLKFAAENLIAVMRSDGFDYLREHCPSLQSELLKTVAGCEEELSGGGGKTRSVWGQFSDGGAETNGRQAQTWGDINGGAERSQSVWVEVVNANGSGRNNNDNNNSDDPMAELED

SEQ ID NO: 38880 - protein, 436 aa, Arabidopsis thaliana
  peptide (1)..(436): Ceres Seq. ID no. 13492198
  misc_feature (177)..(299): Pfam Name: BTB/POZ domain Pfam Description: BTB/POZ domain
  misc_feature (3)..(392): Homolog of NCBI NO: 23617108 NR Description: contains ESTs
  misc_feature (7)..(384): Homolog of NCBI NO: 14596183 NR Description: Unknown protein [Arabidopsis thaliana]
  misc_feature (1)..(392): Homolog of NCBI NO: 30691638 NR Description: expressed protein [Arabidopsis thaliana]
  misc_feature (1)..(392): Homolog of NCBI NO: 11282376 NR Description: hypothetical protein F23N14.80 - Arabidopsis
  misc_feature (7)..(392): Homolog of NCBI NO: 21536843 NR Description: unknown [Arabidopsis thaliana]
  misc_feature (7)..(392): Homolog of NCBI NO: 15242126 NR Description: expressed protein [Arabidopsis thaliana]
  misc_feature (1)..(392): Homolog of NCBI NO: 28269444 NR Description: unknown protein [Oryza sativa (japonica
  misc_feature (1)..(392): Homolog of NCBI NO: 34900034 NR Description: OJ1641_C04.24 [Oryza sativa (japonica
  misc_feature (1)..(436): Homolog of NCBI NO: 21536509 NR Description: unknown [Arabidopsis thaliana]
  misc_feature (1)..(436): Homolog of NCBI NO: 30678912 NR Description: expressed protein [Arabidopsis thaliana]
MPSPPTTTSLSVTQTINGSHSFTIKGYSLAKGIGIGKHIASDTFTVGGYQWAIYFYPDGKNPEDNSAYVSVFIALASDGTDVRALFELSLLDQSGKGKHKVHSHFDRALESGPYTLKYRGSMWGYKRFFRRLMLETSDFLKDDCLKINCTVGVVVSEIDCPRLHSIHVPASDIGSHFGMLLENEDGSDITFNVSGEKFRAHRLVLAARSPVFESEFLDVTGEEDRDIEVTDMEPKVFKALLHYIYKDALIEDAESSSSSGSSVGPSASDTLAAKLLGAADKYKLPRLSLMCESVLCKDISVDSVANILALADRYNASALKSVCLKFAAENLIAVMRSDGFDYLREHCPSLQSELLKTVAGCEEELSGGGGKTRSVWGQFSDGGAETNGRQAQTWGDINGGAERSQSVWVEVVNANGSGRNNNDNNNSDDPMAELED

SEQ ID NO: 38881 - protein, 315 aa, Arabidopsis thaliana
  peptide (1)..(315): Ceres Seq. ID no. 13492199
  misc_feature (56)..(178): Pfam Name: BTB/POZ domain Pfam Description: BTB/POZ domain
  misc_feature (1)..(271): Homolog of NCBI NO: 23617108 NR Description: contains ESTs
  misc_feature (1)..(263): Homolog of NCBI NO: 14596183 NR Description: Unknown protein [Arabidopsis thaliana]
  misc_feature (1)..(271): Homolog of NCBI NO: 30691638 NR Description: expressed protein [Arabidopsis thaliana]
  misc_feature (1)..(271): Homolog of NCBI NO: 11282376 NR Description: hypothetical protein F23N14.80 - Arabidopsis
  misc_feature (1)..(271): Homolog of NCBI NO: 21536843 NR Description: unknown [Arabidopsis thaliana]
  misc_feature (1)..(271): Homolog of NCBI NO: 15242126 NR Description: expressed protein [Arabidopsis thaliana]
  misc_feature (1)..(271): Homolog of NCBI NO: 28269444 NR Description: unknown protein [Oryza sativa (japonica
  misc_feature (1)..(271): Homolog of NCBI NO: 34900034 NR Description: OJ1641_C04.24 [Oryza sativa (japonica
  misc_feature (1)..(315): Homolog of NCBI NO: 21536509 NR Description: unknown [Arabidopsis thaliana]
  misc_feature (1)..(315): Homolog of NCBI NO: 30678912 NR Description: expressed protein [Arabidopsis thaliana]
MWGYKRFFRRLMLETSDFLKDDCLKINCTVGVVVSEIDCPRLHSIHVPASDIGSHFGMLLENEDGSDITFNVSGEKFRAHRLVLAARSPVFESEFLDVTGEEDRDIEVTDMEPKVFKALLHYIYKDALIEDAESSSSSGSSVGPSASDTLAAKLLGAADKYKLPRLSLMCESVLCKDISVDSVANILALADRYNASALKSVCLKFAAENLIAVMRSDGFDYLREHCPSLQSELLKTVAGCEEELSGGGGKTRSVWGQFSDGGAETNGRQAQTWGDINGGAERSQSVWVEVVNANGSGRNNNDNNNSDDPMAELED

SEQ ID NO: 38882 - DNA, 1171 bp, Arabidopsis thaliana
  misc_feature (1)..(1171): Ceres Seq. ID no. 13574986
  misc_feature: MA Experiment ID: 20000573 Result: Down-regulated in Transcription
  misc_feature: MA Experiment 20000573 PARAMETER Experiment Name: At_100uM_ABA_Mutants__P Parameter: Organism Value: A. thaliana
  misc_feature: MA Experiment 20000573 PARAMETER Experiment Name: At_100uM_ABA_Mutants__P Parameter: Plant Line Value: CS22 vs. Ler wt
  misc_feature: MA Experiment 20000573 PARAMETER Experiment Name: At_100uM_ABA_Mutants__P Parameter: Timepoint (hr) Value: N/A
  misc_feature: MA Experiment 20000573 PARAMETER Experiment Name: At_100uM_ABA_Mutants__P Parameter: Tissue Value: Whole Plant
  misc_feature: MA Experiment 20000573 PARAMETER Experiment Name: At_100uM_ABA_Mutants__P Parameter: Treatment Value: None
  misc_feature: MA Experiment ID: 20000574 Result: Down-regulated in Transcription
  misc_feature: MA Experiment 20000574 PARAMETER Experiment Name: At_100uM_ABA_Mutants__P Parameter: Organism Value: A. thaliana
  misc_feature: MA Experiment 20000574 PARAMETER Experiment Name: At_100uM_ABA_Mutants__P Parameter: Plant Line Value: CS23 vs. Ler wt
  misc_feature: MA Experiment 20000574 PARAMETER Experiment Name: At_100uM_ABA_Mutants__P Parameter: Timepoint (hr) Value: N/A
  misc_feature: MA Experiment 20000574 PARAMETER Experiment Name: At_100uM_ABA_Mutants__P Parameter: Tissue Value: Whole Plant
  misc_feature: MA Experiment 20000574 PARAMETER Experiment Name: At_100uM_ABA_Mutants__P Parameter: Treatment Value: None
atgtcatctctagccactgttgttgtctctttcctctgaatgcttagcagcgacagagctcgacgaagcagtaaaaccctagtagaataatggtgaagctcacggctgatttgatctggaaaagtcctcacttcttcaatgctatcaaggagcgagaattggatctacgaggtaacaagattcctgtaatcgaaaacttgggtgctactgaggaccagttcgataccattgatctgtctgataacgagatagttaagctagaaaacttcccatacctcaaccgtttaggaactttactcatcaataacaatcgtatcacccggataaatcctaaccttggagaattcctaccgaagcttcactctttggttcttacaaataacaggcttgtgaatttggttgagattgatccccttgcctccattcccaagctgcagtaccttagtttgttggataataatatcaccaaaaaggcaaattatcgcctttatgtgattcacaagctaaaatcacttcgagtactggatttcattaaaatcaaagccaaggagagagctgaagctgcatctttgttttcatccaaagaagcagaagaggaagttaaaaaggtttctcgggaggaggttaaaaaagtgtcagaaactgcagaaaatccagagactccgaaagtggtggcgccaacagcggagcaaatattagctatcaaggctgcaattatcaattctcagacgatagaagaaattgccagactcgaacaggctttgaagtttggacaggttcctgctggcctgataattcctgatccggccacaaatgactctgctcccatggaggaatagaaagcgtgactgttgcccctccaatcgttgtagctactgctccagaatgctcacagcaattgttttctctggcaatcctgtacggtttctgtcacttccttaggaactcatgcgcaacagttggaacctgtaaactatttactgctcgaggcatctgttttgaacccttaaaaagaatgccaaagaggattgtagtctttttaagtctctgcattggcatggagagcgagggtgcacacagaatttgcttatgctcttttcgcattagaatttcttcttagtattttgtatcttgtcactcaatatcatcaattaccgagaaactaatttag

SEQ ID NO: 38883 - protein, 249 aa, Arabidopsis thaliana
  peptide (1)..(249): Ceres Seq. ID no. 13574987
  misc_feature (1)..(231): Homolog of NCBI NO: 39595089 NR Description: Hypothetical protein CBG03669 [Caenorhabditis
  misc_feature (1)..(226): Homolog of NCBI NO: 3150128 NR Description: U2 snRNP-specific A' protein [Salmo salar]
  misc_feature (1)..(231): Homolog of NCBI NO: 3955033 NR Description: U2 snRNP-specific A' protein [Salmo salar]
  misc_feature (1)..(231): Homolog of NCBI NO: 7021537 NR Description: U2 small nuclear ribonucleoprotein A' [Mus
  misc_feature (1)..(249): Homolog of NCBI NO: 7263962 NR Description: bA395L14.12 (novel protein similar to small
  misc_feature (1)..(249): Homolog of NCBI NO: 4507121 NR Description: u2 small nuclear ribonucleoprotein polypeptide A'
  misc_feature (1)..(249): Homolog of NCBI NO: 31077165 NR Description: U2 small nuclear ribonucleoprotein A' (U2
  misc_feature (1)..(249): Homolog of NCBI NO: 34857187 NR Description: similar to U2 small nuclear ribonucleoprotein
  misc_feature (1)..(249): Homolog of NCBI NO: 322619 NR Description: U2 snRNP protein A' - Arabidopsis thaliana
  misc_feature (1)..(249): Homolog of NCBI NO: 15218274 NR Description: U2 small nuclear ribonucleoprotein A, putative
MVKLTADLIWKSPHFFNAIKERELDLRGNKIPVIENLGATEDQFDTIDLSDNEIVKLENFPYLNRLGTLLINNNRITRINPNLGEFLPKLHSLVLTNNRLVNLVEIDPLASIPKLQYLSLLDNNITKKANYRLYVIHKLKSLRVLDFIKIKAKERAEAASLFSSKEAEEEVKKVSREEVKKVSETAENPETPKVVAPTAEQILAIKAAIINSQTIEEIARLEQALKFGQVPAGLIIPDPATNDSAPMEE

SEQ ID NO: 38884 - DNA, 1135 bp, Arabidopsis thaliana; identical to SEQ ID NO: 29687
  misc_feature (1)..(1135): Ceres Seq. ID no. 12559930
  misc_feature: MA Experiment ID: 20000070 Result: Down-regulated in Transcription
  misc_feature: MA Experiment 20000070 PARAMETER Experiment Name: At_100uM_ABA_Mutants_cDNA_P Parameter: Plant Line Value: CS24
  misc_feature: MA Experiment 20000070 PARAMETER Experiment Name: At_100uM_ABA_Mutants_cDNA_P Parameter: Timepoint (hr) Value: 6
  misc_feature: MA Experiment 20000070 PARAMETER Experiment Name: At_100uM_ABA_Mutants_cDNA_P Parameter: Tissue Value: Aerial
  misc_feature: MA Experiment 20000070 PARAMETER Experiment Name: At_100uM_ABA_Mutants_cDNA_P Parameter: Treatment Value: 100uM ABA vs. No Treatment
  misc_feature: MA Experiment ID: 20000071 Result: Down-regulated in Transcription
  misc_feature: MA Experiment 20000071 PARAMETER Experiment Name: At_100uM_ABA_Mutants_cDNA_P Parameter: Plant Line Value: CS8104
  misc_feature: MA Experiment 20000071 PARAMETER Experiment Name: At_100uM_ABA_Mutants_cDNA_P Parameter: Timepoint (hr) Value: 6
  misc_feature: MA Experiment 20000071 PARAMETER Experiment Name: At_100uM_ABA_Mutants_cDNA_P Parameter: Tissue Value: Aerial
  misc_feature: MA Experiment 20000071 PARAMETER Experiment Name: At_100uM_ABA_Mutants_cDNA_P Parameter: Treatment Value: 100uM ABA vs. No Treatment
  misc_feature: MA Experiment ID: 20000086 Result: Down-regulated in Transcription
  misc_feature: MA Experiment 20000086 PARAMETER Experiment Name: At_100uM_ABA_Mutants_cDNA_P Parameter: Plant Line Value: CS22
  misc_feature: MA Experiment 20000086 PARAMETER Experiment Name: At_100uM_ABA_Mutants_cDNA_P Parameter: Timepoint (hr) Value: 6
  misc_feature: MA Experiment 20000086 PARAMETER Experiment Name: At_100uM_ABA_Mutants_cDNA_P Parameter: Tissue Value: Aerial
  misc_feature: MA Experiment 20000086 PARAMETER Experiment Name: At_100uM_ABA_Mutants_cDNA_P Parameter: Treatment Value: 100uM ABA vs. No Treatment
  misc_feature: MA Experiment ID: 20000087 Result: Down-regulated in Transcription
  misc_feature: MA Experiment 20000087 PARAMETER Experiment Name: At_100uM_ABA_Mutants_cDNA_P Parameter: Plant Line Value: WS
  misc_feature: MA Experiment 20000087 PARAMETER Experiment Name: At_100uM_ABA_Mutants_cDNA_P Parameter: Timepoint (hr) Value: 6
  misc_feature: MA Experiment 20000087 PARAMETER Experiment Name: At_100uM_ABA_Mutants_cDNA_P Parameter: Tissue Value: Aerial
  misc_feature: MA Experiment 20000087 PARAMETER Experiment Name: At_100uM_ABA_Mutants_cDNA_P Parameter: Treatment Value: 100uM ABA vs. No Treatment
  misc_feature: MA Experiment ID: 20000117 Result: Down-regulated in Transcription
  misc_feature: MA Experiment 20000117 PARAMETER Experiment Name: At_100uM_ABA_Mutants_cDNA_P Parameter: Plant Line Value: Columbia
  misc_feature: MA Experiment 20000117 PARAMETER Experiment Name: At_100uM_ABA_Mutants_cDNA_P Parameter: Timepoint (hr) Value: 6
  misc_feature: MA Experiment 20000117 PARAMETER Experiment Name: At_100uM_ABA_Mutants_cDNA_P Parameter: Tissue Value: Aerial
  misc_feature: MA Experiment 20000117 PARAMETER Experiment Name: At_100uM_ABA_Mutants_cDNA_P Parameter: Treatment Value: 100uM ABA vs. No Treatment
  misc_feature: MA Experiment ID: 20000180 Result: Up-regulated in Transcription
  misc_feature: MA Experiment 20000180 PARAMETER Experiment Name: At_Germinating_Seeds_P Parameter: Age (hr) Value: 24 vs. 0
  misc_feature: MA Experiment 20000180 PARAMETER Experiment Name: At_Germinating_Seeds_P Parameter: Tissue Value: Germinating Seeds
  misc_feature: MA Experiment ID: 20000185 Result: Down-regulated in Transcription
  misc_feature: MA Experiment 20000185 PARAMETER Experiment Name: At_Roots__P Parameter: Age (day) Value: 7 vs. 21
  misc_feature: MA Experiment 20000185 PARAMETER Experiment Name: At_Roots__P Parameter: Organism Value: A. thaliana
  misc_feature: MA Experiment 20000185 PARAMETER Experiment Name: At_Roots__P Parameter: Tissue Value: Roots vs. Whole Plant
  misc_feature: MA Experiment ID: 20000234 Result: Up-regulated in Transcription
  misc_feature: MA Experiment 20000234 PARAMETER Experiment Name: At_Siliques_P Parameter: Age (day) Value: 21
  misc_feature: MA Experiment 20000234 PARAMETER Experiment Name: At_Siliques_P Parameter: Organism Value: A. thaliana
  misc_feature: MA Experiment 20000234 PARAMETER Experiment Name: At_Siliques_P Parameter: Plant Line Value: WS
  misc_feature: MA Experiment 20000234 PARAMETER Experiment Name: At_Siliques_P Parameter: Tissue Value: Less Than 5mm Siliques vs. Whole Plant
  misc_feature: MA Experiment ID: 20000436 Result: Down-regulated in Transcription
  misc_feature: MA Experiment 20000436 PARAMETER Experiment Name: At_Drought_P Parameter: Age (day) Value: 7
  misc_feature: MA Experiment 20000436 PARAMETER Experiment Name: At_Drought_P Parameter: Organism Value: A. thaliana
  misc_feature: MA Experiment 20000436 PARAMETER Experiment Name: At_Drought_P Parameter: Plant Line Value: WS
  misc_feature: MA Experiment 20000436 PARAMETER Experiment Name: At_Drought_P Parameter: Timepoint (hr) Value: 12
  misc_feature: MA Experiment 20000436 PARAMETER Experiment Name: At_Drought_P Parameter: Tissue Value: Whole Plant
  misc_feature: MA Experiment 20000436 PARAMETER Experiment Name: At_Drought_P Parameter: Treatment Value: Drought vs. No Drought
  misc_feature: MA Experiment ID: 20000437 Result: Down-regulated in Transcription
  misc_feature: MA Experiment 20000437 PARAMETER Experiment Name: At_Drought_P Parameter: Age (day) Value: 8
  misc_feature: MA Experiment 20000437 PARAMETER Experiment Name: At_Drought_P Parameter: Organism Value: A. thaliana
  misc_feature: MA Experiment 20000437 PARAMETER Experiment Name: At_Drought_P Parameter: Plant Line Value: WS
  misc_feature: MA Experiment 20000437 PARAMETER Experiment Name: At_Drought_P Parameter: Timepoint (hr) Value: 24
  misc_feature: MA Experiment 20000437 PARAMETER Experiment Name: At_Drought_P Parameter: Tissue Value: Whole Plant
  misc_feature: MA Experiment 20000437 PARAMETER Experiment Name: At_Drought_P Parameter: Treatment Value: Drought vs. No Drought
  misc_feature: MA Experiment ID: 20000438 Result: Up-regulated in Transcription
  misc_feature: MA Experiment 20000438 PARAMETER Experiment Name: At_Shoots__P Parameter: Age (day) Value: 14
  misc_feature: MA Experiment 20000438 PARAMETER Experiment Name: At_Shoots__P Parameter: Tissue Value: Shoots vs. Whole Plant
  misc_feature: MA Experiment ID: 20000439 Result: Down-regulated in Transcription
  misc_feature: MA Experiment 20000439 PARAMETER Experiment Name: At_Roots__P Parameter: Age (day) Value: 14 vs. 21
  misc_feature: MA Experiment 20000439 PARAMETER Experiment Name: At_Roots__P Parameter: Organism Value: A. thaliana
  misc_feature: MA Experiment 20000439 PARAMETER Experiment Name: At_Roots__P Parameter: Tissue Value: Roots vs. Whole Plant
  misc_feature: MA Experiment ID: 20000794 Result: Down-regulated in Transcription
  misc_feature: MA Experiment 20000794 PARAMETER Experiment Name: At_Petals_P Parameter: Age (day) Value: 23-25 days
  misc_feature: MA Experiment 20000794 PARAMETER Experiment Name: At_Petals_P Parameter: Plant Line Value: WS
  misc_feature: MA Experiment 20000794 PARAMETER Experiment Name: At_Petals_P Parameter: Tissue Value: Petals vs. Whole plant
  misc_feature: MA Experiment ID: 20001450 Result: Down-regulated in Transcription
  misc_feature: MA Experiment 20001450 PARAMETER Experiment Name: At_Far-red-induction_P Parameter: Age (day) Value: 7
  misc_feature: MA Experiment 20001450 PARAMETER Experiment Name: At_Far-red-induction_P Parameter: Light Value: Far-red vs. White
  misc_feature: MA Experiment 20001450 PARAMETER Experiment Name: At_Far-red-induction_P Parameter: Organism Value: A. thaliana
  misc_feature: MA Experiment 20001450 PARAMETER Experiment Name: At_Far-red-induction_P Parameter: Plant Line Value: Columbia
  misc_feature: MA Experiment 20001450 PARAMETER Experiment Name: At_Far-red-induction_P Parameter: Timepoint (hr) Value: 8
  misc_feature: MA Experiment 20001450 PARAMETER Experiment Name: At_Far-red-induction_P Parameter: Tissue Value: Whole Plant
  misc_feature: MA Experiment ID: 20001757 Result: Up-regulated in Transcription
  misc_feature: MA Experiment 20001757 PARAMETER Experiment Name: At_50mM_NH4NO3_L-to-H_P Parameter: Timepoint (hr) Value: 6
  misc_feature: MA Experiment 20001757 PARAMETER Experiment Name: At_50mM_NH4NO3_L-to-H_P Parameter: Tissue Value: Leaf
  misc_feature: MA Experiment 20001757 PARAMETER Experiment Name: At_50mM_NH4NO3_L-to-H_P Parameter: Treatment Value: 50mM NH4NO3 vs 100mM Mannitol
  misc_feature: MA Experiment ID: 20001905 Result: Down-regulated in Transcription
  misc_feature: MA Experiment 20001905 PARAMETER Experiment Name: At_Drought_Reproduction_P Parameter: Age (day) Value: 40
  misc_feature: MA Experiment 20001905 PARAMETER Experiment Name: At_Drought_Reproduction_P Parameter: Organism Value: A. thaliana
  misc_feature: MA Experiment 20001905 PARAMETER Experiment Name: At_Drought_Reproduction_P Parameter: Plant Line Value: WS
  misc_feature: MA Experiment 20001905 PARAMETER Experiment Name: At_Drought_Reproduction_P Parameter: Timepoint (day) Value: 10
  misc_feature: MA Experiment 20001905 PARAMETER Experiment Name: At_Drought_Reproduction_P Parameter: Tissue Value: Rosettes
  misc_feature: MA Experiment 20001905 PARAMETER Experiment Name: At_Drought_Reproduction_P Parameter: Treatment Value: Drought vs. No Drought
  misc_feature: MA Experiment ID: 20001906 Result: Down-regulated in Transcription
  misc_feature: MA Experiment 20001906 PARAMETER Experiment Name: At_Drought_Reproduction_P Parameter: Age (day) Value: 35
  misc_feature: MA Experiment 20001906 PARAMETER Experiment Name: At_Drought_Reproduction_P Parameter: Organism Value: A. thaliana
  misc_feature: MA Experiment 20001906 PARAMETER Experiment Name: At_Drought_Reproduction_P Parameter: Plant Line Value: WS
  misc_feature: MA Experiment 20001906 PARAMETER Experiment Name: At_Drought_Reproduction_P Parameter: Timepoint (day) Value: 5
  misc_feature: MA Experiment 20001906 PARAMETER Experiment Name: At_Drought_Reproduction_P Parameter: Tissue Value: Siliques
  misc_feature: MA Experiment 20001906 PARAMETER Experiment Name: At_Drought_Reproduction_P Parameter: Treatment Value: Drought vs. No Drought
  misc_feature: MA Experiment ID: 20001911 Result: Down-regulated in Transcription
  misc_feature: MA Experiment 20001911 PARAMETER Experiment Name: At_Drought_Reproduction_P Parameter: Age (day) Value: 40
  misc_feature: MA Experiment 20001911 PARAMETER Experiment Name: At_Drought_Reproduction_P Parameter: Organism Value: A. thaliana
  misc_feature: MA Experiment 20001911 PARAMETER Experiment Name: At_Drought_Reproduction_P Parameter: Plant Line Value: WS
  misc_feature: MA Experiment 20001911 PARAMETER Experiment Name: At_Drought_Reproduction_P Parameter: Timepoint (day) Value: 10
  misc_feature: MA Experiment 20001911 PARAMETER Experiment Name: At_Drought_Reproduction_P Parameter: Tissue Value: Flowers
  misc_feature: MA Experiment 20001911 PARAMETER Experiment Name: At_Drought_Reproduction_P Parameter: Treatment Value: Drought vs. No Drought

SEQ ID NO: 38885 - protein, 269 aa, Arabidopsis thaliana; identical to SEQ ID NO: 24385
  peptide (1)..(269): Ceres Seq. ID no. 12559931
  misc_feature (94)..(165): Pfam Name: RNA recognition motif. (a.k.a. RRM, RBD, or RNP domain) Pfam Description: RNA recognition motif. (a.k.a. RRM, RBD, or RNP
  misc_feature (94)..(165): Pfam Name: RNA recognition motif. (a.k.a. RRM, RBD, or RNP domain) Pfam Description: RNA recognition motif. (a.k.a. RRM, RBD, or RNP
  misc_feature (76)..(269): Homolog of NCBI NO: 1076509 NR Description: RNA-binding protein RNP1 precursor - kidney bean
  misc_feature (76)..(269): Homolog of NCBI NO: 7446342 NR Description: RNA-binding protein precursor, 33K - wood tobacco
  misc_feature (76)..(269): Homolog of NCBI NO: 681912 NR Description: cp33 [Arabidopsis thaliana]
  misc_feature (66)..(269): Homolog of NCBI NO: 34913270 NR Description: putative ribonucleoprotein
  misc_feature (76)..(269): Homolog of NCBI NO: 17064758 NR Description: ubiquitin / ribosomal protein CEP52 [Arabidopsis
  misc_feature (76)..(269): Homolog of NCBI NO: 1076509 NR Description: RNA-binding protein RNP1 precursor - kidney bean
  misc_feature (76)..(269): Homolog of NCBI NO: 681912 NR Description: cp33 [Arabidopsis thaliana]
  misc_feature (76)..(269): Homolog of NCBI NO: 17064758 NR Description: ubiquitin / ribosomal protein CEP52 [Arabidopsis
  misc_feature (17)..(269): Homolog of NCBI NO: 30693595 NR Description: RNA recognition motif (RRM)-containing protein
  misc_feature (17)..(266): Homolog of NCBI NO: 11357772 NR Description: hypothetical protein F4F15.260 - Arabidopsis
  misc_feature (26)..(269): Homolog of NCBI NO: 7578881 NR Description: plastid-specific ribosomal protein 2 precursor
  misc_feature (18)..(269): Homolog of NCBI NO: 18921322 NR Description: putative ribonucleoprotein [Oryza sativa]
  misc_feature (76)..(269): Homolog of NCBI NO: 15231200 NR Description: chloroplast RNA-binding protein cp33
  misc_feature (66)..(269): Homolog of NCBI NO: 34913270 NR Description: putative ribonucleoprotein
  misc_feature (76)..(269): Homolog of NCBI NO: 7446342 NR Description: RNA-binding protein precursor, 33K - wood tobacco
  misc_feature (76)..(269): Homolog of NCBI NO: 15231200 NR Description: chloroplast RNA-binding protein cp33
  misc_feature (18)..(269): Homolog of NCBI NO: 18921322 NR Description: putative ribonucleoprotein [Oryza sativa]
  misc_feature (26)..(269): Homolog of NCBI NO: 7578881 NR Description: plastid-specific ribosomal protein 2 precursor
  misc_feature (17)..(266): Homolog of NCBI NO: 11357772 NR Description: hypothetical protein F4F15.260 - Arabidopsis
  misc_feature (17)..(269): Homolog of NCBI NO: 30693595 NR Description: RNA recognition motif (RRM)-containing protein

SEQ ID NO: 38886 - protein, 253 aa, Arabidopsis thaliana; identical to SEQ ID NO: 24386
  peptide (1)..(253): Ceres Seq. ID no. 12559932
  misc_feature (78)..(149): Pfam Name: RNA recognition motif. (a.k.a. RRM, RBD, or RNP domain) Pfam Description: RNA recognition motif. (a.k.a. RRM, RBD, or RNP
  misc_feature (78)..(149): Pfam Name: RNA recognition motif. (a.k.a. RRM, RBD, or RNP domain) Pfam Description: RNA recognition motif. (a.k.a. RRM, RBD, or RNP
  misc_feature (60)..(253): Homolog of NCBI NO: 1076509 NR Description: RNA-binding protein RNP1 precursor - kidney bean
  misc_feature (60)..(253): Homolog of NCBI NO: 7446342 NR Description: RNA-binding protein precursor, 33K - wood tobacco
  misc_feature (60)..(253): Homolog of NCBI NO: 681912 NR Description: cp33 [Arabidopsis thaliana]
  misc_feature (50)..(253): Homolog of NCBI NO: 34913270 NR Description: putative ribonucleoprotein
  misc_feature (60)..(253): Homolog of NCBI NO: 17064758 NR Description: ubiquitin / ribosomal protein CEP52 [Arabidopsis
  misc_feature (60)..(253): Homolog of NCBI NO: 1076509 NR Description: RNA-binding protein RNP1 precursor - kidney bean
  misc_feature (60)..(253): Homolog of NCBI NO: 681912 NR Description: cp33 [Arabidopsis thaliana]
  misc_feature (60)..(253): Homolog of NCBI NO: 17064758 NR Description: ubiquitin / ribosomal protein CEP52 [Arabidopsis
  misc_feature (1)..(253): Homolog of NCBI NO: 30693595 NR Description: RNA recognition motif (RRM)-containing protein
  misc_feature (1)..(250): Homolog of NCBI NO: 11357772 NR Description: hypothetical protein F4F15.260 - Arabidopsis
  misc_feature (10)..(253): Homolog of NCBI NO: 7578881 NR Description: plastid-specific ribosomal protein 2 precursor
  misc_feature (2)..(253): Homolog of NCBI NO: 18921322 NR Description: putative ribonucleoprotein [Oryza sativa]
  misc_feature (60)..(253): Homolog of NCBI NO: 15231200 NR Description: chloroplast RNA-binding protein cp33
  misc_feature (50)..(253): Homolog of NCBI NO: 34913270 NR Description: putative ribonucleoprotein
  misc_feature (60)..(253): Homolog of NCBI NO: 7446342 NR Description: RNA-binding protein precursor, 33K - wood tobacco
  misc_feature (60)..(253): Homolog of NCBI NO: 15231200 NR Description: chloroplast RNA-binding protein cp33
  misc_feature (2)..(253): Homolog of NCBI NO: 18921322 NR Description: putative ribonucleoprotein [Oryza sativa]
  misc_feature (10)..(253): Homolog of NCBI NO: 7578881 NR Description: plastid-specific ribosomal protein 2 precursor
  misc_feature (1)..(250): Homolog of NCBI NO: 11357772 NR Description: hypothetical protein F4F15.260 - Arabidopsis
  misc_feature (1)..(253): Homolog of NCBI NO: 30693595 NR Description: RNA recognition motif (RRM)-containing protein

SEQ ID NO: 38887 - protein, 146 aa, Arabidopsis thaliana; identical to SEQ ID NO: 24387
  peptide (1)..(146): Ceres Seq. ID no. 12559933
  misc_feature (72)..(143): Pfam Name: RNA recognition motif. (a.k.a. RRM, RBD, or RNP domain) Pfam Description: RNA recognition motif. (a.k.a. RRM, RBD, or RNP
  misc_feature (72)..(143): Pfam Name: RNA recognition motif. (a.k.a. RRM, RBD, or RNP domain) Pfam Description: RNA recognition motif. (a.k.a. RRM, RBD, or RNP
  misc_feature (1)..(146): Homolog of NCBI NO: 1076509 NR Description: RNA-binding protein RNP1 precursor - kidney bean
  misc_feature (1)..(146): Homolog of NCBI NO: 7446342 NR Description: RNA-binding protein precursor, 33K - wood tobacco
  misc_feature (1)..(146): Homolog of NCBI NO: 681912 NR Description: cp33 [Arabidopsis thaliana]
  misc_feature (1)..(146): Homolog of NCBI NO: 34913270 NR Description: putative ribonucleoprotein
  misc_feature (1)..(146): Homolog of NCBI NO: 17064758 NR Description: ubiquitin / ribosomal protein CEP52 [Arabidopsis
  misc_feature (1)..(146): Homolog of NCBI NO: 1076509 NR Description: RNA-binding protein RNP1 precursor - kidney bean
  misc_feature (1)..(146): Homolog of NCBI NO: 681912 NR Description: cp33 [Arabidopsis thaliana]
  misc_feature (1)..(146): Homolog of NCBI NO: 17064758 NR Description: ubiquitin / ribosomal protein CEP52 [Arabidopsis
  misc_feature (1)..(146): Homolog of NCBI NO: 30693595 NR Description: RNA recognition motif (RRM)-containing protein
  misc_feature (1)..(143): Homolog of NCBI NO: 11357772 NR Description: hypothetical protein F4F15.260 - Arabidopsis
  misc_feature (1)..(146): Homolog of NCBI NO: 7578881 NR Description: plastid-specific ribosomal protein 2 precursor
  misc_feature (1)..(146): Homolog of NCBI NO: 18921322 NR Description: putative ribonucleoprotein [Oryza sativa]
  misc_feature (1)..(146): Homolog of NCBI NO: 15231200 NR Description: chloroplast RNA-binding protein cp33
  misc_feature (1)..(146): Homolog of NCBI NO: 34913270 NR Description: putative ribonucleoprotein
  misc_feature (1)..(146): Homolog of NCBI NO: 7446342 NR Description: RNA-binding protein precursor, 33K - wood tobacco
  misc_feature (1)..(146): Homolog of NCBI NO: 15231200 NR Description: chloroplast RNA-binding protein cp33
  misc_feature (1)..(146): Homolog of NCBI NO: 18921322 NR Description: putative ribonucleoprotein [Oryza sativa]
  misc_feature (1)..(146): Homolog of NCBI NO: 7578881 NR Description: plastid-specific ribosomal protein 2 precursor
  misc_feature (1)..(143): Homolog of NCBI NO: 11357772 NR Description: hypothetical protein F4F15.260 - Arabidopsis
  misc_feature (1)..(146): Homolog of NCBI NO: 30693595 NR Description: RNA recognition motif (RRM)-containing protein

SEQ ID NO: 38888 - DNA, 1115 bp, Arabidopsis thaliana
  misc_feature (1)..(1115): Ceres Seq. ID no. 12339130
  misc_feature: MA Experiment ID: 108501 Result: Down-regulated in Transcription
  misc_feature: MA Experiment 108501 PARAMETER Experiment Name: At_ap2_floral_buds_cDNA_P Parameter: Plant Line Value: ap2 (Ler.)
  misc_feature: MA Experiment 108501 PARAMETER Experiment Name: At_ap2_floral_buds_cDNA_P Parameter: Tissue Value: Closed Flower
  misc_feature: MA Experiment ID: 108594 Result: Down-regulated in Transcription
  misc_feature: MA Experiment 108594 PARAMETER Experiment Name: At_Ler-rhl_Root_cDNA_P Parameter: Plant Line Value: null
  misc_feature: MA Experiment ID: 108668 Result: Up-regulated in Transcription
  misc_feature: MA Experiment 108668 PARAMETER Experiment Name: At_2mM_SA_cDNA_P Parameter: Plant Line Value: WS
  misc_feature: MA Experiment 108668 PARAMETER Experiment Name: At_2mM_SA_cDNA_P Parameter: Timepoint (hr) Value: 6
  misc_feature: MA Experiment 108668 PARAMETER Experiment Name: At_2mM_SA_cDNA_P Parameter: Treatment Value: 2mM SA vs. No Treatment
  misc_feature: MA Experiment ID: 20000068 Result: Down-regulated in Transcription
  misc_feature: MA Experiment ID: 20000090 Result: Up-regulated in Transcription
  misc_feature: MA Experiment ID: 20000111 Result: Down-regulated in Transcription
  misc_feature: MA Experiment 20000111 PARAMETER Experiment Name: At_42deg_Heat_cDNA_P Parameter: Temperature (deg C) Value: 42 vs. 22
  misc_feature: MA Experiment 20000111 PARAMETER Experiment Name: At_42deg_Heat_cDNA_P Parameter: Timepoint (hr) Value: 6
  misc_feature: MA Experiment 20000111 PARAMETER Experiment Name: At_42deg_Heat_cDNA_P Parameter: Tissue Value: Aerial
  misc_feature: MA Experiment ID: 20000182 Result: Up-regulated in Transcription
  misc_feature: MA Experiment 20000182 PARAMETER Experiment Name: At_2mM_SA_P Parameter: Age (day) Value: 14
  misc_feature: MA Experiment 20000182 PARAMETER Experiment Name: At_2mM_SA_P Parameter: Organism Value: A. thaliana
  misc_feature: MA Experiment 20000182 PARAMETER Experiment Name: At_2mM_SA_P Parameter: Plant Line Value: WS
  misc_feature: MA Experiment 20000182 PARAMETER Experiment Name: At_2mM_SA_P Parameter: Timepoint (hr) Value: 6
  misc_feature: MA Experiment 20000182 PARAMETER Experiment Name: At_2mM_SA_P Parameter: Tissue Value: Aerial
  misc_feature: MA Experiment 20000182 PARAMETER Experiment Name: At_2mM_SA_P Parameter: Treatment Value: 2mM SA vs. No Treatment
  misc_feature: MA Experiment ID: 20000184 Result: Down-regulated in Transcription
  misc_feature: MA Experiment 20000184 PARAMETER Experiment Name: At_Shoots__P Parameter: Age (day) Value: 7
  misc_feature: MA Experiment 20000184 PARAMETER Experiment Name: At_Shoots__P Parameter: Tissue Value: Shoots vs. Whole Plant
  misc_feature: MA Experiment ID: 20000264 Result: Down-regulated in Transcription
  misc_feature: MA Experiment 20000264 PARAMETER Experiment Name: At_Open_Flower_P Parameter: Age (day) Value: 21
  misc_feature: MA Experiment 20000264 PARAMETER Experiment Name: At_Open_Flower_P Parameter: Plant Line Value: WS
  misc_feature: MA Experiment 20000264 PARAMETER Experiment Name: At_Open_Flower_P Parameter: Tissue Value: Open Flower vs. Whole Plant
  misc_feature: MA Experiment ID: 20000265 Result: Down-regulated in Transcription
  misc_feature: MA Experiment 20000265 PARAMETER Experiment Name: At_Open_Flower_P Parameter: Age (day) Value: 21
  misc_feature: MA Experiment 20000265 PARAMETER Experiment Name: At_Open_Flower_P Parameter: Plant Line Value: WS
  misc_feature: MA Experiment 20000265 PARAMETER Experiment Name: At_Open_Flower_P Parameter: Tissue Value: Closed Flower vs. Whole Plant
  misc_feature: MA Experiment ID: 20000286 Result: Down-regulated in Transcription
  misc_feature: MA Experiment 20000286 PARAMETER Experiment Name: At_Open_Flower_P Parameter: Age (day) Value: 21
  misc_feature: MA Experiment 20000286 PARAMETER Experiment Name: At_Open_Flower_P Parameter: Plant Line Value: WS
  misc_feature: MA Experiment 20000286 PARAMETER Experiment Name: At_Open_Flower_P Parameter: Tissue Value: Half Open vs. Whole Plant
  misc_feature: MA Experiment ID: 20000438 Result: Down-regulated in Transcription
  misc_feature: MA Experiment 20000438 PARAMETER Experiment Name: At_Shoots__P Parameter: Age (day) Value: 14
  misc_feature: MA Experiment 20000438 PARAMETER Experiment Name: At_Shoots__P Parameter: Tissue Value: Shoots vs. Whole Plant
  misc_feature: MA Experiment ID: 20000460 Result: Down-regulated in Transcription
  misc_feature: MA Experiment 20000460 PARAMETER Experiment Name: At_10percent_PEG_P Parameter: Age (day) Value: 12
  misc_feature: MA Experiment 20000460 PARAMETER Experiment Name: At_10percent_PEG_P Parameter: Organism Value: A. thaliana
  misc_feature: MA Experiment 20000460 PARAMETER Experiment Name: At_10percent_PEG_P Parameter: Plant Line Value: WS
  misc_feature: MA Experiment 20000460 PARAMETER Experiment Name: At_10percent_PEG_P Parameter: Timepoint (day) Value: 12
  misc_feature: MA Experiment 20000460 PARAMETER Experiment Name: At_10percent_PEG_P Parameter: Tissue Value: Whole Plant
  misc_feature: MA Experiment 20000460 PARAMETER Experiment Name: At_10percent_PEG_P Parameter: Treatment Value: 10percent PEG vs. No Treatment
  misc_feature: MA Experiment ID: 20000495 Result: Down-regulated in Transcription
  misc_feature: MA Experiment 20000495 PARAMETER Experiment Name: At_Guard_Cells_P Parameter: Harvest Date Value: 8/2/2002
  misc_feature: MA Experiment 20000495 PARAMETER Experiment Name: At_Guard_Cells_P Parameter: Organism Value: A. thaliana
  misc_feature: MA Experiment 20000495 PARAMETER Experiment Name: At_Guard_Cells_P Parameter: Tissue Value: Guard Cells vs. Leaves
  misc_feature: MA Experiment ID: 20000527 Result: Down-regulated in Transcription
  misc_feature: MA Experiment 20000527 PARAMETER Experiment Name: At_10percent_PEG_P Parameter: Age (day) Value: 20
  misc_feature: MA Experiment 20000527 PARAMETER Experiment Name: At_10percent_PEG_P Parameter: Organism Value: A. thaliana
  misc_feature: MA Experiment 20000527 PARAMETER Experiment Name: At_10percent_PEG_P Parameter: Plant Line Value: WS
  misc_feature: MA Experiment 20000527 PARAMETER Experiment Name: At_10percent_PEG_P Parameter: Timepoint (day) Value: 20
  misc_feature: MA Experiment 20000527 PARAMETER Experiment Name: At_10percent_PEG_P Parameter: Tissue Value: Whole Plant
  misc_feature: MA Experiment 20000527 PARAMETER Experiment Name: At_10percent_PEG_P Parameter: Treatment Value: 10percent PEG vs. No Treatment
  misc_feature: MA Experiment ID: 20000573 Result: Up-regulated in Transcription
  misc_feature: MA Experiment 20000573 PARAMETER Experiment Name: At_100uM_ABA_Mutants__P Parameter: Organism Value: A. thaliana
  misc_feature: MA Experiment 20000573 PARAMETER Experiment Name: At_100uM_ABA_Mutants__P Parameter: Plant Line Value: CS22 vs. Ler wt
  misc_feature: MA Experiment 20000573 PARAMETER Experiment Name: At_100uM_ABA_Mutants__P Parameter: Timepoint (hr) Value: N/A
  misc_feature: MA Experiment 20000573 PARAMETER Experiment Name: At_100uM_ABA_Mutants__P Parameter: Tissue Value: Whole Plant
  misc_feature: MA Experiment 20000573 PARAMETER Experiment Name: At_100uM_ABA_Mutants__P Parameter: Treatment Value: None
  misc_feature: MA Experiment ID: 20000574 Result: Up-regulated in Transcription
  misc_feature: MA Experiment 20000574 PARAMETER Experiment Name: At_100uM_ABA_Mutants__P Parameter: Organism Value: A. thaliana
  misc_feature: MA Experiment 20000574 PARAMETER Experiment Name: At_100uM_ABA_Mutants__P Parameter: Plant Line Value: CS23 vs. Ler wt
  misc_feature: MA Experiment 20000574 PARAMETER Experiment Name: At_100uM_ABA_Mutants__P Parameter: Timepoint (hr) Value: N/A
  misc_feature: MA Experiment 20000574 PARAMETER Experiment Name: At_100uM_ABA_Mutants__P Parameter: Tissue Value: Whole Plant
  misc_feature: MA Experiment 20000574 PARAMETER Experiment Name: At_100uM_ABA_Mutants__P Parameter: Treatment Value: None
  misc_feature: MA Experiment ID: 20000794 Result: Down-regulated in Transcription
  misc_feature: MA Experiment 20000794 PARAMETER Experiment Name: At_Petals_P Parameter: Age (day) Value: 23-25 days
  misc_feature: MA Experiment 20000794 PARAMETER Experiment Name: At_Petals_P Parameter: Plant Line Value: WS
  misc_feature: MA Experiment 20000794 PARAMETER Experiment Name: At_Petals_P Parameter: Tissue Value: Petals vs. Whole plant
  misc_feature: MA Experiment ID: 20001557 Result: Down-regulated in Transcription
  misc_feature: MA Experiment 20001557 PARAMETER Experiment Name: At_Drought_Soil_Dry_P Parameter: Age (day) Value: 27
  misc_feature: MA Experiment 20001557 PARAMETER Experiment Name: At_Drought_Soil_Dry_P Parameter: Organism Value: A. thaliana
  misc_feature: MA Experiment 20001557 PARAMETER Experiment Name: At_Drought_Soil_Dry_P Parameter: Plant Line Value: WS
  misc_feature: MA Experiment 20001557 PARAMETER Experiment Name: At_Drought_Soil_Dry_P Parameter: Post Timepoint (hr) Value: 3
  misc_feature: MA Experiment 20001557 PARAMETER Experiment Name: At_Drought_Soil_Dry_P Parameter: Post-Treatment Value: Re-Water vs. No Drought
  misc_feature: MA Experiment 20001557 PARAMETER Experiment Name: At_Drought_Soil_Dry_P Parameter: Timepoint (day) Value: 13
  misc_feature: MA Experiment 20001557 PARAMETER Experiment Name: At_Drought_Soil_Dry_P Parameter: Treatment Value: Drought vs. No Drought
  misc_feature: MA Experiment ID: 20001558 Result: Down-regulated in Transcription
  misc_feature: MA Experiment 20001558 PARAMETER Experiment Name: At_Drought_Soil_Dry_P Parameter: Age (day) Value: 27
  misc_feature: MA Experiment 20001558 PARAMETER Experiment Name: At_Drought_Soil_Dry_P Parameter: Organism Value: A. thaliana
  misc_feature: MA Experiment 20001558 PARAMETER Experiment Name: At_Drought_Soil_Dry_P Parameter: Plant Line Value: WS
  misc_feature: MA Experiment 20001558 PARAMETER Experiment Name: At_Drought_Soil_Dry_P Parameter: Post Timepoint (hr) Value: 6
  misc_feature: MA Experiment 20001558 PARAMETER Experiment Name: At_Drought_Soil_Dry_P Parameter: Post-Treatment Value: Re-Water vs. No Drought
  misc_feature: MA Experiment 20001558 PARAMETER Experiment Name: At_Drought_Soil_Dry_P Parameter: Timepoint (day) Value: 13
  misc_feature: MA Experiment 20001558 PARAMETER Experiment Name: At_Drought_Soil_Dry_P Parameter: Treatment Value: Drought vs. No Drought
  misc_feature: MA Experiment ID: 20001560 Result: Down-regulated in Transcription
  misc_feature: MA Experiment 20001560 PARAMETER Experiment Name: At_Drought_Soil_Dry_P Parameter: Age (day) Value: 28
  misc_feature: MA Experiment 20001560 PARAMETER Experiment Name: At_Drought_Soil_Dry_P Parameter: Organism Value: A. thaliana
  misc_feature: MA Experiment 20001560 PARAMETER Experiment Name: At_Drought_Soil_Dry_P Parameter: Plant Line Value: WS
  misc_feature: MA Experiment 20001560 PARAMETER Experiment Name: At_Drought_Soil_Dry_P Parameter: Post Timepoint (hr) Value: None
  misc_feature: MA Experiment 20001560 PARAMETER Experiment Name: At_Drought_Soil_Dry_P Parameter: Post-Treatment Value: None
  misc_feature: MA Experiment 20001560 PARAMETER Experiment Name: At_Drought_Soil_Dry_P Parameter: Timepoint (day) Value: 14
  misc_feature: MA Experiment 20001560 PARAMETER Experiment Name: At_Drought_Soil_Dry_P Parameter: Treatment Value: Drought vs. No Drought
gttacaaacaaatattttaagaaaaatccccaaccccagagaaacccttcatcttccatcatctttcttattcaatctgcaaaaattccaagattcatggctacaacaagacttaacccctcttgccactttccagcgagcacaagactctcttgcgagagctatctcggtctgagaacgaccgggaggattagttatgcccgaaccctaactgctccacgtggctatcttgctgtaaaagcaaacggtggtcaagcttccgtggtgactgcggcggctataacggagaagcaacaaaagaagtatccaggagaatcaaagggttttgtggaggagatgagattcgtggcgatgagattgcatacgaaagatcaagcaagggaaggagaaaaagaatctagatctccagaggaaggtccggtggcgaaatgggagccgactgtggaaggatacttacattttcttgtggatagtaagttggtttacgacacgcttgaagggatcattgatggatccaatttcccaacttatgctggtttcaagaacacgggattagaaagagcagagagtttgcggaaagatttggagtggttcaaggaacaaggttatgagattccagagccaatggctcctggtaaaacatattctgagtatttaaaagatttagcagagaatgatcctcaagcattcatttgtcacttctacaacatttactttgctcatagcgccggtggccagatgattggaacaaaggtatctaagaagatactagataataaagaactcgagttctataaatgggacggtcaactttctcagttgttgcaaaatgtgaggcaaaaactgaacaaagttgcagagtggtggacaagagaagaaaagagtcattgcttggaagagactgagaaatcgtttaagttttcaggggagattcttcgactcatattgtcctgatttgattcataaaccttcagatcttcaatagtcaataaagccttctgctagtttcgtggaaccaatacgatttaagaggtttgtatgtgaaataactatgtgactattgtattaatgcgtaaaacatatcataataaccaaactataaaattattttcgtg

SEQ ID NO: 38889 - protein, 317 aa, Arabidopsis thaliana
  peptide (1)..(317): Ceres Seq. ID no. 12339132
  misc_feature (113)..(314): Pfam Name: Heme oxygenase Pfam Description: Heme oxygenase
  misc_feature (88)..(317): Homolog of NCBI NO: 14485575 NR Description: heme oxygenase 1 [Lycopersicon esculentum]
  misc_feature (87)..(317): Homolog of NCBI NO: 15076863 NR Description: putative heme oxygenase 1 precursor [Pisum
  misc_feature (33)..(317): Homolog of NCBI NO: 14485565 NR Description: heme oxygenase 4 [Arabidopsis thaliana]
  misc_feature (33)..(317): Homolog of NCBI NO: 15217926 NR Description: plastid heme oxygenase, putative; protein id:
  misc_feature (88)..(317): Homolog of NCBI NO: 14030647 NR Description: At2g26670/F18A8.4 [Arabidopsis thaliana]
  misc_feature (77)..(317): Homolog of NCBI NO: 21450864 NR Description: putative heme oxygenase HO1 [Arabidopsis thaliana]
  misc_feature (77)..(317): Homolog of NCBI NO: 15225771 NR Description: heme oxygenase 1 (HO1)
  misc_feature (33)..(317): Homolog of NCBI NO: 15222425 NR Description: putative heme oxygenase
VTNKYFKKNPQPQRNPSSSIIFLIQSAKIPRFMATTRLNPSCHFPASTRLSCESYLGLRTTGRISYARTLTAPRGYLAVKANGGQASVVTAAAITEKQQKKYPGESKGFVEEMRFVAMRLHTKDQAREGEKESRSPEEGPVAKWEPTVEGYLHFLVDSKLVYDTLEGIIDGSNFPTYAGFKNTGLERAESLRKDLEWFKEQGYEIPEPMAPGKTYSEYLKDLAENDPQAFICHFYNIYFAHSAGGQMIGTKVSKKILDNKELEFYKWDGQLSQLLQNVRQKLNKVAEWWTREEKSHCLEETEKSFKFSGEILRLILS

SEQ ID NO: 38890 - protein, 285 aa, Arabidopsis thaliana
  peptide (1)..(285): Ceres Seq. ID no. 12339133
  misc_feature (81)..(282): Pfam Name: Heme oxygenase Pfam Description: Heme oxygenase
  misc_feature (56)..(285): Homolog of NCBI NO: 14485575 NR Description: heme oxygenase 1 [Lycopersicon esculentum]
  misc_feature (55)..(285): Homolog of NCBI NO: 15076863 NR Description: putative heme oxygenase 1 precursor [Pisum
  misc_feature (1)..(285): Homolog of NCBI NO: 14485565 NR Description: heme oxygenase 4 [Arabidopsis thaliana]
  misc_feature (1)..(285): Homolog of NCBI NO: 15217926 NR Description: plastid heme oxygenase, putative; protein id:
  misc_feature (56)..(285): Homolog of NCBI NO: 14030647 NR Description: At2g26670/F18A8.4 [Arabidopsis thaliana]
  misc_feature (45)..(285): Homolog of NCBI NO: 21450864 NR Description: putative heme oxygenase HO1 [Arabidopsis thaliana]
  misc_feature (45)..(285): Homolog of NCBI NO: 15225771 NR Description: heme oxygenase 1 (HO1)
  misc_feature (1)..(285): Homolog of NCBI NO: 15222425 NR Description: putative heme oxygenase
MATTRLNPSCHFPASTRLSCESYLGLRTTGRISYARTLTAPRGYLAVKANGGQASVVTAAAITEKQQKKYPGESKGFVEEMRFVAMRLHTKDQAREGEKESRSPEEGPVAKWEPTVEGYLHFLVDSKLVYDTLEGIIDGSNFPTYAGFKNTGLERAESLRKDLEWFKEQGYEIPEPMAPGKTYSEYLKDLAENDPQAFICHFYNIYFAHSAGGQMIGTKVSKKILDNKELEFYKWDGQLSQLLQNVRQKLNKVAEWWTREEKSHCLEETEKSFKFSGEILRLILS

SEQ ID NO: 38891 - protein, 205 aa, Arabidopsis thaliana
  peptide (1)..(205): Ceres Seq. ID no. 12339134
  misc_feature (1)..(202): Pfam Name: Heme oxygenase Pfam Description: Heme oxygenase
  misc_feature (1)..(205): Homolog of NCBI NO: 14485575 NR Description: heme oxygenase 1 [Lycopersicon esculentum]
  misc_feature (1)..(205): Homolog of NCBI NO: 15076863 NR Description: putative heme oxygenase 1 precursor [Pisum
  misc_feature (1)..(205): Homolog of NCBI NO: 14485565 NR Description: heme oxygenase 4 [Arabidopsis thaliana]
  misc_feature (1)..(205): Homolog of NCBI NO: 15217926 NR Description: plastid heme oxygenase, putative; protein id:
  misc_feature (1)..(205): Homolog of NCBI NO: 14030647 NR Description: At2g26670/F18A8.4 [Arabidopsis thaliana]
  misc_feature (1)..(205): Homolog of NCBI NO: 21450864 NR Description: putative heme oxygenase HO1 [Arabidopsis thaliana]
  misc_feature (1)..(205): Homolog of NCBI NO: 15225771 NR Description: heme oxygenase 1 (HO1)
  misc_feature (1)..(205): Homolog of NCBI NO: 15222425 NR Description: putative heme oxygenase
MRFVAMRLHTKDQAREGEKESRSPEEGPVAKWEPTVEGYLHFLVDSKLVYDTLEGIIDGSNFPTYAGFKNTGLERAESLRKDLEWFKEQGYEIPEPMAPGKTYSEYLKDLAENDPQAFICHFYNIYFAHSAGGQMIGTKVSKKILDNKELEFYKWDGQLSQLLQNVRQKLNKVAEWWTREEKSHCLEETEKSFKFSGEILRLILS

SEQ ID NO: 38892 - DNA, 1048 bp, Arabidopsis thaliana
  misc_feature (1)..(1048): Ceres Seq. ID no. 12395524
  misc_feature: MA Experiment ID: 108434 Result: Up-regulated in Transcription
  misc_feature: MA Experiment 108434 PARAMETER Experiment Name: At_Root_Tips_cDNA_P Parameter: Tissue Value: Root Tips
  misc_feature: MA Experiment ID: 108461 Result: Down-regulated in Transcription
  misc_feature: MA Experiment 108461 PARAMETER Experiment Name: At_Germinating_Seeds_cDNA_P Parameter: Age (day) Value: 1 vs. 0
  misc_feature: MA Experiment 108461 PARAMETER Experiment Name: At_Germinating_Seeds_cDNA_P Parameter: Tissue Value: Germinating Seeds
  misc_feature: MA Experiment ID: 108462 Result: Down-regulated in Transcription
  misc_feature: MA Experiment 108462 PARAMETER Experiment Name: At_Germinating_Seeds_cDNA_P Parameter: Age (day) Value: 2 vs. 0
  misc_feature: MA Experiment 108462 PARAMETER Experiment Name: At_Germinating_Seeds_cDNA_P Parameter: Tissue Value: Germinating Seeds
  misc_feature: MA Experiment ID: 108463 Result: Down-regulated in Transcription
  misc_feature: MA Experiment 108463 PARAMETER Experiment Name: At_Germinating_Seeds_cDNA_P Parameter: Age (day) Value: 3 vs. 0
  misc_feature: MA Experiment 108463 PARAMETER Experiment Name: At_Germinating_Seeds_cDNA_P Parameter: Tissue Value: Germinating Seeds
  misc_feature: MA Experiment ID: 108464 Result: Down-regulated in Transcription
  misc_feature: MA Experiment 108464 PARAMETER Experiment Name: At_Germinating_Seeds_cDNA_P Parameter: Age (day) Value: 4 vs. 0
  misc_feature: MA Experiment 108464 PARAMETER Experiment Name: At_Germinating_Seeds_cDNA_P Parameter: Tissue Value: Germinating Seeds
  misc_feature: MA Experiment ID: 108488 Result: Up-regulated in Transcription
  misc_feature: MA Experiment ID: 108489 Result: Up-regulated in Transcription
  misc_feature: MA Experiment ID: 20000180 Result: Down-regulated in Transcription
  misc_feature: MA Experiment 20000180 PARAMETER Experiment Name: At_Germinating_Seeds_P Parameter: Age (hr) Value: 24 vs. 0
  misc_feature: MA Experiment 20000180 PARAMETER Experiment Name: At_Germinating_Seeds_P Parameter: Tissue Value: Germinating Seeds
  misc_feature: MA Experiment ID: 20000234 Result: Up-regulated in Transcription
  misc_feature: MA Experiment 20000234 PARAMETER Experiment Name: At_Siliques_P Parameter: Age (day) Value: 21
  misc_feature: MA Experiment 20000234 PARAMETER Experiment Name: At_Siliques_P Parameter: Organism Value: A. thaliana
  misc_feature: MA Experiment 20000234 PARAMETER Experiment Name: At_Siliques_P Parameter: Plant Line Value: WS
  misc_feature: MA Experiment 20000234 PARAMETER Experiment Name: At_Siliques_P Parameter: Tissue Value: Less Than 5mm Siliques vs. Whole Plant
  misc_feature: MA Experiment ID: 20000794 Result: Down-regulated in Transcription
  misc_feature: MA Experiment 20000794 PARAMETER Experiment Name: At_Petals_P Parameter: Age (day) Value: 23-25 days
  misc_feature: MA Experiment 20000794 PARAMETER Experiment Name: At_Petals_P Parameter: Plant Line Value: WS
  misc_feature: MA Experiment 20000794 PARAMETER Experiment Name: At_Petals_P Parameter: Tissue Value: Petals vs. Whole plant
  misc_feature: MA Experiment ID: 20001451 Result: Down-regulated in Transcription
  misc_feature: MA Experiment 20001451 PARAMETER Experiment Name: At_Far-red-induction_P Parameter: Age (day) Value: 7
  misc_feature: MA Experiment 20001451 PARAMETER Experiment Name: At_Far-red-induction_P Parameter: Light Value: Far-red vs. White
  misc_feature: MA Experiment 20001451 PARAMETER Experiment Name: At_Far-red-induction_P Parameter: Organism Value: A. thaliana
  misc_feature: MA Experiment 20001451 PARAMETER Experiment Name: At_Far-red-induction_P Parameter: Plant Line Value: Columbia
  misc_feature: MA Experiment 20001451 PARAMETER Experiment Name: At_Far-red-induction_P Parameter: Timepoint (hr) Value: 24
  misc_feature: MA Experiment 20001451 PARAMETER Experiment Name: At_Far-red-induction_P Parameter: Tissue Value: Whole Plant
  misc_feature: MA Experiment ID: 20001458 Result: Up-regulated in Transcription
  misc_feature: MA Experiment 20001458 PARAMETER Experiment Name: At_50mM_NH4NO3_L-to-H_P Parameter: Age (day) Value: Undefined
  misc_feature: MA Experiment 20001458 PARAMETER Experiment Name: At_50mM_NH4NO3_L-to-H_P Parameter: Organism Value: Undefined
  misc_feature: MA Experiment 20001458 PARAMETER Experiment Name: At_50mM_NH4NO3_L-to-H_P Parameter: Plant Line Value: Undefined
  misc_feature: MA Experiment 20001458 PARAMETER Experiment Name: At_50mM_NH4NO3_L-to-H_P Parameter: Timepoint (hr) Value: 2
  misc_feature: MA Experiment 20001458 PARAMETER Experiment Name: At_50mM_NH4NO3_L-to-H_P Parameter: Tissue Value: Siliques
  misc_feature: MA Experiment 20001458 PARAMETER Experiment Name: At_50mM_NH4NO3_L-to-H_P Parameter: Treatment Value: 50mM NH4NO3 vs. 100mM Manitol
  misc_feature: MA Experiment ID: 20001556 Result: Up-regulated in Transcription
  misc_feature: MA Experiment 20001556 PARAMETER Experiment Name: At_Drought_Soil_Dry_P Parameter: Age (day) Value: 26
  misc_feature: MA Experiment 20001556 PARAMETER Experiment Name: At_Drought_Soil_Dry_P Parameter: Organism Value: A. thaliana
  misc_feature: MA Experiment 20001556 PARAMETER Experiment Name: At_Drought_Soil_Dry_P Parameter: Plant Line Value: WS
  misc_feature: MA Experiment 20001556 PARAMETER Experiment Name: At_Drought_Soil_Dry_P Parameter: Post Timepoint (hr) Value: None
  misc_feature: MA Experiment 20001556 PARAMETER Experiment Name: At_Drought_Soil_Dry_P Parameter: Post-Treatment Value: None
  misc_feature: MA Experiment 20001556 PARAMETER Experiment Name: At_Drought_Soil_Dry_P Parameter: Timepoint (day) Value: 12
  misc_feature: MA Experiment 20001556 PARAMETER Experiment Name: At_Drought_Soil_Dry_P Parameter: Treatment Value: Drought vs. No Drought
  misc_feature: MA Experiment ID: 20001557 Result: Up-regulated in Transcription
  misc_feature: MA Experiment 20001557 PARAMETER Experiment Name: At_Drought_Soil_Dry_P Parameter: Age (day) Value: 27
  misc_feature: MA Experiment 20001557 PARAMETER Experiment Name: At_Drought_Soil_Dry_P Parameter: Organism Value: A. thaliana
  misc_feature: MA Experiment 20001557 PARAMETER Experiment Name: At_Drought_Soil_Dry_P Parameter: Plant Line Value: WS
  misc_feature: MA Experiment 20001557 PARAMETER Experiment Name: At_Drought_Soil_Dry_P Parameter: Post Timepoint (hr) Value: 3
  misc_feature: MA Experiment 20001557 PARAMETER Experiment Name: At_Drought_Soil_Dry_P Parameter: Post-Treatment Value: Re-Water vs. No Drought
  misc_feature: MA Experiment 20001557 PARAMETER Experiment Name: At_Drought_Soil_Dry_P Parameter: Timepoint (day) Value: 13
  misc_feature: MA Experiment 20001557 PARAMETER Experiment Name: At_Drought_Soil_Dry_P Parameter: Treatment Value: Drought vs. No Drought
  misc_feature: MA Experiment ID: 20001558 Result: Up-regulated in Transcription
  misc_feature: MA Experiment 20001558 PARAMETER Experiment Name: At_Drought_Soil_Dry_P Parameter: Age (day) Value: 27
  misc_feature: MA Experiment 20001558 PARAMETER Experiment Name: At_Drought_Soil_Dry_P Parameter: Organism Value: A. thaliana
  misc_feature: MA Experiment 20001558 PARAMETER Experiment Name: At_Drought_Soil_Dry_P Parameter: Plant Line Value: WS
  misc_feature: MA Experiment 20001558 PARAMETER Experiment Name: At_Drought_Soil_Dry_P Parameter: Post Timepoint (hr) Value: 6
  misc_feature: MA Experiment 20001558 PARAMETER Experiment Name: At_Drought_Soil_Dry_P Parameter: Post-Treatment Value: Re-Water vs. No Drought
  misc_feature: MA Experiment 20001558 PARAMETER Experiment Name: At_Drought_Soil_Dry_P Parameter: Timepoint (day) Value: 13
  misc_feature: MA Experiment 20001558 PARAMETER Experiment Name: At_Drought_Soil_Dry_P Parameter: Treatment Value: Drought vs. No Drought
  misc_feature: MA Experiment ID: 20001560 Result: Up-regulated in Transcription
  misc_feature: MA Experiment 20001560 PARAMETER Experiment Name: At_Drought_Soil_Dry_P Parameter: Age (day) Value: 28
  misc_feature: MA Experiment 20001560 PARAMETER Experiment Name: At_Drought_Soil_Dry_P Parameter: Organism Value: A. thaliana
  misc_feature: MA Experiment 20001560 PARAMETER Experiment Name: At_Drought_Soil_Dry_P Parameter: Plant Line Value: WS
  misc_feature: MA Experiment 20001560 PARAMETER Experiment Name: At_Drought_Soil_Dry_P Parameter: Post Timepoint (hr) Value: None
  misc_feature: MA Experiment 20001560 PARAMETER Experiment Name: At_Drought_Soil_Dry_P Parameter: Post-Treatment Value: None
  misc_feature: MA Experiment 20001560 PARAMETER Experiment Name: At_Drought_Soil_Dry_P Parameter: Timepoint (day) Value: 14
  misc_feature: MA Experiment 20001560 PARAMETER Experiment Name: At_Drought_Soil_Dry_P Parameter: Treatment Value: Drought vs. No Drought
  misc_feature: MA Experiment ID: 20001757 Result: Up-regulated in Transcription
  misc_feature: MA Experiment 20001757 PARAMETER Experiment Name: At_50mM_NH4NO3_L-to-H_P Parameter: Timepoint (hr) Value: 6
  misc_feature: MA Experiment 20001757 PARAMETER Experiment Name: At_50mM_NH4NO3_L-to-H_P Parameter: Tissue Value: Leaf
  misc_feature: MA Experiment 20001757 PARAMETER Experiment Name: At_50mM_NH4NO3_L-to-H_P Parameter: Treatment Value: 50mM NH4NO3 vs 100mM Mannitol
  misc_feature: Phenotype: FERTILITY Fertility-Aborted
  misc_feature: Phenotype: FERTILITY Fertility-Aborted
  misc_feature: Phenotype: SILIQUES Other
aacacaccgaaaactgaatcaaatctcctagctcttctacgcaaaatcgagtgcatcgacaatggcggaacgtggtgtcgaacgtggtggagatcgcggcgatttcggacgtggattcggtggtcgcggcggtggaagaggtggtccgagaggtcgtggtcgccgtgcaggtcgtgctccagaggaggagaaatgggtgccagtgactaagcttggtcgtctcgtaaaggaaggtaagatcacaaagattgagcagatctacctccattctctcccagtcaaggagtaccagatcatagatttactcgtcggtccttcattgaaagacgaagtgatgaaaatcatgccggttcaaaaacaaaccagagccggtcagagaacgagattcaaggccttcatcgtcgtcggagatagtaacggtcacgtcggattaggagtcaaatgctccaaggaagttgcgacggcgatcagaggcgcgatcattctcgcgaaattgtctgtggttccgatacgaagaggttattggggtaacaagattggaaaaccacatacggttccgtgtaaggtaaccgggaaatgtggatctgttactgtacgtatggttccagctccgagaggttctggtattgtggcggctagagttcctaagaaggttcttcaattcgctggaattgatgatgtctttacttcttctagaggatccaccaaaactcttggaaacttcgtcaaggcaacatttgattgtctgcagaagacatacggattccttacaccggaattctggaaagagacgagattctcaaaatcaccataccaagagcacactgatttcttgcttatacctcctggcgtcaagatcagcgaggttgttgtagacaaaagcgtagagtaataccactttatcttgttacatgagacttgagtgttgtcaaaagctcaagtcagattttgttccaaccttggttttttgatttgtcggttataatgtctttagtaatctagatacgtatctgttttacactttgaattcaatcatacgaatcttctt

SEQ ID NO: 38893 - protein, 276 aa, Arabidopsis thaliana
  peptide (1)..(276): Ceres Seq. ID no. 12395525
  misc_feature (169)..(242): Pfam Name: Ribosomal protein S5, C-terminal domain Pfam Description: Ribosomal protein S5, C-terminal domain
  misc_feature (1)..(273): Homolog of NCBI NO: 34393314 NR Description: putative 40S ribosomal protein S2
  misc_feature (1)..(276): Homolog of NCBI NO: 30103021 NR Description: putative 40S ribosomal protein S2
  misc_feature (3)..(258): Homolog of NCBI NO: 21553851 NR Description: 40S ribosomal protein S2 [Arabidopsis thaliana]
  misc_feature (3)..(258): Homolog of NCBI NO: 15227443 NR Description: 40S ribosomal protein S2
  misc_feature (3)..(272): Homolog of NCBI NO: 21539457 NR Description: ribosomal protein S2, putative [Arabidopsis
  misc_feature (3)..(272): Homolog of NCBI NO: 25294520 NR Description: hypothetical protein RF12
  misc_feature (3)..(272): Homolog of NCBI NO: 18406325 NR Description: ribosomal protein S2, putative
  misc_feature (1)..(272): Homolog of NCBI NO: 21618011 NR Description: ribosomal protein S2, putative [Arabidopsis
  misc_feature (1)..(272): Homolog of NCBI NO: 15217951 NR Description: ribosomal protein S2, putative; protein id:
  misc_feature (1)..(276): Homolog of NCBI NO: 15230312 NR Description: 40S ribosomal protein S2 homolog
MAERGVERGGDRGDFGRGFGGRGGGRGGPRGRGRRAGRAPEEEKWVPVTKLGRLVKEGKITKIEQIYLHSLPVKEYQIIDLLVGPSLKDEVMKIMPVQKQTRAGQRTRFKAFIVVGDSNGHVGLGVKCSKEVATAIRGAIILAKLSVVPIRRGYWGNKIGKPHTVPCKVTGKCGSVTVRMVPAPRGSGIVAARVPKKVLQFAGIDDVFTSSRGSTKTLGNFVKATFDCLQKTYGFLTPEFWKETRFSKSPYQEHTDFLLIPPGVKISEVVVDKSVE

SEQ ID NO: 38894 - protein, 185 aa, Arabidopsis thaliana
  peptide (1)..(185): Ceres Seq. ID no. 12395526
  misc_feature (78)..(151): Pfam Name: Ribosomal protein S5, C-terminal domain Pfam Description: Ribosomal protein S5, C-terminal domain
  misc_feature (1)..(182): Homolog of NCBI NO: 34393314 NR Description: putative 40S ribosomal protein S2
  misc_feature (1)..(185): Homolog of NCBI NO: 30103021 NR Description: putative 40S ribosomal protein S2
  misc_feature (1)..(167): Homolog of NCBI NO: 21553851 NR Description: 40S ribosomal protein S2 [Arabidopsis thaliana]
  misc_feature (1)..(167): Homolog of NCBI NO: 15227443 NR Description: 40S ribosomal protein S2
  misc_feature (1)..(181): Homolog of NCBI NO: 21539457 NR Description: ribosomal protein S2, putative [Arabidopsis
  misc_feature (1)..(181): Homolog of NCBI NO: 25294520 NR Description: hypothetical protein RF12
  misc_feature (1)..(181): Homolog of NCBI NO: 18406325 NR Description: ribosomal protein S2, putative
  misc_feature (1)..(181): Homolog of NCBI NO: 21618011 NR Description: ribosomal protein S2, putative [Arabidopsis
  misc_feature (1)..(181): Homolog of NCBI NO: 15217951 NR Description: ribosomal protein S2, putative; protein id:
  misc_feature (1)..(185): Homolog of NCBI NO: 15230312 NR Description: 40S ribosomal protein S2 homolog
MKIMPVQKQTRAGQRTRFKAFIVVGDSNGHVGLGVKCSKEVATAIRGAIILAKLSVVPIRRGYWGNKIGKPHTVPCKVTGKCGSVTVRMVPAPRGSGIVAARVPKKVLQFAGIDDVFTSSRGSTKTLGNFVKATFDCLQKTYGFLTPEFWKETRFSKSPYQEHTDFLLIPPGVKISEVVVDKSVE

SEQ ID NO: 38895 - protein, 182 aa, Arabidopsis thaliana
  peptide (1)..(182): Ceres Seq. ID no. 12395527
  misc_feature (75)..(148): Pfam Name: Ribosomal protein S5, C-terminal domain Pfam Description: Ribosomal protein S5, C-terminal domain
  misc_feature (1)..(179): Homolog of NCBI NO: 34393314 NR Description: putative 40S ribosomal protein S2
  misc_feature (1)..(182): Homolog of NCBI NO: 30103021 NR Description: putative 40S ribosomal protein S2
  misc_feature (1)..(164): Homolog of NCBI NO: 21553851 NR Description: 40S ribosomal protein S2 [Arabidopsis thaliana]
  misc_feature (1)..(164): Homolog of NCBI NO: 15227443 NR Description: 40S ribosomal protein S2
  misc_feature (1)..(178): Homolog of NCBI NO: 21539457 NR Description: ribosomal protein S2, putative [Arabidopsis
  misc_feature (1)..(178): Homolog of NCBI NO: 25294520 NR Description: hypothetical protein RF12
  misc_feature (1)..(178): Homolog of NCBI NO: 18406325 NR Description: ribosomal protein S2, putative
  misc_feature (1)..(178): Homolog of NCBI NO: 21618011 NR Description: ribosomal protein S2, putative [Arabidopsis
  misc_feature (1)..(178): Homolog of NCBI NO: 15217951 NR Description: ribosomal protein S2, putative; protein id:
  misc_feature (1)..(182): Homolog of NCBI NO: 15230312 NR Description: 40S ribosomal protein S2 homolog
MPVQKQTRAGQRTRFKAFIVVGDSNGHVGLGVKCSKEVATAIRGAIILAKLSVVPIRRGYWGNKIGKPHTVPCKVTGKCGSVTVRMVPAPRGSGIVAARVPKKVLQFAGIDDVFTSSRGSTKTLGNFVKATFDCLQKTYGFLTPEFWKETRFSKSPYQEHTDFLLIPPGVKISEVVVDKSVE

SEQ ID NO: 38896 - DNA, 1546 bp, Arabidopsis thaliana
  misc_feature (1)..(1546): Ceres Seq. ID no. 13497314
  misc_feature: MA Experiment ID: 108461 Result: Up-regulated in Transcription
  misc_feature: MA Experiment 108461 PARAMETER Experiment Name: At_Germinating_Seeds_cDNA_P Parameter: Age (day) Value: 1 vs. 0
  misc_feature: MA Experiment 108461 PARAMETER Experiment Name: At_Germinating_Seeds_cDNA_P Parameter: Tissue Value: Germinating Seeds
  misc_feature: MA Experiment ID: 108464 Result: Up-regulated in Transcription
  misc_feature: MA Experiment 108464 PARAMETER Experiment Name: At_Germinating_Seeds_cDNA_P Parameter: Age (day) Value: 4 vs. 0
  misc_feature: MA Experiment 108464 PARAMETER Experiment Name: At_Germinating_Seeds_cDNA_P Parameter: Tissue Value: Germinating Seeds
  misc_feature: MA Experiment ID: 108488 Result: Down-regulated in Transcription
  misc_feature: MA Experiment ID: 108572 Result: Up-regulated in Transcription
  misc_feature: MA Experiment 108572 PARAMETER Experiment Name: At_Drought_cDNA_P Parameter: Timepoint (hr) Value: 1
  misc_feature: MA Experiment 108572 PARAMETER Experiment Name: At_Drought_cDNA_P Parameter: Tissue Value: Aerial
  misc_feature: MA Experiment 108572 PARAMETER Experiment Name: At_Drought_cDNA_P Parameter: Treatment Value: Drought vs. No Drought
  misc_feature: MA Experiment ID: 108595 Result: Down-regulated in Transcription
  misc_feature: MA Experiment 108595 PARAMETER Experiment Name: At_Ler-pi_Ovule_cDNA_P Parameter: Plant Line Value: null
  misc_feature: MA Experiment ID: 108605 Result: Up-regulated in Transcription
  misc_feature: MA Experiment 108605 PARAMETER Experiment Name: At_100uM_ABA_cDNA_P Parameter: Timepoint (hr) Value: 6
  misc_feature: MA Experiment 108605 PARAMETER Experiment Name: At_100uM_ABA_cDNA_P Parameter: Tissue Value: Aerial
  misc_feature: MA Experiment 108605 PARAMETER Experiment Name: At_100uM_ABA_cDNA_P Parameter: Treatment Value: 100uM ABA vs. No Treatment
  misc_feature: MA Experiment ID: 108607 Result: Up-regulated in Transcription
  misc_feature: MA Experiment 108607 PARAMETER Experiment Name: At_100uM_ABA_cDNA_P Parameter: Timepoint (hr) Value: 4
  misc_feature: MA Experiment 108607 PARAMETER Experiment Name: At_100uM_ABA_cDNA_P Parameter: Tissue Value: Aerial
  misc_feature: MA Experiment 108607 PARAMETER Experiment Name: At_100uM_ABA_cDNA_P Parameter: Treatment Value: 100uM ABA vs. No Treatment
  misc_feature: MA Experiment ID: 20000069 Result: Up-regulated in Transcription
  misc_feature: MA Experiment 20000069 PARAMETER Experiment Name: At_100uM_ABA_Mutants_cDNA_P Parameter: Plant Line Value: CS23
  misc_feature: MA Experiment 20000069 PARAMETER Experiment Name: At_100uM_ABA_Mutants_cDNA_P Parameter: Timepoint (hr) Value: 6
  misc_feature: MA Experiment 20000069 PARAMETER Experiment Name: At_100uM_ABA_Mutants_cDNA_P Parameter: Tissue Value: Aerial
  misc_feature: MA Experiment 20000069 PARAMETER Experiment Name: At_100uM_ABA_Mutants_cDNA_P Parameter: Treatment Value: 100uM ABA vs. No Treatment
  misc_feature: MA Experiment ID: 20000086 Result: Up-regulated in Transcription
  misc_feature: MA Experiment 20000086 PARAMETER Experiment Name: At_100uM_ABA_Mutants_cDNA_P Parameter: Plant Line Value: CS22
  misc_feature: MA Experiment 20000086 PARAMETER Experiment Name: At_100uM_ABA_Mutants_cDNA_P Parameter: Timepoint (hr) Value: 6
  misc_feature: MA Experiment 20000086 PARAMETER Experiment Name: At_100uM_ABA_Mutants_cDNA_P Parameter: Tissue Value: Aerial
  misc_feature: MA Experiment 20000086 PARAMETER Experiment Name: At_100uM_ABA_Mutants_cDNA_P Parameter: Treatment Value: 100uM ABA vs. No Treatment
  misc_feature: MA Experiment ID: 20000087 Result: Up-regulated in Transcription
  misc_feature: MA Experiment 20000087 PARAMETER Experiment Name: At_100uM_ABA_Mutants_cDNA_P Parameter: Plant Line Value: WS
  misc_feature: MA Experiment 20000087 PARAMETER Experiment Name: At_100uM_ABA_Mutants_cDNA_P Parameter: Timepoint (hr) Value: 6
  misc_feature: MA Experiment 20000087 PARAMETER Experiment Name: At_100uM_ABA_Mutants_cDNA_P Parameter: Tissue Value: Aerial
  misc_feature: MA Experiment 20000087 PARAMETER Experiment Name: At_100uM_ABA_Mutants_cDNA_P Parameter: Treatment Value: 100uM ABA vs. No Treatment
  misc_feature: MA Experiment ID: 20000088 Result: Up-regulated in Transcription
  misc_feature: MA Experiment 20000088 PARAMETER Experiment Name: At_100uM_ABA_Mutants_cDNA_P Parameter: Plant Line Value: Landsberg
  misc_feature: MA Experiment 20000088 PARAMETER Experiment Name: At_100uM_ABA_Mutants_cDNA_P Parameter: Timepoint (hr) Value: 6
  misc_feature: MA Experiment 20000088 PARAMETER Experiment Name: At_100uM_ABA_Mutants_cDNA_P Parameter: Tissue Value: Aerial
  misc_feature: MA Experiment 20000088 PARAMETER Experiment Name: At_100uM_ABA_Mutants_cDNA_P Parameter: Treatment Value: 100uM ABA vs. No Treatment
  misc_feature: MA Experiment ID: 20000166 Result: Up-regulated in Transcription
  misc_feature: MA Experiment 20000166 PARAMETER Experiment Name: At_100uM_ABA_P Parameter: Age (day) Value: 14
  misc_feature: MA Experiment 20000166 PARAMETER Experiment Name: At_100uM_ABA_P Parameter: Organism Value: A. thaliana
  misc_feature: MA Experiment 20000166 PARAMETER Experiment Name: At_100uM_ABA_P Parameter: Plant Line Value: WS
  misc_feature: MA Experiment 20000166 PARAMETER Experiment Name: At_100uM_ABA_P Parameter: Timepoint (hr) Value: 1
  misc_feature: MA Experiment 20000166 PARAMETER Experiment Name: At_100uM_ABA_P Parameter: Tissue Value: Aerial
  misc_feature: MA Experiment 20000166 PARAMETER Experiment Name: At_100uM_ABA_P Parameter: Treatment Value: 100uM ABA vs. No Treatment
  misc_feature: MA Experiment ID: 20000169 Result: Up-regulated in Transcription
  misc_feature: MA Experiment 20000169 PARAMETER Experiment Name: At_100uM_ABA_P Parameter: Age (day) Value: 14
  misc_feature: MA Experiment 20000169 PARAMETER Experiment Name: At_100uM_ABA_P Parameter: Organism Value: A. thaliana
  misc_feature: MA Experiment 20000169 PARAMETER Experiment Name: At_100uM_ABA_P Parameter: Plant Line Value: WS
  misc_feature: MA Experiment 20000169 PARAMETER Experiment Name: At_100uM_ABA_P Parameter: Timepoint (hr) Value: 6
  misc_feature: MA Experiment 20000169 PARAMETER Experiment Name: At_100uM_ABA_P Parameter: Tissue Value: Aerial
  misc_feature: MA Experiment 20000169 PARAMETER Experiment Name: At_100uM_ABA_P Parameter: Treatment Value: 100uM ABA vs. No Treatment
  misc_feature: MA Experiment ID: 20000185 Result: Down-regulated in Transcription
  misc_feature: MA Experiment 20000185 PARAMETER Experiment Name: At_Roots__P Parameter: Age (day) Value: 7 vs. 21
  misc_feature: MA Experiment 20000185 PARAMETER Experiment Name: At_Roots__P Parameter: Organism Value: A. thaliana
  misc_feature: MA Experiment 20000185 PARAMETER Experiment Name: At_Roots__P Parameter: Tissue Value: Roots vs. Whole Plant
  misc_feature: MA Experiment ID: 20000224 Result: Down-regulated in Transcription
  misc_feature: MA Experiment ID: 20000227 Result: Down-regulated in Transcription
  misc_feature: MA Experiment 20000227 PARAMETER Experiment Name: At_Root-Tips-vs-Tops_P Parameter: Tissue Value: Root Tips vs. Root Tops
  misc_feature: MA Experiment ID: 20000234 Result: Down-regulated in Transcription
  misc_feature: MA Experiment 20000234 PARAMETER Experiment Name: At_Siliques_P Parameter: Age (day) Value: 21
  misc_feature: MA Experiment 20000234 PARAMETER Experiment Name: At_Siliques_P Parameter: Organism Value: A. thaliana
  misc_feature: MA Experiment 20000234 PARAMETER Experiment Name: At_Siliques_P Parameter: Plant Line Value: WS
  misc_feature: MA Experiment 20000234 PARAMETER Experiment Name: At_Siliques_P Parameter: Tissue Value: Less Than 5mm Siliques vs. Whole Plant
  misc_feature: MA Experiment ID: 20000235 Result: Down-regulated in Transcription
  misc_feature: MA Experiment 20000235 PARAMETER Experiment Name: At_Siliques_P Parameter: Age (day) Value: 21
  misc_feature: MA Experiment 20000235 PARAMETER Experiment Name: At_Siliques_P Parameter: Organism Value: A. thaliana
  misc_feature: MA Experiment 20000235 PARAMETER Experiment Name: At_Siliques_P Parameter: Plant Line Value: WS
  misc_feature: MA Experiment 20000235 PARAMETER Experiment Name: At_Siliques_P Parameter: Tissue Value: 5-10mm Siliques vs. Whole Plant
  misc_feature: MA Experiment ID: 20000264 Result: Down-regulated in Transcription
  misc_feature: MA Experiment 20000264 PARAMETER Experiment Name: At_Open_Flower_P Parameter: Age (day) Value: 21
  misc_feature: MA Experiment 20000264 PARAMETER Experiment Name: At_Open_Flower_P Parameter: Plant Line Value: WS
  misc_feature: MA Experiment 20000264 PARAMETER Experiment Name: At_Open_Flower_P Parameter: Tissue Value: Open Flower vs. Whole Plant
  misc_feature: MA Experiment ID: 20000265 Result: Down-regulated in Transcription
  misc_feature: MA Experiment 20000265 PARAMETER Experiment Name: At_Open_Flower_P Parameter: Age (day) Value: 21
  misc_feature: MA Experiment 20000265 PARAMETER Experiment Name: At_Open_Flower_P Parameter: Plant Line Value: WS
  misc_feature: MA Experiment 20000265 PARAMETER Experiment Name: At_Open_Flower_P Parameter: Tissue Value: Closed Flower vs. Whole Plant
  misc_feature: MA Experiment ID: 20000267 Result: Up-regulated in Transcription
  misc_feature: MA Experiment 20000267 PARAMETER Experiment Name: At_Drought_P Parameter: Age (day) Value: 7
  misc_feature: MA Experiment 20000267 PARAMETER Experiment Name: At_Drought_P Parameter: Organism Value: A. thaliana
  misc_feature: MA Experiment 20000267 PARAMETER Experiment Name: At_Drought_P Parameter: Plant Line Value: WS
  misc_feature: MA Experiment 20000267 PARAMETER Experiment Name: At_Drought_P Parameter: Timepoint (hr) Value: 6
  misc_feature: MA Experiment 20000267 PARAMETER Experiment Name: At_Drought_P Parameter: Tissue Value: Whole Plant
  misc_feature: MA Experiment 20000267 PARAMETER Experiment Name: At_Drought_P Parameter: Treatment Value: Drought vs. No Drought
  misc_feature: MA Experiment ID: 20000268 Result: Up-regulated in Transcription
  misc_feature: MA Experiment 20000268 PARAMETER Experiment Name: At_100mM_NaCl__P Parameter: Age (day) Value: 14
  misc_feature: MA Experiment 20000268 PARAMETER Experiment Name: At_100mM_NaCl__P Parameter: Organism Value: A. thaliana
  misc_feature: MA Experiment 20000268 PARAMETER Experiment Name: At_100mM_NaCl__P Parameter: Plant Line Value: WS
  misc_feature: MA Experiment 20000268 PARAMETER Experiment Name: At_100mM_NaCl__P Parameter: Timepoint (hr) Value: 6
  misc_feature: MA Experiment 20000268 PARAMETER Experiment Name: At_100mM_NaCl__P Parameter: Tissue Value: Whole Plant
  misc_feature: MA Experiment 20000268 PARAMETER Experiment Name: At_100mM_NaCl__P Parameter: Treatment Value: 100mM NaCl vs. No Treatment
  misc_feature: MA Experiment ID: 20000286 Result: Down-regulated in Transcription
  misc_feature: MA Experiment 20000286 PARAMETER Experiment Name: At_Open_Flower_P Parameter: Age (day) Value: 21
  misc_feature: MA Experiment 20000286 PARAMETER Experiment Name: At_Open_Flower_P Parameter: Plant Line Value: WS
  misc_feature: MA Experiment 20000286 PARAMETER Experiment Name: At_Open_Flower_P Parameter: Tissue Value: Half Open vs. Whole Plant
  misc_feature: MA Experiment ID: 20000436 Result: Up-regulated in Transcription
  misc_feature: MA Experiment 20000436 PARAMETER Experiment Name: At_Drought_P Parameter: Age (day) Value: 7
  misc_feature: MA Experiment 20000436 PARAMETER Experiment Name: At_Drought_P Parameter: Organism Value: A. thaliana
  misc_feature: MA Experiment 20000436 PARAMETER Experiment Name: At_Drought_P Parameter: Plant Line Value: WS
  misc_feature: MA Experiment 20000436 PARAMETER Experiment Name: At_Drought_P Parameter: Timepoint (hr) Value: 12
  misc_feature: MA Experiment 20000436 PARAMETER Experiment Name: At_Drought_P Parameter: Tissue Value: Whole Plant
  misc_feature: MA Experiment 20000436 PARAMETER Experiment Name: At_Drought_P Parameter: Treatment Value: Drought vs. No Drought
  misc_feature: MA Experiment ID: 20000437 Result: Up-regulated in Transcription
  misc_feature: MA Experiment 20000437 PARAMETER Experiment Name: At_Drought_P Parameter: Age (day) Value: 8
  misc_feature: MA Experiment 20000437 PARAMETER Experiment Name: At_Drought_P Parameter: Organism Value: A. thaliana
  misc_feature: MA Experiment 20000437 PARAMETER Experiment Name: At_Drought_P Parameter: Plant Line Value: WS
  misc_feature: MA Experiment 20000437 PARAMETER Experiment Name: At_Drought_P Parameter: Timepoint (hr) Value: 24
  misc_feature: MA Experiment 20000437 PARAMETER Experiment Name: At_Drought_P Parameter: Tissue Value: Whole Plant
  misc_feature: MA Experiment 20000437 PARAMETER Experiment Name: At_Drought_P Parameter: Treatment Value: Drought vs. No Drought
  misc_feature: MA Experiment ID: 20000439 Result: Down-regulated in Transcription
  misc_feature: MA Experiment 20000439 PARAMETER Experiment Name: At_Roots__P Parameter: Age (day) Value: 14 vs. 21
  misc_feature: MA Experiment 20000439 PARAMETER Experiment Name: At_Roots__P Parameter: Organism Value: A. thaliana
  misc_feature: MA Experiment 20000439 PARAMETER Experiment Name: At_Roots__P Parameter: Tissue Value: Roots vs. Whole Plant
  misc_feature: MA Experiment ID: 20000451 Result: Down-regulated in Transcription
  misc_feature: MA Experiment 20000451 PARAMETER Experiment Name: At_CS6879_Shoots-Roots_P Parameter: Age (day) Value: 14
  misc_feature: MA Experiment 20000451 PARAMETER Experiment Name: At_CS6879_Shoots-Roots_P Parameter: Organism Value: A. thaliana
  misc_feature: MA Experiment 20000451 PARAMETER Experiment Name: At_CS6879_Shoots-Roots_P Parameter: Plant Line Value: CS6879 vs. WS
  misc_feature: MA Experiment 20000451 PARAMETER Experiment Name: At_CS6879_Shoots-Roots_P Parameter: Tissue Value: Roots
  misc_feature: MA Experiment ID: 20000453 Result: Up-regulated in Transcription
  misc_feature: MA Experiment 20000453 PARAMETER Experiment Name: At_100uM_ABA_P Parameter: Age (day) Value: 15
  misc_feature: MA Experiment 20000453 PARAMETER Experiment Name: At_100uM_ABA_P Parameter: Organism Value: A. thaliana
  misc_feature: MA Experiment 20000453 PARAMETER Experiment Name: At_100uM_ABA_P Parameter: Plant Line Value: WS
  misc_feature: MA Experiment 20000453 PARAMETER Experiment Name: At_100uM_ABA_P Parameter: Timepoint (hr) Value: 24
  misc_feature: MA Experiment 20000453 PARAMETER Experiment Name: At_100uM_ABA_P Parameter: Tissue Value: Aerial
  misc_feature: MA Experiment 20000453 PARAMETER Experiment Name: At_100uM_ABA_P Parameter: Treatment Value: 100uM ABA vs. No Treatment
  misc_feature: MA Experiment ID: 20000574 Result: Down-regulated in Transcription
  misc_feature: MA Experiment 20000574 PARAMETER Experiment Name: At_100uM_ABA_Mutants__P Parameter: Organism Value: A. thaliana
  misc_feature: MA Experiment 20000574 PARAMETER Experiment Name: At_100uM_ABA_Mutants__P Parameter: Plant Line Value: CS23 vs. Ler wt
  misc_feature: MA Experiment 20000574 PARAMETER Experiment Name: At_100uM_ABA_Mutants__P Parameter: Timepoint (hr) Value: N/A
  misc_feature: MA Experiment 20000574 PARAMETER Experiment Name: At_100uM_ABA_Mutants__P Parameter: Tissue Value: Whole Plant
  misc_feature: MA Experiment 20000574 PARAMETER Experiment Name: At_100uM_ABA_Mutants__P Parameter: Treatment Value: None
  misc_feature: MA Experiment ID: 20000709 Result: Down-regulated in Transcription
  misc_feature: MA Experiment 20000709 PARAMETER Experiment Name: At_15mM_NH4NO3_L-to-H_P Parameter: Age (hr) Value: 14
  misc_feature: MA Experiment 20000709 PARAMETER Experiment Name: At_15mM_NH4NO3_L-to-H_P Parameter: Organism Value: A. thaliana
  misc_feature: MA Experiment 20000709 PARAMETER Experiment Name: At_15mM_NH4NO3_L-to-H_P Parameter: Plant Line Value: WS
  misc_feature: MA Experiment 20000709 PARAMETER Experiment Name: At_15mM_NH4NO3_L-to-H_P Parameter: Timepoint (hr) Value: 4
  misc_feature: MA Experiment 20000709 PARAMETER Experiment Name: At_15mM_NH4NO3_L-to-H_P Parameter: Tissue Value: Aerial
  misc_feature: MA Experiment 20000709 PARAMETER Experiment Name: At_15mM_NH4NO3_L-to-H_P Parameter: Treatment Value: 15mM NH4NO3 vs. 30mM Mannitol
  misc_feature: MA Experiment ID: 20000794 Result: Down-regulated in Transcription
  misc_feature: MA Experiment 20000794 PARAMETER Experiment Name: At_Petals_P Parameter: Age (day) Value: 23-25 days
  misc_feature: MA Experiment 20000794 PARAMETER Experiment Name: At_Petals_P Parameter: Plant Line Value: WS
  misc_feature: MA Experiment 20000794 PARAMETER Experiment Name: At_Petals_P Parameter: Tissue Value: Petals vs. Whole plant
  misc_feature: MA Experiment ID: 20001247 Result: Up-regulated in Transcription
  misc_feature: MA Experiment 20001247 PARAMETER Experiment Name: At_Far-red-induction_P Parameter: Age (day) Value: 7
  misc_feature: MA Experiment 20001247 PARAMETER Experiment Name: At_Far-red-induction_P Parameter: Light Value: Far-red vs. White
  misc_feature: MA Experiment 20001247 PARAMETER Experiment Name: At_Far-red-induction_P Parameter: Organism Value: A. thaliana
  misc_feature: MA Experiment 20001247 PARAMETER Experiment Name: At_Far-red-induction_P Parameter: Plant Line Value: Columbia
  misc_feature: MA Experiment 20001247 PARAMETER Experiment Name: At_Far-red-induction_P Parameter: Timepoint (hr) Value: 1
  misc_feature: MA Experiment 20001247 PARAMETER Experiment Name: At_Far-red-induction_P Parameter: Tissue Value: Whole Plant
  misc_feature: MA Experiment ID: 20001248 Result: Up-regulated in Transcription
  misc_feature: MA Experiment 20001248 PARAMETER Experiment Name: At_Far-red-induction_P Parameter: Age (day) Value: 7
  misc_feature: MA Experiment 20001248 PARAMETER Experiment Name: At_Far-red-induction_P Parameter: Light Value: Far-red vs. White
  misc_feature: MA Experiment 20001248 PARAMETER Experiment Name: At_Far-red-induction_P Parameter: Organism Value: A. thaliana
  misc_feature: MA Experiment 20001248 PARAMETER Experiment Name: At_Far-red-induction_P Parameter: Plant Line Value: Columbia
  misc_feature: MA Experiment 20001248 PARAMETER Experiment Name: At_Far-red-induction_P Parameter: Timepoint (hr) Value: 4
  misc_feature: MA Experiment 20001248 PARAMETER Experiment Name: At_Far-red-induction_P Parameter: Tissue Value: Whole Plant
  misc_feature: MA Experiment ID: 20001450 Result: Up-regulated in Transcription
  misc_feature: MA Experiment 20001450 PARAMETER Experiment Name: At_Far-red-induction_P Parameter: Age (day) Value: 7
  misc_feature: MA Experiment 20001450 PARAMETER Experiment Name: At_Far-red-induction_P Parameter: Light Value: Far-red vs. White
  misc_feature: MA Experiment 20001450 PARAMETER Experiment Name: At_Far-red-induction_P Parameter: Organism Value: A. thaliana
  misc_feature: MA Experiment 20001450 PARAMETER Experiment Name: At_Far-red-induction_P Parameter: Plant Line Value: Columbia
  misc_feature: MA Experiment 20001450 PARAMETER Experiment Name: At_Far-red-induction_P Parameter: Timepoint (hr) Value: 8
  misc_feature: MA Experiment 20001450 PARAMETER Experiment Name: At_Far-red-induction_P Parameter: Tissue Value: Whole Plant
  misc_feature: MA Experiment ID: 20001451 Result: Up-regulated in Transcription
  misc_feature: MA Experiment 20001451 PARAMETER Experiment Name: At_Far-red-induction_P Parameter: Age (day) Value: 7
  misc_feature: MA Experiment 20001451 PARAMETER Experiment Name: At_Far-red-induction_P Parameter: Light Value: Far-red vs. White
  misc_feature: MA Experiment 20001451 PARAMETER Experiment Name: At_Far-red-induction_P Parameter: Organism Value: A. thaliana
  misc_feature: MA Experiment 20001451 PARAMETER Experiment Name: At_Far-red-induction_P Parameter: Plant Line Value: Columbia
  misc_feature: MA Experiment 20001451 PARAMETER Experiment Name: At_Far-red-induction_P Parameter: Timepoint (hr) Value: 24
  misc_feature: MA Experiment 20001451 PARAMETER Experiment Name: At_Far-red-induction_P Parameter: Tissue Value: Whole Plant
  misc_feature: MA Experiment ID: 20001554 Result: Up-regulated in Transcription
  misc_feature: MA Experiment 20001554 PARAMETER Experiment Name: At_Drought_Soil_Dry_P Parameter: Age (day) Value: 21
  misc_feature: MA Experiment 20001554 PARAMETER Experiment Name: At_Drought_Soil_Dry_P Parameter: Organism Value: A. thaliana
  misc_feature: MA Experiment 20001554 PARAMETER Experiment Name: At_Drought_Soil_Dry_P Parameter: Plant Line Value: WS
  misc_feature: MA Experiment 20001554 PARAMETER Experiment Name: At_Drought_Soil_Dry_P Parameter: Post Timepoint (hr) Value: None
  misc_feature: MA Experiment 20001554 PARAMETER Experiment Name: At_Drought_Soil_Dry_P Parameter: Post-Treatment Value: None
  misc_feature: MA Experiment 20001554 PARAMETER Experiment Name: At_Drought_Soil_Dry_P Parameter: Timepoint (day) Value: 7
  misc_feature: MA Experiment 20001554 PARAMETER Experiment Name: At_Drought_Soil_Dry_P Parameter: Treatment Value: Drought vs. No Drought
  misc_feature: MA Experiment ID: 20001555 Result: Up-regulated in Transcription
  misc_feature: MA Experiment 20001555 PARAMETER Experiment Name: At_Drought_Soil_Dry_P Parameter: Age (day) Value: 24
  misc_feature: MA Experiment 20001555 PARAMETER Experiment Name: At_Drought_Soil_Dry_P Parameter: Organism Value: A. thaliana
  misc_feature: MA Experiment 20001555 PARAMETER Experiment Name: At_Drought_Soil_Dry_P Parameter: Plant Line Value: WS
  misc_feature: MA Experiment 20001555 PARAMETER Experiment Name: At_Drought_Soil_Dry_P Parameter: Post Timepoint (hr) Value: None
  misc_feature: MA Experiment 20001555 PARAMETER Experiment Name: At_Drought_Soil_Dry_P Parameter: Post-Treatment Value: None
  misc_feature: MA Experiment 20001555 PARAMETER Experiment Name: At_Drought_Soil_Dry_P Parameter: Timepoint (day) Value: 10
  misc_feature: MA Experiment 20001555 PARAMETER Experiment Name: At_Drought_Soil_Dry_P Parameter: Treatment Value: Drought vs. No Drought
  misc_feature: MA Experiment ID: 20001556 Result: Up-regulated in Transcription
  misc_feature: MA Experiment 20001556 PARAMETER Experiment Name: At_Drought_Soil_Dry_P Parameter: Age (day) Value: 26
  misc_feature: MA Experiment 20001556 PARAMETER Experiment Name: At_Drought_Soil_Dry_P Parameter: Organism Value: A. thaliana
  misc_feature: MA Experiment 20001556 PARAMETER Experiment Name: At_Drought_Soil_Dry_P Parameter: Plant Line Value: WS
  misc_feature: MA Experiment 20001556 PARAMETER Experiment Name: At_Drought_Soil_Dry_P Parameter: Post Timepoint (hr) Value: None
  misc_feature: MA Experiment 20001556 PARAMETER Experiment Name: At_Drought_Soil_Dry_P Parameter: Post-Treatment Value: None
  misc_feature: MA Experiment 20001556 PARAMETER Experiment Name: At_Drought_Soil_Dry_P Parameter: Timepoint (day) Value: 12
  misc_feature: MA Experiment 20001556 PARAMETER Experiment Name: At_Drought_Soil_Dry_P Parameter: Treatment Value: Drought vs. No Drought
  misc_feature: MA Experiment ID: 20001558 Result: Down-regulated in Transcription
  misc_feature: MA Experiment 20001558 PARAMETER Experiment Name: At_Drought_Soil_Dry_P Parameter: Age (day) Value: 27
  misc_feature: MA Experiment 20001558 PARAMETER Experiment Name: At_Drought_Soil_Dry_P Parameter: Organism Value: A. thaliana
  misc_feature: MA Experiment 20001558 PARAMETER Experiment Name: At_Drought_Soil_Dry_P Parameter: Plant Line Value: WS
  misc_feature: MA Experiment 20001558 PARAMETER Experiment Name: At_Drought_Soil_Dry_P Parameter: Post Timepoint (hr) Value: 6
  misc_feature: MA Experiment 20001558 PARAMETER Experiment Name: At_Drought_Soil_Dry_P Parameter: Post-Treatment Value: Re-Water vs. No Drought
  misc_feature: MA Experiment 20001558 PARAMETER Experiment Name: At_Drought_Soil_Dry_P Parameter: Timepoint (day) Value: 13
  misc_feature: MA Experiment 20001558 PARAMETER Experiment Name: At_Drought_Soil_Dry_P Parameter: Treatment Value: Drought vs. No Drought
  misc_feature: MA Experiment ID: 20001559 Result: Up-regulated in Transcription
  misc_feature: MA Experiment 20001559 PARAMETER Experiment Name: At_Drought_Soil_Dry_P Parameter: Age (day) Value: 28
  misc_feature: MA Experiment 20001559 PARAMETER Experiment Name: At_Drought_Soil_Dry_P Parameter: Organism Value: A. thaliana
  misc_feature: MA Experiment 20001559 PARAMETER Experiment Name: At_Drought_Soil_Dry_P Parameter: Plant Line Value: WS
  misc_feature: MA Experiment 20001559 PARAMETER Experiment Name: At_Drought_Soil_Dry_P Parameter: Post Timepoint (hr) Value: 29
  misc_feature: MA Experiment 20001559 PARAMETER Experiment Name: At_Drought_Soil_Dry_P Parameter: Post-Treatment Value: Re-Water vs. No Drought
  misc_feature: MA Experiment 20001559 PARAMETER Experiment Name: At_Drought_Soil_Dry_P Parameter: Timepoint (day) Value: 14
  misc_feature: MA Experiment 20001559 PARAMETER Experiment Name: At_Drought_Soil_Dry_P Parameter: Treatment Value: Drought vs. No Drought
  misc_feature: MA Experiment ID: 20001560 Result: Down-regulated in Transcription
  misc_feature: MA Experiment 20001560 PARAMETER Experiment Name: At_Drought_Soil_Dry_P Parameter: Age (day) Value: 28
  misc_feature: MA Experiment 20001560 PARAMETER Experiment Name: At_Drought_Soil_Dry_P Parameter: Organism Value: A. thaliana
  misc_feature: MA Experiment 20001560 PARAMETER Experiment Name: At_Drought_Soil_Dry_P Parameter: Plant Line Value: WS
  misc_feature: MA Experiment 20001560 PARAMETER Experiment Name: At_Drought_Soil_Dry_P Parameter: Post Timepoint (hr) Value: None
  misc_feature: MA Experiment 20001560 PARAMETER Experiment Name: At_Drought_Soil_Dry_P Parameter: Post-Treatment Value: None
  misc_feature: MA Experiment 20001560 PARAMETER Experiment Name: At_Drought_Soil_Dry_P Parameter: Timepoint (day) Value: 14
  misc_feature: MA Experiment 20001560 PARAMETER Experiment Name: At_Drought_Soil_Dry_P Parameter: Treatment Value: Drought vs. No Drought
  misc_feature: MA Experiment ID: 20001906 Result: Up-regulated in Transcription
  misc_feature: MA Experiment 20001906 PARAMETER Experiment Name: At_Drought_Reproduction_P Parameter: Age (day) Value: 35
  misc_feature: MA Experiment 20001906 PARAMETER Experiment Name: At_Drought_Reproduction_P Parameter: Organism Value: A. thaliana
  misc_feature: MA Experiment 20001906 PARAMETER Experiment Name: At_Drought_Reproduction_P Parameter: Plant Line Value: WS
  misc_feature: MA Experiment 20001906 PARAMETER Experiment Name: At_Drought_Reproduction_P Parameter: Timepoint (day) Value: 5
  misc_feature: MA Experiment 20001906 PARAMETER Experiment Name: At_Drought_Reproduction_P Parameter: Tissue Value: Siliques
  misc_feature: MA Experiment 20001906 PARAMETER Experiment Name: At_Drought_Reproduction_P Parameter: Treatment Value: Drought vs. No Drought
  misc_feature: MA Experiment ID: 20001910 Result: Up-regulated in Transcription
  misc_feature: MA Experiment 20001910 PARAMETER Experiment Name: At_Drought_Reproduction_P Parameter: Age (day) Value: 37
  misc_feature: MA Experiment 20001910 PARAMETER Experiment Name: At_Drought_Reproduction_P Parameter: Organism Value: A. thaliana
  misc_feature: MA Experiment 20001910 PARAMETER Experiment Name: At_Drought_Reproduction_P Parameter: Plant Line Value: WS
  misc_feature: MA Experiment 20001910 PARAMETER Experiment Name: At_Drought_Reproduction_P Parameter: Timepoint (day) Value: 7
  misc_feature: MA Experiment 20001910 PARAMETER Experiment Name: At_Drought_Reproduction_P Parameter: Tissue Value: Flowers
  misc_feature: MA Experiment 20001910 PARAMETER Experiment Name: At_Drought_Reproduction_P Parameter: Treatment Value: Drought vs. No Drought
  misc_feature: MA Experiment ID: 20001911 Result: Up-regulated in Transcription
  misc_feature: MA Experiment 20001911 PARAMETER Experiment Name: At_Drought_Reproduction_P Parameter: Age (day) Value: 40
  misc_feature: MA Experiment 20001911 PARAMETER Experiment Name: At_Drought_Reproduction_P Parameter: Organism Value: A. thaliana
  misc_feature: MA Experiment 20001911 PARAMETER Experiment Name: At_Drought_Reproduction_P Parameter: Plant Line Value: WS
  misc_feature: MA Experiment 20001911 PARAMETER Experiment Name: At_Drought_Reproduction_P Parameter: Timepoint (day) Value: 10
  misc_feature: MA Experiment 20001911 PARAMETER Experiment Name: At_Drought_Reproduction_P Parameter: Tissue Value: Flowers
  misc_feature: MA Experiment 20001911 PARAMETER Experiment Name: At_Drought_Reproduction_P Parameter: Treatment Value: Drought vs. No Drought
  misc_feature: Phenotype: ROSETTE LEAVES Other
  misc_feature: Phenotype: WHOLE PLANT Color-Dark Green
  misc_feature: Phenotype: ROSETTE LEAVES Other
  misc_feature: Phenotype: WHOLE PLANT Color-Dark Green
  misc_feature: Phenotype: WHOLE PLANT Color-Dark Green
ataaagaagtaaagctttgccggagatttagcaaacacaaacacaaaaaacaaaaccaactcagacgaatgtgattttttcttcttgagtgaattgttgtaaaaaaatgatgatcggagaatctcatcgtggttttaatccaacggttcatattcctccatggccactttctgaagatctaacggtgtctgatatttacggaagtccagacggaggaagtagtatgatggaagctttggctgagttacaacgttatcttccgtcaaacgaaccggatccggattcagatccggatctctcgggtccggattcaccaatcgatgcttatacatgcgatcattttcggatgtatgagtttaaagtgagacgttgtgctcgtggccggagccatgattggacggagtgtccttacgctcatcccggagaaaaagctcgccgtcgtgatccgaggaagtttcattactccggtacggcgtgtcctgagtttcgtaaaggttgttgcaagagaggagacgcatgtgagttttctcatggtgtttttgagtgttggcttcacccggcgcgttaccggactcagccgtgtaaagacggtggtaactgtcgccgtcgtgtttgtttctttgctcattcgccggatcagattagggttttgcctaatcaaagccctgatcgtgttgattcgttcgacgttttgtctcctacgattcgtagagcgtttcagttttcgatttctccgtcgtctaactcgccgccggtgagtccacgaggtgactcggactcgtcgtgttcgttactgagtcgttcactcgggtctaatctgggaaacgacgtcgttgcgtctctcaggaatctgcaacttaataaagtgaagtcttctctttcgtcgtcatacaacaatcaaatcggaggatacggatccggattcgggtcgcctcgtggatcggttttgggtcctggtttccgtagcttaccaactacaccgacccgacctggttttatgaacatttgggagaatggcttggaggaagaaccggcgatggaacgggtcgagtcgggtcgtgaactgcgagcgcagctgttcgagaagctgagcaaagagaattgcatgggtcggattgaaccggatccggatcagggagcgggtgatactcctgatgtcgggtgggtctctgacttggttatgtgatttgaaccggattcgtaaaccggagtgtctgaaatttctttgataaagattaattaaaggattattatcggcatgggaggttttttaatggatctcttcttaggaaaagaggagatttctctgcaagttttttttttgtatatttattatttcctaatttcgtataatctctgttccataatcgatgattcgagggagattcctcagtgtataggagttgcttaggatttttcattatgatggattcactaatattgatattgttggttattgttttttttatatattatgatgtaagatgcaagtcgcaatgtaattattaaatatcttatgaatgaaatgagaatgtaaattatttat

SEQ ID NO: 38897 - protein, 359 aa, Arabidopsis thaliana
  peptide (1)..(359): Ceres Seq. ID no. 13497315
  misc_feature (119)..(144): Pfam Name: Zinc finger C-x8-C-x5-C-x3-H type (and similar) Pfam Description: Zinc finger C-x8-C-x5-C-x3-H type (and similar)
  misc_feature (20)..(260): Homolog of NCBI NO: 28273376 NR Description: unknown protein [Oryza sativa (japonica
  misc_feature (7)..(260): Homolog of NCBI NO: 26449538 NR Description: unknown protein [Arabidopsis thaliana]
  misc_feature (7)..(260): Homolog of NCBI NO: 15219557 NR Description: expressed protein [Arabidopsis thaliana]
  misc_feature (258)..(335): Homolog of NCBI NO: 1800279 NR Description: putative Cys3His zinc finger protein ATCTH
  misc_feature (105)..(219): Homolog of NCBI NO: 1800279 NR Description: putative Cys3His zinc finger protein ATCTH
  misc_feature (1)..(223): Homolog of NCBI NO: 34906436 NR Description: putative zinc finger transcription factor
  misc_feature (1)..(219): Homolog of NCBI NO: 21593538 NR Description: putative CCCH-type zinc finger protein
  misc_feature (1)..(219): Homolog of NCBI NO: 15225213 NR Description: CCCH-type zinc finger protein -related
  misc_feature (1)..(359): Homolog of NCBI NO: 15233491 NR Description: expressed protein [Arabidopsis thaliana]
  misc_feature (1)..(359): Homolog of NCBI NO: 15224852 NR Description: CCCH-type zinc finger protein -related
MMIGESHRGFNPTVHIPPWPLSEDLTVSDIYGSPDGGSSMMEALAELQRYLPSNEPDPDSDPDLSGPDSPIDAYTCDHFRMYEFKVRRCARGRSHDWTECPYAHPGEKARRRDPRKFHYSGTACPEFRKGCCKRGDACEFSHGVFECWLHPARYRTQPCKDGGNCRRRVCFFAHSPDQIRVLPNQSPDRVDSFDVLSPTIRRAFQFSISPSSNSPPVSPRGDSDSSCSLLSRSLGSNLGNDVVASLRNLQLNKVKSSLSSSYNNQIGGYGSGFGSPRGSVLGPGFRSLPTTPTRPGFMNIWENGLEEEPAMERVESGRELRAQLFEKLSKENCMGRIEPDPDQGAGDTPDVGWVSDLVM

SEQ ID NO: 38898 - protein, 358 aa, Arabidopsis thaliana
  peptide (1)..(358): Ceres Seq. ID no. 13497316
  misc_feature (118)..(143): Pfam Name: Zinc finger C-x8-C-x5-C-x3-H type (and similar) Pfam Description: Zinc finger C-x8-C-x5-C-x3-H type (and similar)
  misc_feature (19)..(259): Homolog of NCBI NO: 28273376 NR Description: unknown protein [Oryza sativa (japonica
  misc_feature (6)..(259): Homolog of NCBI NO: 26449538 NR Description: unknown protein [Arabidopsis thaliana]
  misc_feature (6)..(259): Homolog of NCBI NO: 15219557 NR Description: expressed protein [Arabidopsis thaliana]
  misc_feature (257)..(334): Homolog of NCBI NO: 1800279 NR Description: putative Cys3His zinc finger protein ATCTH
  misc_feature (104)..(218): Homolog of NCBI NO: 1800279 NR Description: putative Cys3His zinc finger protein ATCTH
  misc_feature (1)..(222): Homolog of NCBI NO: 34906436 NR Description: putative zinc finger transcription factor
  misc_feature (1)..(218): Homolog of NCBI NO: 21593538 NR Description: putative CCCH-type zinc finger protein
  misc_feature (1)..(218): Homolog of NCBI NO: 15225213 NR Description: CCCH-type zinc finger protein -related
  misc_feature (1)..(358): Homolog of NCBI NO: 15233491 NR Description: expressed protein [Arabidopsis thaliana]
  misc_feature (1)..(358): Homolog of NCBI NO: 15224852 NR Description: CCCH-type zinc finger protein -related
MIGESHRGFNPTVHIPPWPLSEDLTVSDIYGSPDGGSSMMEALAELQRYLPSNEPDPDSDPDLSGPDSPIDAYTCDHFRMYEFKVRRCARGRSHDWTECPYAHPGEKARRRDPRKFHYSGTACPEFRKGCCKRGDACEFSHGVFECWLHPARYRTQPCKDGGNCRRRVCFFAHSPDQIRVLPNQSPDRVDSFDVLSPTIRRAFQFSISPSSNSPPVSPRGDSDSSCSLLSRSLGSNLGNDVVASLRNLQLNKVKSSLSSSYNNQIGGYGSGFGSPRGSVLGPGFRSLPTTPTRPGFMNIWENGLEEEPAMERVESGRELRAQLFEKLSKENCMGRIEPDPDQGAGDTPDVGWVSDLVM

SEQ ID NO: 38899 - protein, 320 aa, Arabidopsis thaliana
  peptide (1)..(320): Ceres Seq. ID no. 13497317
  misc_feature (80)..(105): Pfam Name: Zinc finger C-x8-C-x5-C-x3-H type (and similar) Pfam Description: Zinc finger C-x8-C-x5-C-x3-H type (and similar)
  misc_feature (1)..(221): Homolog of NCBI NO: 28273376 NR Description: unknown protein [Oryza sativa (japonica
  misc_feature (1)..(221): Homolog of NCBI NO: 26449538 NR Description: unknown protein [Arabidopsis thaliana]
  misc_feature (1)..(221): Homolog of NCBI NO: 15219557 NR Description: expressed protein [Arabidopsis thaliana]
  misc_feature (219)..(296): Homolog of NCBI NO: 1800279 NR Description: putative Cys3His zinc finger protein ATCTH
  misc_feature (66)..(180): Homolog of NCBI NO: 1800279 NR Description: putative Cys3His zinc finger protein ATCTH
  misc_feature (1)..(184): Homolog of NCBI NO: 34906436 NR Description: putative zinc finger transcription factor
  misc_feature (1)..(180): Homolog of NCBI NO: 21593538 NR Description: putative CCCH-type zinc finger protein
  misc_feature (1)..(180): Homolog of NCBI NO: 15225213 NR Description: CCCH-type zinc finger protein -related
  misc_feature (1)..(320): Homolog of NCBI NO: 15233491 NR Description: expressed protein [Arabidopsis thaliana]
  misc_feature (1)..(320): Homolog of NCBI NO: 15224852 NR Description: CCCH-type zinc finger protein -related
MMEALAELQRYLPSNEPDPDSDPDLSGPDSPIDAYTCDHFRMYEFKVRRCARGRSHDWTECPYAHPGEKARRRDPRKFHYSGTACPEFRKGCCKRGDACEFSHGVFECWLHPARYRTQPCKDGGNCRRRVCFFAHSPDQIRVLPNQSPDRVDSFDVLSPTIRRAFQFSISPSSNSPPVSPRGDSDSSCSLLSRSLGSNLGNDVVASLRNLQLNKVKSSLSSSYNNQIGGYGSGFGSPRGSVLGPGFRSLPTTPTRPGFMNIWENGLEEEPAMERVESGRELRAQLFEKLSKENCMGRIEPDPDQGAGDTPDVGWVSDLVM

SEQ ID NO: 38900 - DNA, 1212 bp, Arabidopsis thaliana
  misc_feature (1)..(1212): Ceres Seq. ID no. 12421334
  misc_feature: MA Experiment ID: 20000171 Result: Up-regulated in Transcription
  misc_feature: MA Experiment 20000171 PARAMETER Experiment Name: At_42deg_Heat_P Parameter: Age (day) Value: 14
  misc_feature: MA Experiment 20000171 PARAMETER Experiment Name: At_42deg_Heat_P Parameter: Organism Value: A. thaliana
  misc_feature: MA Experiment 20000171 PARAMETER Experiment Name: At_42deg_Heat_P Parameter: Plant Line Value: WS
  misc_feature: MA Experiment 20000171 PARAMETER Experiment Name: At_42deg_Heat_P Parameter: Temperature (deg C) Value: 42 vs. 22
  misc_feature: MA Experiment 20000171 PARAMETER Experiment Name: At_42deg_Heat_P Parameter: Timepoint (hr) Value: 1
  misc_feature: MA Experiment 20000171 PARAMETER Experiment Name: At_42deg_Heat_P Parameter: Tissue Value: Aerial
  misc_feature: MA Experiment ID: 20000173 Result: Up-regulated in Transcription
  misc_feature: MA Experiment 20000173 PARAMETER Experiment Name: At_42deg_Heat_P Parameter: Age (day) Value: 14
  misc_feature: MA Experiment 20000173 PARAMETER Experiment Name: At_42deg_Heat_P Parameter: Organism Value: A. thaliana
  misc_feature: MA Experiment 20000173 PARAMETER Experiment Name: At_42deg_Heat_P Parameter: Plant Line Value: WS
  misc_feature: MA Experiment 20000173 PARAMETER Experiment Name: At_42deg_Heat_P Parameter: Temperature (deg C) Value: 42 vs. 22
  misc_feature: MA Experiment 20000173 PARAMETER Experiment Name: At_42deg_Heat_P Parameter: Timepoint (hr) Value: 6
  misc_feature: MA Experiment 20000173 PARAMETER Experiment Name: At_42deg_Heat_P Parameter: Tissue Value: Aerial
  misc_feature: MA Experiment ID: 20000265 Result: Up-regulated in Transcription
  misc_feature: MA Experiment 20000265 PARAMETER Experiment Name: At_Open_Flower_P Parameter: Age (day) Value: 21
  misc_feature: MA Experiment 20000265 PARAMETER Experiment Name: At_Open_Flower_P Parameter: Plant Line Value: WS
  misc_feature: MA Experiment 20000265 PARAMETER Experiment Name: At_Open_Flower_P Parameter: Tissue Value: Closed Flower vs. Whole Plant
  misc_feature: MA Experiment ID: 20000286 Result: Up-regulated in Transcription
  misc_feature: MA Experiment 20000286 PARAMETER Experiment Name: At_Open_Flower_P Parameter: Age (day) Value: 21
  misc_feature: MA Experiment 20000286 PARAMETER Experiment Name: At_Open_Flower_P Parameter: Plant Line Value: WS
  misc_feature: MA Experiment 20000286 PARAMETER Experiment Name: At_Open_Flower_P Parameter: Tissue Value: Half Open vs. Whole Plant
  misc_feature: MA Experiment ID: 20001248 Result: Down-regulated in Transcription
  misc_feature: MA Experiment 20001248 PARAMETER Experiment Name: At_Far-red-induction_P Parameter: Age (day) Value: 7
  misc_feature: MA Experiment 20001248 PARAMETER Experiment Name: At_Far-red-induction_P Parameter: Light Value: Far-red vs. White
  misc_feature: MA Experiment 20001248 PARAMETER Experiment Name: At_Far-red-induction_P Parameter: Organism Value: A. thaliana
  misc_feature: MA Experiment 20001248 PARAMETER Experiment Name: At_Far-red-induction_P Parameter: Plant Line Value: Columbia
  misc_feature: MA Experiment 20001248 PARAMETER Experiment Name: At_Far-red-induction_P Parameter: Timepoint (hr) Value: 4
  misc_feature: MA Experiment 20001248 PARAMETER Experiment Name: At_Far-red-induction_P Parameter: Tissue Value: Whole Plant
atttttctgatattagaaatttagttgaaacattacctgcaaatttgcagttcttaactagatagcttgctcttttagcgatccttaaggtatctgaaattgggggactcttattataaaagatatgatgatttgttactctccaattacaacatgttctaggaatgctatcagtatcaagaggcatttaggctctcgcctctacggcgttgtggctcacggatcatctaaattctcctgctacagtcttttatcaggactttcaagaagacattataccggttttcgtgtatcggtctctaatagaccttctagttggcacgataaaggactttttgggtcagtattgatcaatcgaccaactgttgctcctaaggaaaagcttgaagtttctttcttgtcccctgaggctaatatgaaatgctcgaagatagaatctaacatgagaaatctctattgttattcaagatttgcatatacaggtgtgattgttagcttgcttgtttgttattcttcgacttcccaatcagcgtacgcagattcttcaagggataaagatgctaacaacgtgcatcatcattcgtctgatggtaaattccacaatgggaaaagagtttatactgattactctatcattggtattccgggggatggcagatgtttgtttcgttctgtagctcacggattctgcttacgctctgggaaactagctccaggcgagaagatgcagagagaactcgctgacgaattacgtaccagggttgctgatgagtttatccaaagaagacaggaaacagaatggttcgtggaaggagatttcgacacctacgtcagacaaattcgggatccacacgtgtggggaggtgaacctgaactcttcatggcttcacacgttctccagatgccaatcacagtgtatatgaaagacgataaagctggaggactgataagtattgcagaatatggtcaagaatacggtaaagacgacccaatccgagtcctataccatggttttggtcattacgatgcccttttgcttcacgagagtaaagcttcgattccaaaatctaaactttagtatacttagttttgcatctttgacttttgtcaggtgttgatgatgtttttgtttactgacacaaccactatctgtatgccttgtagaatgtaacctttttttaccttttactttgaataaaaattttcagtttc

SEQ ID NO: 38901 - protein, 317 aa, Arabidopsis thaliana; identical to SEQ ID NO: 21240
  peptide (1)..(317): Ceres Seq. ID no. 12421335
  misc_feature (174)..(300): Pfam Name: OTU-like cysteine protease Pfam Description: OTU-like cysteine protease
  misc_feature (171)..(213): Homolog of NCBI NO: 34907704 NR Description: P0035F12.12 [Oryza sativa (japonica
  misc_feature (168)..(287): Homolog of NCBI NO: 34902010 NR Description: unknown protein [Oryza sativa (japonica
  misc_feature (1)..(317): Homolog of NCBI NO: 11280708 NR Description: hypothetical protein T10K17.20 - Arabidopsis
  misc_feature (1)..(317): Homolog of NCBI NO: 18410816 NR Description: auxin-regulated protein

SEQ ID NO: 38902 - protein, 316 aa, Arabidopsis thaliana; identical to SEQ ID NO: 21241
  peptide (1)..(316): Ceres Seq. ID no. 12421336
  misc_feature (173)..(299): Pfam Name: OTU-like cysteine protease Pfam Description: OTU-like cysteine protease
  misc_feature (170)..(212): Homolog of NCBI NO: 34907704 NR Description: P0035F12.12 [Oryza sativa (japonica
  misc_feature (167)..(286): Homolog of NCBI NO: 34902010 NR Description: unknown protein [Oryza sativa (japonica
  misc_feature (1)..(316): Homolog of NCBI NO: 11280708 NR Description: hypothetical protein T10K17.20 - Arabidopsis
  misc_feature (1)..(316): Homolog of NCBI NO: 18410816 NR Description: auxin-regulated protein

SEQ ID NO: 38903 - protein, 220 aa, Arabidopsis thaliana; identical to SEQ ID NO: 21242
  peptide (1)..(220): Ceres Seq. ID no. 12421337
  misc_feature (77)..(203): Pfam Name: OTU-like cysteine protease Pfam Description: OTU-like cysteine protease
  misc_feature (74)..(116): Homolog of NCBI NO: 34907704 NR Description: P0035F12.12 [Oryza sativa (japonica
  misc_feature (71)..(190): Homolog of NCBI NO: 34902010 NR Description: unknown protein [Oryza sativa (japonica
  misc_feature (1)..(220): Homolog of NCBI NO: 11280708 NR Description: hypothetical protein T10K17.20 - Arabidopsis
  misc_feature (1)..(220): Homolog of NCBI NO: 18410816 NR Description: auxin-regulated protein

SEQ ID NO: 38904 - DNA, 1289 bp, Arabidopsis thaliana
  misc_feature (1)..(1289): Ceres Seq. ID no. 12580406
  misc_feature: MA Experiment ID: 108434 Result: Down-regulated in Transcription
  misc_feature: MA Experiment 108434 PARAMETER Experiment Name: At_Root_Tips_cDNA_P Parameter: Tissue Value: Root Tips
gaaacagaaggcttaatatcaacatcttaaaatttactaaaaattgaaaacactaaagaggaaattaagtgaccaagtcttcttcttctttactctctcctttctgttaccgtcgaaaaaatcgagctaatgtccggtgataaccagatccgaatcggactcttaagctgcacaaacaaagtccgcaaactctctcgagctataaatctctctccaaacgctactatatccgccatagccaccacaagctccatcgaagaagcaaaatcatttgctaaatccaacaatttccctccgaatacaaagatccacagctcctacgagtcacttctagaagatcccgacgtcgacgccgtctatttccctatccccactcgcctccacgtcgagtgggctacactcgccgctattaagggtaaacatatactccttgataagcctgttgctttaaacgtagctgagtttgatcagatcgttgaagcttgtgaggttaatggtgttcaatttatggatggaactcagtggatgcataaccctagaacggataagattaaggaatttgtgaatgatttagagacttttggtcagattaaatctttgtttctcatttgctgcgagtgatgatttcttaaaacatgatattcgtgtaaagcctggtcttgatggacttggagctctcggtgatgctggatggtatacgatccaagcgattcttcttgttaacaactttaaacttccaaagaccgttactgctttgtcctgttctgttttaaacgatgcggggattgttctttcttgtggtgcgttgtttgattgggaagatggggtcaatgcaacgatttactgttctttcttggcgaatttgacgatggagataactgcgattggtacgaaaggtagccttcgggttcatgattttgttataccgtatatggaaaccgaggctgtgtttactacaagtggtggaggttgtgttagtgaacataaagttatgactgtgcttccacaagagacgtgtatggttatggagtttgctcggttggttggagaaattaaaaacagaggagctaaaccggatgggttttggatgaggtttagccggaatacgcagttgcttgttgatgctgtgaaagagtcgattgataataaccttgaacccgtgtttctctccggccggtgagaaagagcttagaagttagattagctttgtatttttctataaaaaaaatatcatgacacatgtcaacatttaatcgataaatttggcataaaatatcgaaaacaatttc

SEQ ID NO: 38905 - protein, 163 aa, Arabidopsis thaliana
  peptide (1)..(163): Ceres Seq. ID no. 12580407
  misc_feature (7)..(130): Pfam Name: Oxidoreductase family, NAD-binding Rossmann fold Pfam Description: Oxidoreductase family, NAD-binding Rossmann fold
  misc_feature (7)..(130): Pfam Name: Oxidoreductase family, NAD-binding Rossmann fold Pfam Description: Oxidoreductase family, NAD-binding Rossmann fold
  misc_feature (5)..(155): Homolog of NCBI NO: 15616405 NR Description: oxidoreductase [Bacillus halodurans]
  misc_feature (8)..(157): Homolog of NCBI NO: 32474689 NR Description: putative oxidoreductase [Pirellula sp.]
  misc_feature (8)..(157): Homolog of NCBI NO: 17549134 NR Description: CONSERVED HYPOTHETICAL PROTEIN [Ralstonia
  misc_feature (1)..(158): Homolog of NCBI NO: 15218937 NR Description: oxidoreductase, putative; protein id: At1g66130.1
  misc_feature (7)..(158): Homolog of NCBI NO: 37534168 NR Description: putative oxidoreductase [Oryza sativa (japonica
  misc_feature (5)..(155): Homolog of NCBI NO: 15616405 NR Description: oxidoreductase [Bacillus halodurans]
  misc_feature (8)..(157): Homolog of NCBI NO: 17549134 NR Description: CONSERVED HYPOTHETICAL PROTEIN [Ralstonia
  misc_feature (7)..(158): Homolog of NCBI NO: 37534168 NR Description: putative oxidoreductase [Oryza sativa (japonica
  misc_feature (1)..(158): Homolog of NCBI NO: 18399170 NR Description: expressed protein
  misc_feature (1)..(158): Homolog of NCBI NO: 25518452 NR Description: hypothetical protein F23M19.12 [imported] -
  misc_feature (1)..(157): Homolog of NCBI NO: 15233990 NR Description: AX110P -like protein
  misc_feature (25)..(157): Homolog of NCBI NO: 21954073 NR Description: putative AX110P protein [Arabidopsis thaliana]
  misc_feature (7)..(162): Homolog of NCBI NO: 7488933 NR Description: protein AX110P - carrot
  misc_feature (1)..(158): Homolog of NCBI NO: 15218937 NR Description: oxidoreductase, putative; protein id: At1g66130.1
  misc_feature (8)..(157): Homolog of NCBI NO: 32474689 NR Description: putative oxidoreductase [Pirellula sp.]
  misc_feature (7)..(162): Homolog of NCBI NO: 7488933 NR Description: protein AX110P - carrot
  misc_feature (25)..(157): Homolog of NCBI NO: 21954073 NR Description: putative AX110P protein [Arabidopsis thaliana]
  misc_feature (1)..(157): Homolog of NCBI NO: 15233990 NR Description: AX110P -like protein
  misc_feature (1)..(158): Homolog of NCBI NO: 25518452 NR Description: hypothetical protein F23M19.12 [imported] -
  misc_feature (1)..(158): Homolog of NCBI NO: 18399170 NR Description: expressed protein
MSGDNQIRIGLLSCTNKVRKLSRAINLSPNATISAIATTSSIEEAKSFAKSNNFPPNTKIHSSYESLLEDPDVDAVYFPIPTRLHVEWATLAAIKGKHILLDKPVALNVAEFDQIVEACEVNGVQFMDGTQWMHNPRTDKIKEFVNDLETFGQIKSLFLICCE

SEQ ID NO: 38906 - protein, 103 aa, Arabidopsis thaliana
  peptide (1)..(103): Ceres Seq. ID no. 12580408
  misc_feature (1)..(30): Homolog of NCBI NO: 32474689 NR Description: putative oxidoreductase [Pirellula sp.]
  misc_feature (1)..(98): Homolog of NCBI NO: 17549134 NR Description: CONSERVED HYPOTHETICAL PROTEIN [Ralstonia
  misc_feature (1)..(47): Homolog of NCBI NO: 15218937 NR Description: oxidoreductase, putative; protein id: At1g66130.1
  misc_feature (1)..(100): Homolog of NCBI NO: 15218937 NR Description: oxidoreductase, putative; protein id: At1g66130.1
  misc_feature (1)..(56): Homolog of NCBI NO: 37534168 NR Description: putative oxidoreductase [Oryza sativa (japonica
  misc_feature (1)..(91): Homolog of NCBI NO: 7488933 NR Description: protein AX110P - carrot
  misc_feature (1)..(103): Homolog of NCBI NO: 21954073 NR Description: putative AX110P protein [Arabidopsis thaliana]
  misc_feature (1)..(103): Homolog of NCBI NO: 15233990 NR Description: AX110P -like protein
  misc_feature (1)..(103): Homolog of NCBI NO: 25518452 NR Description: hypothetical protein F23M19.12 [imported] -
  misc_feature (1)..(103): Homolog of NCBI NO: 18399170 NR Description: expressed protein
  misc_feature (1)..(30): Homolog of NCBI NO: 32474689 NR Description: putative oxidoreductase [Pirellula sp.]
  misc_feature (1)..(98): Homolog of NCBI NO: 17549134 NR Description: CONSERVED HYPOTHETICAL PROTEIN [Ralstonia
  misc_feature (1)..(47): Homolog of NCBI NO: 15218937 NR Description: oxidoreductase, putative; protein id: At1g66130.1
  misc_feature (1)..(100): Homolog of NCBI NO: 15218937 NR Description: oxidoreductase, putative; protein id: At1g66130.1
  misc_feature (1)..(56): Homolog of NCBI NO: 37534168 NR Description: putative oxidoreductase [Oryza sativa (japonica
  misc_feature (1)..(91): Homolog of NCBI NO: 7488933 NR Description: protein AX110P - carrot
  misc_feature (1)..(103): Homolog of NCBI NO: 21954073 NR Description: putative AX110P protein [Arabidopsis thaliana]
  misc_feature (1)..(103): Homolog of NCBI NO: 15233990 NR Description: AX110P -like protein
  misc_feature (1)..(103): Homolog of NCBI NO: 25518452 NR Description: hypothetical protein F23M19.12 [imported] -
  misc_feature (1)..(103): Homolog of NCBI NO: 18399170 NR Description: expressed protein
MEITAIGTKGSLRVHDFVIPYMETEAVFTTSGGGCVSEHKVMTVLPQETCMVMEFARLVGEIKNRGAKPDGFWMRFSRNTQLLVDAVKESIDNNLEPVFLSGR

SEQ ID NO: 38907 - protein, 82 aa, Arabidopsis thaliana
  peptide (1)..(82): Ceres Seq. ID no. 12580409
  misc_feature (1)..(77): Homolog of NCBI NO: 17549134 NR Description: CONSERVED HYPOTHETICAL PROTEIN [Ralstonia
  misc_feature (1)..(26): Homolog of NCBI NO: 15218937 NR Description: oxidoreductase, putative; protein id: At1g66130.1
  misc_feature (1)..(79): Homolog of NCBI NO: 15218937 NR Description: oxidoreductase, putative; protein id: At1g66130.1
  misc_feature (1)..(35): Homolog of NCBI NO: 37534168 NR Description: putative oxidoreductase [Oryza sativa (japonica
  misc_feature (1)..(70): Homolog of NCBI NO: 7488933 NR Description: protein AX110P - carrot
  misc_feature (1)..(82): Homolog of NCBI NO: 21954073 NR Description: putative AX110P protein [Arabidopsis thaliana]
  misc_feature (1)..(82): Homolog of NCBI NO: 15233990 NR Description: AX110P -like protein
  misc_feature (1)..(82): Homolog of NCBI NO: 25518452 NR Description: hypothetical protein F23M19.12 [imported] -
  misc_feature (1)..(82): Homolog of NCBI NO: 18399170 NR Description: expressed protein
  misc_feature (1)..(77): Homolog of NCBI NO: 17549134 NR Description: CONSERVED HYPOTHETICAL PROTEIN [Ralstonia
  misc_feature (1)..(26): Homolog of NCBI NO: 15218937 NR Description: oxidoreductase, putative; protein id: At1g66130.1
  misc_feature (1)..(79): Homolog of NCBI NO: 15218937 NR Description: oxidoreductase, putative; protein id: At1g66130.1
  misc_feature (1)..(35): Homolog of NCBI NO: 37534168 NR Description: putative oxidoreductase [Oryza sativa (japonica
  misc_feature (1)..(70): Homolog of NCBI NO: 7488933 NR Description: protein AX110P - carrot
  misc_feature (1)..(82): Homolog of NCBI NO: 21954073 NR Description: putative AX110P protein [Arabidopsis thaliana]
  misc_feature (1)..(82): Homolog of NCBI NO: 15233990 NR Description: AX110P -like protein
  misc_feature (1)..(82): Homolog of NCBI NO: 25518452 NR Description: hypothetical protein F23M19.12 [imported] -
  misc_feature (1)..(82): Homolog of NCBI NO: 18399170 NR Description: expressed protein
METEAVFTTSGGGCVSEHKVMTVLPQETCMVMEFARLVGEIKNRGAKPDGFWMRFSRNTQLLVDAVKESIDNNLEPVFLSGR

SEQ ID NO: 38908 - DNA, 1378 bp, Arabidopsis thaliana
  misc_feature (1)..(1378): Ceres Seq. ID no. 13574988
  misc_feature: MA Experiment ID: 20000185 Result: Down-regulated in Transcription
  misc_feature: MA Experiment 20000185 PARAMETER Experiment Name: At_Roots__P Parameter: Age (day) Value: 7 vs. 21
  misc_feature: MA Experiment 20000185 PARAMETER Experiment Name: At_Roots__P Parameter: Organism Value: A. thaliana
  misc_feature: MA Experiment 20000185 PARAMETER Experiment Name: At_Roots__P Parameter: Tissue Value: Roots vs. Whole Plant
  misc_feature: MA Experiment ID: 20000438 Result: Up-regulated in Transcription
  misc_feature: MA Experiment 20000438 PARAMETER Experiment Name: At_Shoots__P Parameter: Age (day) Value: 14
  misc_feature: MA Experiment 20000438 PARAMETER Experiment Name: At_Shoots__P Parameter: Tissue Value: Shoots vs. Whole Plant
  misc_feature: MA Experiment ID: 20000439 Result: Down-regulated in Transcription
  misc_feature: MA Experiment 20000439 PARAMETER Experiment Name: At_Roots__P Parameter: Age (day) Value: 14 vs. 21
  misc_feature: MA Experiment 20000439 PARAMETER Experiment Name: At_Roots__P Parameter: Organism Value: A. thaliana
  misc_feature: MA Experiment 20000439 PARAMETER Experiment Name: At_Roots__P Parameter: Tissue Value: Roots vs. Whole Plant
  misc_feature: MA Experiment ID: 20001451 Result: Down-regulated in Transcription
  misc_feature: MA Experiment 20001451 PARAMETER Experiment Name: At_Far-red-induction_P Parameter: Age (day) Value: 7
  misc_feature: MA Experiment 20001451 PARAMETER Experiment Name: At_Far-red-induction_P Parameter: Light Value: Far-red vs. White
  misc_feature: MA Experiment 20001451 PARAMETER Experiment Name: At_Far-red-induction_P Parameter: Organism Value: A. thaliana
  misc_feature: MA Experiment 20001451 PARAMETER Experiment Name: At_Far-red-induction_P Parameter: Plant Line Value: Columbia
  misc_feature: MA Experiment 20001451 PARAMETER Experiment Name: At_Far-red-induction_P Parameter: Timepoint (hr) Value: 24
  misc_feature: MA Experiment 20001451 PARAMETER Experiment Name: At_Far-red-induction_P Parameter: Tissue Value: Whole Plant
aagccgctgcattggatcatccgaacaaggaagacgttacccacgagaccgtaatcacacgtggcggattctcagatattctctctttttcttctttacccggaaaaataaagtttctgttcttcttttttcttctctgggtttgagaattggtgtaagagaaacgattgaggttttctcttattatctaaacccaccaagtctttcaggattttagccagagaagcttgagtctttgattagggacatgtcaacctccgccgcttccttgtgttgttcatcaacccaggtcaatgggtttggtcttaggcctgaaaggtcgcttctttaccaacccacttccttttctttctccagaaggagaactcatggaattgtcaaggcctcatctcgggttgataggttttcgaaaagtgatatcattgtttctccctctattctctcggctaatttcgccaaattaggcgagcaggtaaaagcagtggagttggcaggttgtgattggattcatgttgatgtcatggacggtcgttttgttcccaacattactatcggacctctcgtggttgatgctttgcgccctgtgacagatcttcctttggatgttcatctgatgatagtggaacccgagcagagagtaccggatttcatcaaagcaggtgcagatattgtcagtgtacattgtgaacagcaatccaccatccatttgcatcgtaccgtcaatcaaataaaaagcttaggggctaaagctggagttgttctaaaccctggaaccccattgagtgcaatagaatatgtcttggatatggtggatctggtcttgatcatgtcggtcaaccctggttttggtggacagagctttattgaaagccaagtaaagaaaatctcggacttgaggaaaatgtgtgcagagaagggagtaaacccatggattgaagttgatggtggtgtcactccagcgaatgcgtacaaggttattgaggctggagcaaatgctctagtggctggatcagctgtatttggagctaaggactacgcagaagctataaaaggaattaaggccagcaaacgaccagcagctgtagctgtgtaatgtgaagcaacagcaagcgaaaagactctgttaaacttaggaacagttaaaaagtgaatgacgatcaccagaagtcccagatgttgtcgttgtgtctccattcgccataacattcacaagaatcaaactcaatatcttcaaagtaggctcctctatactattctgtaccattgtcttgtaaattgaggatatgcagattccatacattttgcaatgaaacactgtgataagaaatatgttgttacatatgtgtttttgacttataataaagcatttcatttgtct

SEQ ID NO: 38909 - protein, 281 aa, Arabidopsis thaliana
  peptide (1)..(281): Ceres Seq. ID no. 13574989
  misc_feature (59)..(261): Pfam Name: Ribulose-phosphate 3 epimerase family Pfam Description: Ribulose-phosphate 3 epimerase family
  misc_feature (54)..(276): Homolog of NCBI NO: 17228277 NR Description: ribulose-phosphate 3-epimerase [Nostoc sp. PCC
  misc_feature (48)..(276): Homolog of NCBI NO: 4930130 NR Description: Chain A, D-Ribulose-5-Phosphate 3-Epimerase From
  misc_feature (6)..(279): Homolog of NCBI NO: 6647761 NR Description: Ribulose-phosphate 3-epimerase, chloroplast
  misc_feature (6)..(279): Homolog of NCBI NO: 19071636 NR Description: ribulose-5-phosphate-3-epimerase
  misc_feature (46)..(281): Homolog of NCBI NO: 3264792 NR Description: ribulose-phosphate 3-epimerase mature form
  misc_feature (4)..(281): Homolog of NCBI NO: 2499728 NR Description: Ribulose-phosphate 3-epimerase, chloroplast
  misc_feature (5)..(281): Homolog of NCBI NO: 3264790 NR Description: ribulose-phosphate 3-epimerase transit form
  misc_feature (4)..(281): Homolog of NCBI NO: 2833386 NR Description: Ribulose-phosphate 3-epimerase, chloroplast
  misc_feature (1)..(281): Homolog of NCBI NO: 20339362 NR Description: ribulose-5-phosphate-3-epimerase [Pisum sativum]
  misc_feature (1)..(281): Homolog of NCBI NO: 15240250 NR Description: ribulose-5-phosphate-3-epimerase [Arabidopsis
MSTSAASLCCSSTQVNGFGLRPERSLLYQPTSFSFSRRRTHGIVKASSRVDRFSKSDIIVSPSILSANFAKLGEQVKAVELAGCDWIHVDVMDGRFVPNITIGPLVVDALRPVTDLPLDVHLMIVEPEQRVPDFIKAGADIVSVHCEQQSTIHLHRTVNQIKSLGAKAGVVLNPGTPLSAIEYVLDMVDLVLIMSVNPGFGGQSFIESQVKKISDLRKMCAEKGVNPWIEVDGGVTPANAYKVIEAGANALVAGSAVFGAKDYAEAIKGIKASKRPAAVAV

SEQ ID NO: 38910 - protein, 190 aa, Arabidopsis thaliana
  peptide (1)..(190): Ceres Seq. ID no. 13574990
  misc_feature (1)..(170): Pfam Name: Ribulose-phosphate 3 epimerase family Pfam Description: Ribulose-phosphate 3 epimerase family
  misc_feature (1)..(185): Homolog of NCBI NO: 17228277 NR Description: ribulose-phosphate 3-epimerase [Nostoc sp. PCC
  misc_feature (1)..(185): Homolog of NCBI NO: 4930130 NR Description: Chain A, D-Ribulose-5-Phosphate 3-Epimerase From
  misc_feature (1)..(188): Homolog of NCBI NO: 6647761 NR Description: Ribulose-phosphate 3-epimerase, chloroplast
  misc_feature (1)..(188): Homolog of NCBI NO: 19071636 NR Description: ribulose-5-phosphate-3-epimerase
  misc_feature (1)..(190): Homolog of NCBI NO: 3264792 NR Description: ribulose-phosphate 3-epimerase mature form
  misc_feature (1)..(190): Homolog of NCBI NO: 2499728 NR Description: Ribulose-phosphate 3-epimerase, chloroplast
  misc_feature (1)..(190): Homolog of NCBI NO: 3264790 NR Description: ribulose-phosphate 3-epimerase transit form
  misc_feature (1)..(190): Homolog of NCBI NO: 2833386 NR Description: Ribulose-phosphate 3-epimerase, chloroplast
  misc_feature (1)..(190): Homolog of NCBI NO: 20339362 NR Description: ribulose-5-phosphate-3-epimerase [Pisum sativum]
  misc_feature (1)..(190): Homolog of NCBI NO: 15240250 NR Description: ribulose-5-phosphate-3-epimerase [Arabidopsis
MDGRFVPNITIGPLVVDALRPVTDLPLDVHLMIVEPEQRVPDFIKAGADIVSVHCEQQSTIHLHRTVNQIKSLGAKAGVVLNPGTPLSAIEYVLDMVDLVLIMSVNPGFGGQSFIESQVKKISDLRKMCAEKGVNPWIEVDGGVTPANAYKVIEAGANALVAGSAVFGAKDYAEAIKGIKASKRPAAVAV

SEQ ID NO: 38911 - protein, 159 aa, Arabidopsis thaliana
  peptide (1)..(159): Ceres Seq. ID no. 13574991
  misc_feature (1)..(139): Pfam Name: Ribulose-phosphate 3 epimerase family Pfam Description: Ribulose-phosphate 3 epimerase family
  misc_feature (1)..(154): Homolog of NCBI NO: 17228277 NR Description: ribulose-phosphate 3-epimerase [Nostoc sp. PCC
  misc_feature (1)..(154): Homolog of NCBI NO: 4930130 NR Description: Chain A, D-Ribulose-5-Phosphate 3-Epimerase From
  misc_feature (1)..(157): Homolog of NCBI NO: 6647761 NR Description: Ribulose-phosphate 3-epimerase, chloroplast
  misc_feature (1)..(157): Homolog of NCBI NO: 19071636 NR Description: ribulose-5-phosphate-3-epimerase
  misc_feature (1)..(159): Homolog of NCBI NO: 3264792 NR Description: ribulose-phosphate 3-epimerase mature form
  misc_feature (1)..(159): Homolog of NCBI NO: 2499728 NR Description: Ribulose-phosphate 3-epimerase, chloroplast
  misc_feature (1)..(159): Homolog of NCBI NO: 3264790 NR Description: ribulose-phosphate 3-epimerase transit form
  misc_feature (1)..(159): Homolog of NCBI NO: 2833386 NR Description: Ribulose-phosphate 3-epimerase, chloroplast
  misc_feature (1)..(159): Homolog of NCBI NO: 20339362 NR Description: ribulose-5-phosphate-3-epimerase [Pisum sativum]
  misc_feature (1)..(159): Homolog of NCBI NO: 15240250 NR Description: ribulose-5-phosphate-3-epimerase [Arabidopsis
MIVEPEQRVPDFIKAGADIVSVHCEQQSTIHLHRTVNQIKSLGAKAGVVLNPGTPLSAIEYVLDMVDLVLIMSVNPGFGGQSFIESQVKKISDLRKMCAEKGVNPWIEVDGGVTPANAYKVIEAGANALVAGSAVFGAKDYAEAIKGIKASKRPAAVAV

SEQ ID NO: 38912 - DNA, 1402 bp, Arabidopsis thaliana
  misc_feature (1)..(1402): Ceres Seq. ID no. 12328386
  misc_feature: MA Experiment ID: 108595 Result: Down-regulated in Transcription
  misc_feature: MA Experiment 108595 PARAMETER Experiment Name: At_Ler-pi_Ovule_cDNA_P Parameter: Plant Line Value: null
  misc_feature: MA Experiment ID: 20000113 Result: Down-regulated in Transcription
  misc_feature: MA Experiment 20000113 PARAMETER Experiment Name: At_42deg_Heat_cDNA_P Parameter: Temperature (deg C) Value: 42 vs. 22
  misc_feature: MA Experiment 20000113 PARAMETER Experiment Name: At_42deg_Heat_cDNA_P Parameter: Timepoint (hr) Value: 8
  misc_feature: MA Experiment 20000113 PARAMETER Experiment Name: At_42deg_Heat_cDNA_P Parameter: Tissue Value: Aerial
  misc_feature: MA Experiment ID: 20000315 Result: Down-regulated in Transcription
  misc_feature: MA Experiment 20000315 PARAMETER Experiment Name: At_14day_Shoots-Roots_Sub_P Parameter: Age (day) Value: 14
  misc_feature: MA Experiment 20000315 PARAMETER Experiment Name: At_14day_Shoots-Roots_Sub_P Parameter: Organism Value: A. thaliana
  misc_feature: MA Experiment 20000315 PARAMETER Experiment Name: At_14day_Shoots-Roots_Sub_P Parameter: Plant Line Value: WS
  misc_feature: MA Experiment 20000315 PARAMETER Experiment Name: At_14day_Shoots-Roots_Sub_P Parameter: Tissue Value: Shoots vs. Whole Plant
  misc_feature: MA Experiment ID: 20000328 Result: Down-regulated in Transcription
  misc_feature: MA Experiment 20000328 PARAMETER Experiment Name: At_42deg_Heat_Sub_P Parameter: Age (day) Value: 14
  misc_feature: MA Experiment 20000328 PARAMETER Experiment Name: At_42deg_Heat_Sub_P Parameter: Organism Value: A. thaliana
  misc_feature: MA Experiment 20000328 PARAMETER Experiment Name: At_42deg_Heat_Sub_P Parameter: Plant Line Value: WS
  misc_feature: MA Experiment 20000328 PARAMETER Experiment Name: At_42deg_Heat_Sub_P Parameter: Temperature (deg C) Value: 42 vs. 22
  misc_feature: MA Experiment 20000328 PARAMETER Experiment Name: At_42deg_Heat_Sub_P Parameter: Timepoint (hr) Value: 6
  misc_feature: MA Experiment 20000328 PARAMETER Experiment Name: At_42deg_Heat_Sub_P Parameter: Tissue Value: Aerial
aaaactttgtctcatcgcatctttttccccaaattctcacaaaccttctcttctcaattccaccaaaccctcagattctcaatctccgatcgtcggaaattctcagcgatggccggagctggcgtcgatgatttcgttaaaggaaatgtttttccgaatggtgtcgctctcatcactctcgatcgaaccaaagctctcaacgccatgaatttagatatggatataaagtataaaagctttcttgatgaatgggaatctgatccgagagtgaaatgtgttatcgttgaaggaagcacatctagggccttttgtgcagggatggatattaaaggagttgctgcagaaatccaaaaggacaaaaacacacctcttgtgcaaaaggtatttacagcagagtatacactgatatgtgcaattgctgcgtacaaaaagccatatatttcattgatggatggtataacaatgggatttggtcttggtctttctggacatggtcgctaccgtgtgataacagagaggacggttcttgccatgccagaaaatggaattggcttgttccctgatgtcgggttttcatatatagcagctcatagccctggaggaggatctgttggtgcttatcttggtttgactggtaaaaggatctccgcgccatcagacgcactgttcgttggtcttgggacgcattatgtaccatctgaaaagctagcttcattaaaggaagccattttgtcagctaacctttctgaggatcctaatcaagacatccaagcaactttatcaaaatacagcagcaatcctgaatctgaggcccatctcaaatcacttttgcctcacatagagtcagcctttagctcaaataagtctattaaggaaacaatagaagagctcaaaaagtaccagcaaagcactgagtcttcagttgtagaatgggctaatgaggcactcaaaggtttggaaaaaggagcaccattttctctttacctaacacaaaagtatttctccaatgttgcatgtgccaagagtaaacccgaaaacgaattagcaacacttaatggcgtaatgaaaactgagtatcgcattgcactaagatctgccctgcgtggtgattttgctgaaggtgttagagcagttttgattgacaaggatcagaatccaaaatggaacccgacaagcattgaagaggtagacgaaaacgaagtggaagctctgtttaaaccattaagtccagaagtggaagagttaaaagtctgattctcattttgctttctctgtttaagaactgtccaccaaagtattctatgaataaaaacaaatctttagccatgtgttgaagaagcttgttactgtataacctattcaataaattggcactttttttgaaccgttgcagattatcttt

SEQ ID NO: 38913 - protein, 417 aa, Arabidopsis thaliana
  peptide (1)..(417): Ceres Seq. ID no. 12328387
  misc_feature (56)..(232): Pfam Name: Enoyl-CoA hydratase/isomerase family Pfam Description: Enoyl-CoA hydratase/isomerase family
  misc_feature (291)..(416): Homolog of NCBI NO: 15224539 NR Description: 3-hydroxyisobutyryl-coenzyme A hydrolase; protein
  misc_feature (19)..(260): Homolog of NCBI NO: 15224539 NR Description: 3-hydroxyisobutyryl-coenzyme A hydrolase; protein
  misc_feature (53)..(417): Homolog of NCBI NO: 15239206 NR Description: 3-hydroxyisobutyryl-coenzyme A hydrolase
  misc_feature (355)..(390): Homolog of NCBI NO: 23016278 NR Description: hypothetical protein [Magnetospirillum
  misc_feature (58)..(298): Homolog of NCBI NO: 23016278 NR Description: hypothetical protein [Magnetospirillum
  misc_feature (310)..(411): Homolog of NCBI NO: 23013936 NR Description: hypothetical protein [Magnetospirillum
  misc_feature (39)..(332): Homolog of NCBI NO: 23013936 NR Description: hypothetical protein [Magnetospirillum
  misc_feature (40)..(417): Homolog of NCBI NO: 15230101 NR Description: 3-hydroxyisobutyryl-coenzyme A hydrolase, putative
  misc_feature (4)..(417): Homolog of NCBI NO: 11994698 NR Description: 3-hydroxyisobutyryl-coenzyme A hydrolase-like
  misc_feature (37)..(417): Homolog of NCBI NO: 15235689 NR Description: 3-hydroxyisobutyryl-coenzyme A hydrolase - like
KTLSHRIFFPKFSQTFSSQFHQTLRFSISDRRKFSAMAGAGVDDFVKGNVFPNGVALITLDRTKALNAMNLDMDIKYKSFLDEWESDPRVKCVIVEGSTSRAFCAGMDIKGVAAEIQKDKNTPLVQKVFTAEYTLICAIAAYKKPYISLMDGITMGFGLGLSGHGRYRVITERTVLAMPENGIGLFPDVGFSYIAAHSPGGGSVGAYLGLTGKRISAPSDALFVGLGTHYVPSEKLASLKEAILSANLSEDPNQDIQATLSKYSSNPESEAHLKSLLPHIESAFSSNKSIKETIEELKKYQQSTESSVVEWANEALKGLEKGAPFSLYLTQKYFSNVACAKSKPENELATLNGVMKTEYRIALRSALRGDFAEGVRAVLIDKDQNPKWNPTSIEEVDENEVEALFKPLSPEVEELKV

SEQ ID NO: 38914 - protein, 381 aa, Arabidopsis thaliana
  peptide (1)..(381): Ceres Seq. ID no. 12328388
  misc_feature (20)..(196): Pfam Name: Enoyl-CoA hydratase/isomerase family Pfam Description: Enoyl-CoA hydratase/isomerase family
  misc_feature (255)..(380): Homolog of NCBI NO: 15224539 NR Description: 3-hydroxyisobutyryl-coenzyme A hydrolase; protein
  misc_feature (1)..(224): Homolog of NCBI NO: 15224539 NR Description: 3-hydroxyisobutyryl-coenzyme A hydrolase; protein
  misc_feature (17)..(381): Homolog of NCBI NO: 15239206 NR Description: 3-hydroxyisobutyryl-coenzyme A hydrolase
  misc_feature (319)..(354): Homolog of NCBI NO: 23016278 NR Description: hypothetical protein [Magnetospirillum
  misc_feature (22)..(262): Homolog of NCBI NO: 23016278 NR Description: hypothetical protein [Magnetospirillum
  misc_feature (274)..(375): Homolog of NCBI NO: 23013936 NR Description: hypothetical protein [Magnetospirillum
  misc_feature (3)..(296): Homolog of NCBI NO: 23013936 NR Description: hypothetical protein [Magnetospirillum
  misc_feature (4)..(381): Homolog of NCBI NO: 15230101 NR Description: 3-hydroxyisobutyryl-coenzyme A hydrolase, putative
  misc_feature (1)..(381): Homolog of NCBI NO: 11994698 NR Description: 3-hydroxyisobutyryl-coenzyme A hydrolase-like
  misc_feature (1)..(381): Homolog of NCBI NO: 15235689 NR Description: 3-hydroxyisobutyryl-coenzyme A hydrolase - like
MAGAGVDDFVKGNVFPNGVALITLDRTKALNAMNLDMDIKYKSFLDEWESDPRVKCVIVEGSTSRAFCAGMDIKGVAAEIQKDKNTPLVQKVFTAEYTLICAIAAYKKPYISLMDGITMGFGLGLSGHGRYRVITERTVLAMPENGIGLFPDVGFSYIAAHSPGGGSVGAYLGLTGKRISAPSDALFVGLGTHYVPSEKLASLKEAILSANLSEDPNQDIQATLSKYSSNPESEAHLKSLLPHIESAFSSNKSIKETIEELKKYQQSTESSVVEWANEALKGLEKGAPFSLYLTQKYFSNVACAKSKPENELATLNGVMKTEYRIALRSALRGDFAEGVRAVLIDKDQNPKWNPTSIEEVDENEVEALFKPLSPEVEELKV

SEQ ID NO: 38915 - protein, 349 aa, Arabidopsis thaliana
  peptide (1)..(349): Ceres Seq. ID no. 12328389
  misc_feature (1)..(164): Pfam Name: Enoyl-CoA hydratase/isomerase family Pfam Description: Enoyl-CoA hydratase/isomerase family
  misc_feature (223)..(348): Homolog of NCBI NO: 15224539 NR Description: 3-hydroxyisobutyryl-coenzyme A hydrolase; protein
  misc_feature (1)..(192): Homolog of NCBI NO: 15224539 NR Description: 3-hydroxyisobutyryl-coenzyme A hydrolase; protein
  misc_feature (1)..(349): Homolog of NCBI NO: 15239206 NR Description: 3-hydroxyisobutyryl-coenzyme A hydrolase
  misc_feature (287)..(322): Homolog of NCBI NO: 23016278 NR Description: hypothetical protein [Magnetospirillum
  misc_feature (1)..(230): Homolog of NCBI NO: 23016278 NR Description: hypothetical protein [Magnetospirillum
  misc_feature (242)..(343): Homolog of NCBI NO: 23013936 NR Description: hypothetical protein [Magnetospirillum
  misc_feature (1)..(264): Homolog of NCBI NO: 23013936 NR Description: hypothetical protein [Magnetospirillum
  misc_feature (1)..(349): Homolog of NCBI NO: 15230101 NR Description: 3-hydroxyisobutyryl-coenzyme A hydrolase, putative
  misc_feature (1)..(349): Homolog of NCBI NO: 11994698 NR Description: 3-hydroxyisobutyryl-coenzyme A hydrolase-like
  misc_feature (1)..(349): Homolog of NCBI NO: 15235689 NR Description: 3-hydroxyisobutyryl-coenzyme A hydrolase - like
MNLDMDIKYKSFLDEWESDPRVKCVIVEGSTSRAFCAGMDIKGVAAEIQKDKNTPLVQKVFTAEYTLICAIAAYKKPYISLMDGITMGFGLGLSGHGRYRVITERTVLAMPENGIGLFPDVGFSYIAAHSPGGGSVGAYLGLTGKRISAPSDALFVGLGTHYVPSEKLASLKEAILSANLSEDPNQDIQATLSKYSSNPESEAHLKSLLPHIESAFSSNKSIKETIEELKKYQQSTESSVVEWANEALKGLEKGAPFSLYLTQKYFSNVACAKSKPENELATLNGVMKTEYRIALRSALRGDFAEGVRAVLIDKDQNPKWNPTSIEEVDENEVEALFKPLSPEVEELKV

SEQ ID NO: 38916 - DNA, 1684 bp, Arabidopsis thaliana; identical to SEQ ID NO: 24902
  misc_feature (1)..(1684): Ceres Seq. ID no. 12331203
  misc_feature: MA Experiment ID: 108434 Result: Down-regulated in Transcription
  misc_feature: MA Experiment 108434 PARAMETER Experiment Name: At_Root_Tips_cDNA_P Parameter: Tissue Value: Root Tips
  misc_feature: MA Experiment ID: 108572 Result: Up-regulated in Transcription
  misc_feature: MA Experiment 108572 PARAMETER Experiment Name: At_Drought_cDNA_P Parameter: Timepoint (hr) Value: 1
  misc_feature: MA Experiment 108572 PARAMETER Experiment Name: At_Drought_cDNA_P Parameter: Tissue Value: Aerial
  misc_feature: MA Experiment 108572 PARAMETER Experiment Name: At_Drought_cDNA_P Parameter: Treatment Value: Drought vs. No Drought
  misc_feature: MA Experiment ID: 108573 Result: Up-regulated in Transcription
  misc_feature: MA Experiment 108573 PARAMETER Experiment Name: At_Drought_cDNA_P Parameter: Timepoint (hr) Value: 6
  misc_feature: MA Experiment 108573 PARAMETER Experiment Name: At_Drought_cDNA_P Parameter: Tissue Value: Aerial
  misc_feature: MA Experiment 108573 PARAMETER Experiment Name: At_Drought_cDNA_P Parameter: Treatment Value: Drought vs. No Drought
  misc_feature: MA Experiment ID: 108574 Result: Up-regulated in Transcription
  misc_feature: MA Experiment 108574 PARAMETER Experiment Name: At_Wounding__cDNA_P Parameter: Timepoint (hr) Value: 1
  misc_feature: MA Experiment 108574 PARAMETER Experiment Name: At_Wounding__cDNA_P Parameter: Tissue Value: Aerial
  misc_feature: MA Experiment 108574 PARAMETER Experiment Name: At_Wounding__cDNA_P Parameter: Treatment Value: Wounding vs. No Wounding
  misc_feature: MA Experiment ID: 108595 Result: Up-regulated in Transcription
  misc_feature: MA Experiment 108595 PARAMETER Experiment Name: At_Ler-pi_Ovule_cDNA_P Parameter: Plant Line Value: null
  misc_feature: MA Experiment ID: 108607 Result: Up-regulated in Transcription
  misc_feature: MA Experiment 108607 PARAMETER Experiment Name: At_100uM_ABA_cDNA_P Parameter: Timepoint (hr) Value: 4
  misc_feature: MA Experiment 108607 PARAMETER Experiment Name: At_100uM_ABA_cDNA_P Parameter: Tissue Value: Aerial
  misc_feature: MA Experiment 108607 PARAMETER Experiment Name: At_100uM_ABA_cDNA_P Parameter: Treatment Value: 100uM ABA vs. No Treatment
  misc_feature: MA Experiment ID: 108608 Result: Up-regulated in Transcription
  misc_feature: MA Experiment 108608 PARAMETER Experiment Name: At_100uM_ABA_cDNA_P Parameter: Timepoint (hr) Value: 1
  misc_feature: MA Experiment 108608 PARAMETER Experiment Name: At_100uM_ABA_cDNA_P Parameter: Tissue Value: Aerial
  misc_feature: MA Experiment 108608 PARAMETER Experiment Name: At_100uM_ABA_cDNA_P Parameter: Treatment Value: 100uM ABA vs. No Treatment
  misc_feature: MA Experiment ID: 20000069 Result: Up-regulated in Transcription
  misc_feature: MA Experiment 20000069 PARAMETER Experiment Name: At_100uM_ABA_Mutants_cDNA_P Parameter: Plant Line Value: CS23
  misc_feature: MA Experiment 20000069 PARAMETER Experiment Name: At_100uM_ABA_Mutants_cDNA_P Parameter: Timepoint (hr) Value: 6
  misc_feature: MA Experiment 20000069 PARAMETER Experiment Name: At_100uM_ABA_Mutants_cDNA_P Parameter: Tissue Value: Aerial
  misc_feature: MA Experiment 20000069 PARAMETER Experiment Name: At_100uM_ABA_Mutants_cDNA_P Parameter: Treatment Value: 100uM ABA vs. No Treatment
  misc_feature: MA Experiment ID: 20000070 Result: Up-regulated in Transcription
  misc_feature: MA Experiment 20000070 PARAMETER Experiment Name: At_100uM_ABA_Mutants_cDNA_P Parameter: Plant Line Value: CS24
  misc_feature: MA Experiment 20000070 PARAMETER Experiment Name: At_100uM_ABA_Mutants_cDNA_P Parameter: Timepoint (hr) Value: 6
  misc_feature: MA Experiment 20000070 PARAMETER Experiment Name: At_100uM_ABA_Mutants_cDNA_P Parameter: Tissue Value: Aerial
  misc_feature: MA Experiment 20000070 PARAMETER Experiment Name: At_100uM_ABA_Mutants_cDNA_P Parameter: Treatment Value: 100uM ABA vs. No Treatment
  misc_feature: MA Experiment ID: 20000111 Result: Up-regulated in Transcription
  misc_feature: MA Experiment 20000111 PARAMETER Experiment Name: At_42deg_Heat_cDNA_P Parameter: Temperature (deg C) Value: 42 vs. 22
  misc_feature: MA Experiment 20000111 PARAMETER Experiment Name: At_42deg_Heat_cDNA_P Parameter: Timepoint (hr) Value: 6
  misc_feature: MA Experiment 20000111 PARAMETER Experiment Name: At_42deg_Heat_cDNA_P Parameter: Tissue Value: Aerial
  misc_feature: MA Experiment ID: 20000112 Result: Up-regulated in Transcription
  misc_feature: MA Experiment 20000112 PARAMETER Experiment Name: At_42deg_Heat_cDNA_P Parameter: Temperature (deg C) Value: 42 vs. 22
  misc_feature: MA Experiment 20000112 PARAMETER Experiment Name: At_42deg_Heat_cDNA_P Parameter: Timepoint (hr) Value: 2
  misc_feature: MA Experiment 20000112 PARAMETER Experiment Name: At_42deg_Heat_cDNA_P Parameter: Tissue Value: Aerial
  misc_feature: MA Experiment ID: 20000113 Result: Up-regulated in Transcription
  misc_feature: MA Experiment 20000113 PARAMETER Experiment Name: At_42deg_Heat_cDNA_P Parameter: Temperature (deg C) Value: 42 vs. 22
  misc_feature: MA Experiment 20000113 PARAMETER Experiment Name: At_42deg_Heat_cDNA_P Parameter: Timepoint (hr) Value: 8
  misc_feature: MA Experiment 20000113 PARAMETER Experiment Name: At_42deg_Heat_cDNA_P Parameter: Tissue Value: Aerial
  misc_feature: MA Experiment ID: 20000166 Result: Up-regulated in Transcription
  misc_feature: MA Experiment 20000166 PARAMETER Experiment Name: At_100uM_ABA_P Parameter: Age (day) Value: 14
  misc_feature: MA Experiment 20000166 PARAMETER Experiment Name: At_100uM_ABA_P Parameter: Organism Value: A. thaliana
  misc_feature: MA Experiment 20000166 PARAMETER Experiment Name: At_100uM_ABA_P Parameter: Plant Line Value: WS
  misc_feature: MA Experiment 20000166 PARAMETER Experiment Name: At_100uM_ABA_P Parameter: Timepoint (hr) Value: 1
  misc_feature: MA Experiment 20000166 PARAMETER Experiment Name: At_100uM_ABA_P Parameter: Tissue Value: Aerial
  misc_feature: MA Experiment 20000166 PARAMETER Experiment Name: At_100uM_ABA_P Parameter: Treatment Value: 100uM ABA vs. No Treatment
  misc_feature: MA Experiment ID: 20000173 Result: Up-regulated in Transcription
  misc_feature: MA Experiment 20000173 PARAMETER Experiment Name: At_42deg_Heat_P Parameter: Age (day) Value: 14
  misc_feature: MA Experiment 20000173 PARAMETER Experiment Name: At_42deg_Heat_P Parameter: Organism Value: A. thaliana
  misc_feature: MA Experiment 20000173 PARAMETER Experiment Name: At_42deg_Heat_P Parameter: Plant Line Value: WS
  misc_feature: MA Experiment 20000173 PARAMETER Experiment Name: At_42deg_Heat_P Parameter: Temperature (deg C) Value: 42 vs. 22
  misc_feature: MA Experiment 20000173 PARAMETER Experiment Name: At_42deg_Heat_P Parameter: Timepoint (hr) Value: 6
  misc_feature: MA Experiment 20000173 PARAMETER Experiment Name: At_42deg_Heat_P Parameter: Tissue Value: Aerial
  misc_feature: MA Experiment ID: 20000184 Result: Down-regulated in Transcription
  misc_feature: MA Experiment 20000184 PARAMETER Experiment Name: At_Shoots__P Parameter: Age (day) Value: 7
  misc_feature: MA Experiment 20000184 PARAMETER Experiment Name: At_Shoots__P Parameter: Tissue Value: Shoots vs. Whole Plant
  misc_feature: MA Experiment ID: 20000437 Result: Up-regulated in Transcription
  misc_feature: MA Experiment 20000437 PARAMETER Experiment Name: At_Drought_P Parameter: Age (day) Value: 8
  misc_feature: MA Experiment 20000437 PARAMETER Experiment Name: At_Drought_P Parameter: Organism Value: A. thaliana
  misc_feature: MA Experiment 20000437 PARAMETER Experiment Name: At_Drought_P Parameter: Plant Line Value: WS
  misc_feature: MA Experiment 20000437 PARAMETER Experiment Name: At_Drought_P Parameter: Timepoint (hr) Value: 24
  misc_feature: MA Experiment 20000437 PARAMETER Experiment Name: At_Drought_P Parameter: Tissue Value: Whole Plant
  misc_feature: MA Experiment 20000437 PARAMETER Experiment Name: At_Drought_P Parameter: Treatment Value: Drought vs. No Drought
  misc_feature: MA Experiment ID: 20000439 Result: Up-regulated in Transcription
  misc_feature: MA Experiment 20000439 PARAMETER Experiment Name: At_Roots__P Parameter: Age (day) Value: 14 vs. 21
  misc_feature: MA Experiment 20000439 PARAMETER Experiment Name: At_Roots__P Parameter: Organism Value: A. thaliana
  misc_feature: MA Experiment 20000439 PARAMETER Experiment Name: At_Roots__P Parameter: Tissue Value: Roots vs. Whole Plant
  misc_feature: MA Experiment ID: 20001905 Result: Up-regulated in Transcription
  misc_feature: MA Experiment 20001905 PARAMETER Experiment Name: At_Drought_Reproduction_P Parameter: Age (day) Value: 40
  misc_feature: MA Experiment 20001905 PARAMETER Experiment Name: At_Drought_Reproduction_P Parameter: Organism Value: A. thaliana
  misc_feature: MA Experiment 20001905 PARAMETER Experiment Name: At_Drought_Reproduction_P Parameter: Plant Line Value: WS
  misc_feature: MA Experiment 20001905 PARAMETER Experiment Name: At_Drought_Reproduction_P Parameter: Timepoint (day) Value: 10
  misc_feature: MA Experiment 20001905 PARAMETER Experiment Name: At_Drought_Reproduction_P Parameter: Tissue Value: Rosettes
  misc_feature: MA Experiment 20001905 PARAMETER Experiment Name: At_Drought_Reproduction_P Parameter: Treatment Value: Drought vs. No Drought

SEQ ID NO: 38917 - protein, 489 aa, Arabidopsis thaliana; identical to SEQ ID NO: 24903
  peptide (1)..(489): Ceres Seq. ID no. 12331204
  misc_feature (154)..(453): Homolog of NCBI NO: 30679773 NR Description: protein kinase family [Arabidopsis thaliana]
  misc_feature (154)..(470): Homolog of NCBI NO: 11259782 NR Description: protein kinase-like - Arabidopsis thaliana
  misc_feature (102)..(455): Homolog of NCBI NO: 10445209 NR Description: protein serine/threonine kinase BNK1 [Brassica
  misc_feature (102)..(471): Homolog of NCBI NO: 34907210 NR Description: putative serine/threonine kinase PBS1 protein
  misc_feature (95)..(455): Homolog of NCBI NO: 34394036 NR Description: putative protein serine/threonine kinase BNK1
  misc_feature (115)..(472): Homolog of NCBI NO: 15238886 NR Description: protein kinase -like protein; protein id:
  misc_feature (67)..(475): Homolog of NCBI NO: 15226901 NR Description: putative protein kinase; protein id: At2g28590.1
  misc_feature (69)..(476): Homolog of NCBI NO: 7573598 NR Description: protein kinase 2 [Populus nigra]
  misc_feature (67)..(465): Homolog of NCBI NO: 7573596 NR Description: protein kinase 1 [Populus nigra]
  misc_feature (67)..(489): Homolog of NCBI NO: 15223024 NR Description: protein kinase, putative (fragment)
  misc_feature (154)..(453): Homolog of NCBI NO: 30679773 NR Description: protein kinase family [Arabidopsis thaliana]
  misc_feature (154)..(470): Homolog of NCBI NO: 11259782 NR Description: protein kinase-like - Arabidopsis thaliana
  misc_feature (102)..(455): Homolog of NCBI NO: 10445209 NR Description: protein serine/threonine kinase BNK1 [Brassica
  misc_feature (102)..(471): Homolog of NCBI NO: 34907210 NR Description: putative serine/threonine kinase PBS1 protein
  misc_feature (95)..(455): Homolog of NCBI NO: 34394036 NR Description: putative protein serine/threonine kinase BNK1
  misc_feature (115)..(472): Homolog of NCBI NO: 15238886 NR Description: protein kinase -like protein; protein id:
  misc_feature (67)..(475): Homolog of NCBI NO: 15226901 NR Description: putative protein kinase; protein id: At2g28590.1
  misc_feature (69)..(476): Homolog of NCBI NO: 7573598 NR Description: protein kinase 2 [Populus nigra]
  misc_feature (67)..(465): Homolog of NCBI NO: 7573596 NR Description: protein kinase 1 [Populus nigra]
  misc_feature (67)..(489): Homolog of NCBI NO: 15223024 NR Description: protein kinase, putative (fragment)

SEQ ID NO: 38918 - protein, 423 aa, Arabidopsis thaliana; identical to SEQ ID NO: 24904
  peptide (1)..(423): Ceres Seq. ID no. 12331205
  misc_feature (88)..(387): Homolog of NCBI NO: 30679773 NR Description: protein kinase family [Arabidopsis thaliana]
  misc_feature (88)..(404): Homolog of NCBI NO: 11259782 NR Description: protein kinase-like - Arabidopsis thaliana
  misc_feature (36)..(389): Homolog of NCBI NO: 10445209 NR Description: protein serine/threonine kinase BNK1 [Brassica
  misc_feature (36)..(405): Homolog of NCBI NO: 34907210 NR Description: putative serine/threonine kinase PBS1 protein
  misc_feature (29)..(389): Homolog of NCBI NO: 34394036 NR Description: putative protein serine/threonine kinase BNK1
  misc_feature (49)..(406): Homolog of NCBI NO: 15238886 NR Description: protein kinase -like protein; protein id:
  misc_feature (1)..(409): Homolog of NCBI NO: 15226901 NR Description: putative protein kinase; protein id: At2g28590.1
  misc_feature (3)..(410): Homolog of NCBI NO: 7573598 NR Description: protein kinase 2 [Populus nigra]
  misc_feature (1)..(399): Homolog of NCBI NO: 7573596 NR Description: protein kinase 1 [Populus nigra]
  misc_feature (1)..(423): Homolog of NCBI NO: 15223024 NR Description: protein kinase, putative (fragment)
  misc_feature (88)..(387): Homolog of NCBI NO: 30679773 NR Description: protein kinase family [Arabidopsis thaliana]
  misc_feature (88)..(404): Homolog of NCBI NO: 11259782 NR Description: protein kinase-like - Arabidopsis thaliana
  misc_feature (36)..(389): Homolog of NCBI NO: 10445209 NR Description: protein serine/threonine kinase BNK1 [Brassica
  misc_feature (36)..(405): Homolog of NCBI NO: 34907210 NR Description: putative serine/threonine kinase PBS1 protein
  misc_feature (29)..(389): Homolog of NCBI NO: 34394036 NR Description: putative protein serine/threonine kinase BNK1
  misc_feature (49)..(406): Homolog of NCBI NO: 15238886 NR Description: protein kinase -like protein; protein id:
  misc_feature (1)..(409): Homolog of NCBI NO: 15226901 NR Description: putative protein kinase; protein id: At2g28590.1
  misc_feature (3)..(410): Homolog of NCBI NO: 7573598 NR Description: protein kinase 2 [Populus nigra]
  misc_feature (1)..(399): Homolog of NCBI NO: 7573596 NR Description: protein kinase 1 [Populus nigra]
  misc_feature (1)..(423): Homolog of NCBI NO: 15223024 NR Description: protein kinase, putative (fragment)

SEQ ID NO: 38919 - protein, 244 aa, Arabidopsis thaliana; identical to SEQ ID NO: 24905
  peptide (1)..(244): Ceres Seq. ID no. 12331206
  misc_feature (1)..(208): Homolog of NCBI NO: 30679773 NR Description: protein kinase family [Arabidopsis thaliana]
  misc_feature (1)..(225): Homolog of NCBI NO: 11259782 NR Description: protein kinase-like - Arabidopsis thaliana
  misc_feature (1)..(210): Homolog of NCBI NO: 10445209 NR Description: protein serine/threonine kinase BNK1 [Brassica
  misc_feature (1)..(226): Homolog of NCBI NO: 34907210 NR Description: putative serine/threonine kinase PBS1 protein
  misc_feature (1)..(210): Homolog of NCBI NO: 34394036 NR Description: putative protein serine/threonine kinase BNK1
  misc_feature (1)..(227): Homolog of NCBI NO: 15238886 NR Description: protein kinase -like protein; protein id:
  misc_feature (1)..(230): Homolog of NCBI NO: 15226901 NR Description: putative protein kinase; protein id: At2g28590.1
  misc_feature (1)..(231): Homolog of NCBI NO: 7573598 NR Description: protein kinase 2 [Populus nigra]
  misc_feature (1)..(220): Homolog of NCBI NO: 7573596 NR Description: protein kinase 1 [Populus nigra]
  misc_feature (1)..(244): Homolog of NCBI NO: 15223024 NR Description: protein kinase, putative (fragment)
  misc_feature (1)..(208): Homolog of NCBI NO: 30679773 NR Description: protein kinase family [Arabidopsis thaliana]
  misc_feature (1)..(225): Homolog of NCBI NO: 11259782 NR Description: protein kinase-like - Arabidopsis thaliana
  misc_feature (1)..(210): Homolog of NCBI NO: 10445209 NR Description: protein serine/threonine kinase BNK1 [Brassica
  misc_feature (1)..(226): Homolog of NCBI NO: 34907210 NR Description: putative serine/threonine kinase PBS1 protein
  misc_feature (1)..(210): Homolog of NCBI NO: 34394036 NR Description: putative protein serine/threonine kinase BNK1
  misc_feature (1)..(227): Homolog of NCBI NO: 15238886 NR Description: protein kinase -like protein; protein id:
  misc_feature (1)..(230): Homolog of NCBI NO: 15226901 NR Description: putative protein kinase; protein id: At2g28590.1
  misc_feature (1)..(231): Homolog of NCBI NO: 7573598 NR Description: protein kinase 2 [Populus nigra]
  misc_feature (1)..(220): Homolog of NCBI NO: 7573596 NR Description: protein kinase 1 [Populus nigra]
  misc_feature (1)..(244): Homolog of NCBI NO: 15223024 NR Description: protein kinase, putative (fragment)

SEQ ID NO: 38920 - DNA, 640 bp, Arabidopsis thaliana
  misc_feature (1)..(640): Ceres Seq. ID no. 12652846
  misc_feature: MA Experiment ID: 108434 Result: Down-regulated in Transcription
  misc_feature: MA Experiment 108434 PARAMETER Experiment Name: At_Root_Tips_cDNA_P Parameter: Tissue Value: Root Tips
  misc_feature: MA Experiment ID: 108462 Result: Up-regulated in Transcription
  misc_feature: MA Experiment 108462 PARAMETER Experiment Name: At_Germinating_Seeds_cDNA_P Parameter: Age (day) Value: 2 vs. 0
  misc_feature: MA Experiment 108462 PARAMETER Experiment Name: At_Germinating_Seeds_cDNA_P Parameter: Tissue Value: Germinating Seeds
  misc_feature: MA Experiment ID: 108488 Result: Up-regulated in Transcription
  misc_feature: MA Experiment ID: 108605 Result: Up-regulated in Transcription
  misc_feature: MA Experiment 108605 PARAMETER Experiment Name: At_100uM_ABA_cDNA_P Parameter: Timepoint (hr) Value: 6
  misc_feature: MA Experiment 108605 PARAMETER Experiment Name: At_100uM_ABA_cDNA_P Parameter: Tissue Value: Aerial
  misc_feature: MA Experiment 108605 PARAMETER Experiment Name: At_100uM_ABA_cDNA_P Parameter: Treatment Value: 100uM ABA vs. No Treatment
  misc_feature: MA Experiment ID: 20000169 Result: Up-regulated in Transcription
  misc_feature: MA Experiment 20000169 PARAMETER Experiment Name: At_100uM_ABA_P Parameter: Age (day) Value: 14
  misc_feature: MA Experiment 20000169 PARAMETER Experiment Name: At_100uM_ABA_P Parameter: Organism Value: A. thaliana
  misc_feature: MA Experiment 20000169 PARAMETER Experiment Name: At_100uM_ABA_P Parameter: Plant Line Value: WS
  misc_feature: MA Experiment 20000169 PARAMETER Experiment Name: At_100uM_ABA_P Parameter: Timepoint (hr) Value: 6
  misc_feature: MA Experiment 20000169 PARAMETER Experiment Name: At_100uM_ABA_P Parameter: Tissue Value: Aerial
  misc_feature: MA Experiment 20000169 PARAMETER Experiment Name: At_100uM_ABA_P Parameter: Treatment Value: 100uM ABA vs. No Treatment
  misc_feature: MA Experiment ID: 20000180 Result: Up-regulated in Transcription
  misc_feature: MA Experiment 20000180 PARAMETER Experiment Name: At_Germinating_Seeds_P Parameter: Age (hr) Value: 24 vs. 0
  misc_feature: MA Experiment 20000180 PARAMETER Experiment Name: At_Germinating_Seeds_P Parameter: Tissue Value: Germinating Seeds
  misc_feature: MA Experiment ID: 20000184 Result: Up-regulated in Transcription
  misc_feature: MA Experiment 20000184 PARAMETER Experiment Name: At_Shoots__P Parameter: Age (day) Value: 7
  misc_feature: MA Experiment 20000184 PARAMETER Experiment Name: At_Shoots__P Parameter: Tissue Value: Shoots vs. Whole Plant
  misc_feature: MA Experiment ID: 20000227 Result: Down-regulated in Transcription
  misc_feature: MA Experiment 20000227 PARAMETER Experiment Name: At_Root-Tips-vs-Tops_P Parameter: Tissue Value: Root Tips vs. Root Tops
  misc_feature: MA Experiment ID: 20000264 Result: Up-regulated in Transcription
  misc_feature: MA Experiment 20000264 PARAMETER Experiment Name: At_Open_Flower_P Parameter: Age (day) Value: 21
  misc_feature: MA Experiment 20000264 PARAMETER Experiment Name: At_Open_Flower_P Parameter: Plant Line Value: WS
  misc_feature: MA Experiment 20000264 PARAMETER Experiment Name: At_Open_Flower_P Parameter: Tissue Value: Open Flower vs. Whole Plant
  misc_feature: MA Experiment ID: 20000438 Result: Up-regulated in Transcription
  misc_feature: MA Experiment 20000438 PARAMETER Experiment Name: At_Shoots__P Parameter: Age (day) Value: 14
  misc_feature: MA Experiment 20000438 PARAMETER Experiment Name: At_Shoots__P Parameter: Tissue Value: Shoots vs. Whole Plant
  misc_feature: MA Experiment ID: 20000439 Result: Down-regulated in Transcription
  misc_feature: MA Experiment 20000439 PARAMETER Experiment Name: At_Roots__P Parameter: Age (day) Value: 14 vs. 21
  misc_feature: MA Experiment 20000439 PARAMETER Experiment Name: At_Roots__P Parameter: Organism Value: A. thaliana
  misc_feature: MA Experiment 20000439 PARAMETER Experiment Name: At_Roots__P Parameter: Tissue Value: Roots vs. Whole Plant
  misc_feature: MA Experiment ID: 20000451 Result: Up-regulated in Transcription
  misc_feature: MA Experiment 20000451 PARAMETER Experiment Name: At_CS6879_Shoots-Roots_P Parameter: Age (day) Value: 14
  misc_feature: MA Experiment 20000451 PARAMETER Experiment Name: At_CS6879_Shoots-Roots_P Parameter: Organism Value: A. thaliana
  misc_feature: MA Experiment 20000451 PARAMETER Experiment Name: At_CS6879_Shoots-Roots_P Parameter: Plant Line Value: CS6879 vs. WS
  misc_feature: MA Experiment 20000451 PARAMETER Experiment Name: At_CS6879_Shoots-Roots_P Parameter: Tissue Value: Roots
  misc_feature: MA Experiment ID: 20000794 Result: Up-regulated in Transcription
  misc_feature: MA Experiment 20000794 PARAMETER Experiment Name: At_Petals_P Parameter: Age (day) Value: 23-25 days
  misc_feature: MA Experiment 20000794 PARAMETER Experiment Name: At_Petals_P Parameter: Plant Line Value: WS
  misc_feature: MA Experiment 20000794 PARAMETER Experiment Name: At_Petals_P Parameter: Tissue Value: Petals vs. Whole plant
  misc_feature: MA Experiment ID: 20001555 Result: Up-regulated in Transcription
  misc_feature: MA Experiment 20001555 PARAMETER Experiment Name: At_Drought_Soil_Dry_P Parameter: Age (day) Value: 24
  misc_feature: MA Experiment 20001555 PARAMETER Experiment Name: At_Drought_Soil_Dry_P Parameter: Organism Value: A. thaliana
  misc_feature: MA Experiment 20001555 PARAMETER Experiment Name: At_Drought_Soil_Dry_P Parameter: Plant Line Value: WS
  misc_feature: MA Experiment 20001555 PARAMETER Experiment Name: At_Drought_Soil_Dry_P Parameter: Post Timepoint (hr) Value: None
  misc_feature: MA Experiment 20001555 PARAMETER Experiment Name: At_Drought_Soil_Dry_P Parameter: Post-Treatment Value: None
  misc_feature: MA Experiment 20001555 PARAMETER Experiment Name: At_Drought_Soil_Dry_P Parameter: Timepoint (day) Value: 10
  misc_feature: MA Experiment 20001555 PARAMETER Experiment Name: At_Drought_Soil_Dry_P Parameter: Treatment Value: Drought vs. No Drought
  misc_feature: MA Experiment ID: 20001556 Result: Up-regulated in Transcription
  misc_feature: MA Experiment 20001556 PARAMETER Experiment Name: At_Drought_Soil_Dry_P Parameter: Age (day) Value: 26
  misc_feature: MA Experiment 20001556 PARAMETER Experiment Name: At_Drought_Soil_Dry_P Parameter: Organism Value: A. thaliana
  misc_feature: MA Experiment 20001556 PARAMETER Experiment Name: At_Drought_Soil_Dry_P Parameter: Plant Line Value: WS
  misc_feature: MA Experiment 20001556 PARAMETER Experiment Name: At_Drought_Soil_Dry_P Parameter: Post Timepoint (hr) Value: None
  misc_feature: MA Experiment 20001556 PARAMETER Experiment Name: At_Drought_Soil_Dry_P Parameter: Post-Treatment Value: None
  misc_feature: MA Experiment 20001556 PARAMETER Experiment Name: At_Drought_Soil_Dry_P Parameter: Timepoint (day) Value: 12
  misc_feature: MA Experiment 20001556 PARAMETER Experiment Name: At_Drought_Soil_Dry_P Parameter: Treatment Value: Drought vs. No Drought
  misc_feature: MA Experiment ID: 20001559 Result: Up-regulated in Transcription
  misc_feature: MA Experiment 20001559 PARAMETER Experiment Name: At_Drought_Soil_Dry_P Parameter: Age (day) Value: 28
  misc_feature: MA Experiment 20001559 PARAMETER Experiment Name: At_Drought_Soil_Dry_P Parameter: Organism Value: A. thaliana
  misc_feature: MA Experiment 20001559 PARAMETER Experiment Name: At_Drought_Soil_Dry_P Parameter: Plant Line Value: WS
  misc_feature: MA Experiment 20001559 PARAMETER Experiment Name: At_Drought_Soil_Dry_P Parameter: Post Timepoint (hr) Value: 29
  misc_feature: MA Experiment 20001559 PARAMETER Experiment Name: At_Drought_Soil_Dry_P Parameter: Post-Treatment Value: Re-Water vs. No Drought
  misc_feature: MA Experiment 20001559 PARAMETER Experiment Name: At_Drought_Soil_Dry_P Parameter: Timepoint (day) Value: 14
  misc_feature: MA Experiment 20001559 PARAMETER Experiment Name: At_Drought_Soil_Dry_P Parameter: Treatment Value: Drought vs. No Drought
  misc_feature: MA Experiment ID: 20001560 Result: Up-regulated in Transcription
  misc_feature: MA Experiment 20001560 PARAMETER Experiment Name: At_Drought_Soil_Dry_P Parameter: Age (day) Value: 28
  misc_feature: MA Experiment 20001560 PARAMETER Experiment Name: At_Drought_Soil_Dry_P Parameter: Organism Value: A. thaliana
  misc_feature: MA Experiment 20001560 PARAMETER Experiment Name: At_Drought_Soil_Dry_P Parameter: Plant Line Value: WS
  misc_feature: MA Experiment 20001560 PARAMETER Experiment Name: At_Drought_Soil_Dry_P Parameter: Post Timepoint (hr) Value: None
  misc_feature: MA Experiment 20001560 PARAMETER Experiment Name: At_Drought_Soil_Dry_P Parameter: Post-Treatment Value: None
  misc_feature: MA Experiment 20001560 PARAMETER Experiment Name: At_Drought_Soil_Dry_P Parameter: Timepoint (day) Value: 14
  misc_feature: MA Experiment 20001560 PARAMETER Experiment Name: At_Drought_Soil_Dry_P Parameter: Treatment Value: Drought vs. No Drought
  misc_feature: MA Experiment ID: 20001904 Result: Up-regulated in Transcription
  misc_feature: MA Experiment 20001904 PARAMETER Experiment Name: At_Drought_Reproduction_P Parameter: Age (day) Value: 37
  misc_feature: MA Experiment 20001904 PARAMETER Experiment Name: At_Drought_Reproduction_P Parameter: Organism Value: A. thaliana
  misc_feature: MA Experiment 20001904 PARAMETER Experiment Name: At_Drought_Reproduction_P Parameter: Plant Line Value: WS
  misc_feature: MA Experiment 20001904 PARAMETER Experiment Name: At_Drought_Reproduction_P Parameter: Timepoint (day) Value: 7
  misc_feature: MA Experiment 20001904 PARAMETER Experiment Name: At_Drought_Reproduction_P Parameter: Tissue Value: Rosettes
  misc_feature: MA Experiment 20001904 PARAMETER Experiment Name: At_Drought_Reproduction_P Parameter: Treatment Value: Drought vs. No Drought
atcatccatcactacacacatctcctattgcaaacgaacataaaacactacctaagagatcaatatggctggagtgatgaagttggcatgcttgctcttggcctgcatgattgtggccggtccaatcacatcgaacgctgcgctaagctgtggctcagttaacagcaacttggcagcgtgcattggctacgtgctccaaggtggtgtcattcccccagcgtgttgctccggcgttaaaaacctcaacagcatagccaagacgaccccagaccgtcagcaagcttgcaattgcattcaaggtgccgctagagccttaggctctggtctcaacgctggccgtgcagctggaattcctaaggcatgtggagtcaatattccttacaaaatcagcaccagcaccaactgcaaaaccgtgaggtgatgagctagcaacggtgagatgatgctactaccggaagtttcgaatccttattatataatggatgagattaatattaaataagatgttcgaatgtttgtttttagagtttttaatttcttgtctttttctattgtggtgttcttgttatatgggtttgtctgtactatgttcgcaggcaacaacgttatatgaaatttcagagtacttgaagtttaagtt

SEQ ID NO: 38921 - protein, 118 aa, Arabidopsis thaliana
  peptide (1)..(118): Ceres Seq. ID no. 12652847
  misc_feature (29)..(114): Pfam Name: Protease inhibitor/seed storage/LTP family Pfam Description: Protease inhibitor/seed storage/LTP family
  misc_feature (29)..(114): Pfam Name: Protease inhibitor/seed storage/LTP family Pfam Description: Protease inhibitor/seed storage/LTP family
  misc_feature (29)..(114): Pfam Name: Protease inhibitor/seed storage/LTP family Pfam Description: Protease inhibitor/seed storage/LTP family
  misc_feature (29)..(114): Pfam Name: Protease inhibitor/seed storage/LTP family Pfam Description: Protease inhibitor/seed storage/LTP family
  misc_feature (1)..(118): Homolog of NCBI NO: 5777389 NR Description: non-specific lipid transfer protein [Brassica
  misc_feature (1)..(118): Homolog of NCBI NO: 15224898 NR Description: putative nonspecific lipid-transfer protein
  misc_feature (1)..(118): Homolog of NCBI NO: 2497737 NR Description: NONSPECIFIC LIPID-TRANSFER PROTEIN 3 PRECURSOR
  misc_feature (1)..(118): Homolog of NCBI NO: 2497736 NR Description: NONSPECIFIC LIPID-TRANSFER PROTEIN 2 PRECURSOR
  misc_feature (1)..(118): Homolog of NCBI NO: 2497739 NR Description: NONSPECIFIC LIPID-TRANSFER PROTEIN B PRECURSOR
  misc_feature (1)..(118): Homolog of NCBI NO: 5777389 NR Description: non-specific lipid transfer protein [Brassica
  misc_feature (1)..(118): Homolog of NCBI NO: 2497737 NR Description: NONSPECIFIC LIPID-TRANSFER PROTEIN 3 PRECURSOR
  misc_feature (1)..(118): Homolog of NCBI NO: 2497739 NR Description: NONSPECIFIC LIPID-TRANSFER PROTEIN B PRECURSOR
  misc_feature (1)..(118): Homolog of NCBI NO: 2497736 NR Description: NONSPECIFIC LIPID-TRANSFER PROTEIN 2 PRECURSOR
  misc_feature (1)..(118): Homolog of NCBI NO: 2497737 NR Description: NONSPECIFIC LIPID-TRANSFER PROTEIN 3 PRECURSOR
  misc_feature (1)..(118): Homolog of NCBI NO: 15224898 NR Description: putative nonspecific lipid-transfer protein
  misc_feature (1)..(118): Homolog of NCBI NO: 5777389 NR Description: non-specific lipid transfer protein [Brassica
  misc_feature (1)..(118): Homolog of NCBI NO: 15224899 NR Description: putative nonspecific lipid-transfer protein
  misc_feature (1)..(118): Homolog of NCBI NO: 2497738 NR Description: NONSPECIFIC LIPID-TRANSFER PROTEIN A PRECURSOR
  misc_feature (1)..(118): Homolog of NCBI NO: 11273805 NR Description: lipid transfer protein [imported] - wild cabbage
  misc_feature (1)..(114): Homolog of NCBI NO: 7438295 NR Description: lipid transfer protein wax9C - broccoli
  misc_feature (1)..(118): Homolog of NCBI NO: 2497735 NR Description: NONSPECIFIC LIPID-TRANSFER PROTEIN 1 PRECURSOR
  misc_feature (1)..(118): Homolog of NCBI NO: 15224899 NR Description: putative nonspecific lipid-transfer protein
  misc_feature (1)..(118): Homolog of NCBI NO: 2497738 NR Description: NONSPECIFIC LIPID-TRANSFER PROTEIN A PRECURSOR
  misc_feature (1)..(118): Homolog of NCBI NO: 11273805 NR Description: lipid transfer protein [imported] - wild cabbage
  misc_feature (1)..(114): Homolog of NCBI NO: 7438295 NR Description: lipid transfer protein wax9C - broccoli
  misc_feature (1)..(118): Homolog of NCBI NO: 2497735 NR Description: NONSPECIFIC LIPID-TRANSFER PROTEIN 1 PRECURSOR
  misc_feature (1)..(118): Homolog of NCBI NO: 2497739 NR Description: NONSPECIFIC LIPID-TRANSFER PROTEIN B PRECURSOR
  misc_feature (1)..(118): Homolog of NCBI NO: 2497736 NR Description: NONSPECIFIC LIPID-TRANSFER PROTEIN 2 PRECURSOR
  misc_feature (1)..(118): Homolog of NCBI NO: 2497737 NR Description: NONSPECIFIC LIPID-TRANSFER PROTEIN 3 PRECURSOR
  misc_feature (1)..(118): Homolog of NCBI NO: 15224898 NR Description: putative nonspecific lipid-transfer protein
  misc_feature (1)..(118): Homolog of NCBI NO: 5777389 NR Description: non-specific lipid transfer protein [Brassica
  misc_feature (1)..(118): Homolog of NCBI NO: 15224899 NR Description: putative nonspecific lipid-transfer protein
  misc_feature (1)..(118): Homolog of NCBI NO: 2497738 NR Description: NONSPECIFIC LIPID-TRANSFER PROTEIN A PRECURSOR
  misc_feature (1)..(118): Homolog of NCBI NO: 11273805 NR Description: lipid transfer protein [imported] - wild cabbage
  misc_feature (1)..(114): Homolog of NCBI NO: 7438295 NR Description: lipid transfer protein wax9C - broccoli
  misc_feature (1)..(118): Homolog of NCBI NO: 2497735 NR Description: NONSPECIFIC LIPID-TRANSFER PROTEIN 1 PRECURSOR
  misc_feature (1)..(118): Homolog of NCBI NO: 2497739 NR Description: NONSPECIFIC LIPID-TRANSFER PROTEIN B PRECURSOR
  misc_feature (1)..(118): Homolog of NCBI NO: 2497736 NR Description: NONSPECIFIC LIPID-TRANSFER PROTEIN 2 PRECURSOR
  misc_feature (1)..(118): Homolog of NCBI NO: 15224898 NR Description: putative nonspecific lipid-transfer protein
  misc_feature (1)..(118): Homolog of NCBI NO: 2497735 NR Description: NONSPECIFIC LIPID-TRANSFER PROTEIN 1 PRECURSOR
  misc_feature (1)..(114): Homolog of NCBI NO: 7438295 NR Description: lipid transfer protein wax9C - broccoli
  misc_feature (1)..(118): Homolog of NCBI NO: 11273805 NR Description: lipid transfer protein [imported] - wild cabbage
  misc_feature (1)..(118): Homolog of NCBI NO: 2497738 NR Description: NONSPECIFIC LIPID-TRANSFER PROTEIN A PRECURSOR
  misc_feature (1)..(118): Homolog of NCBI NO: 15224899 NR Description: putative nonspecific lipid-transfer protein
MAGVMKLACLLLACMIVAGPITSNAALSCGSVNSNLAACIGYVLQGGVIPPACCSGVKNLNSIAKTTPDRQQACNCIQGAARALGSGLNAGRAAGIPKACGVNIPYKISTSTNCKTVR

SEQ ID NO: 38922 - protein, 114 aa, Arabidopsis thaliana
  peptide (1)..(114): Ceres Seq. ID no. 12652848
  misc_feature (25)..(110): Pfam Name: Protease inhibitor/seed storage/LTP family Pfam Description: Protease inhibitor/seed storage/LTP family
  misc_feature (25)..(110): Pfam Name: Protease inhibitor/seed storage/LTP family Pfam Description: Protease inhibitor/seed storage/LTP family
  misc_feature (25)..(110): Pfam Name: Protease inhibitor/seed storage/LTP family Pfam Description: Protease inhibitor/seed storage/LTP family
  misc_feature (25)..(110): Pfam Name: Protease inhibitor/seed storage/LTP family Pfam Description: Protease inhibitor/seed storage/LTP family
  misc_feature (1)..(114): Homolog of NCBI NO: 5777389 NR Description: non-specific lipid transfer protein [Brassica
  misc_feature (1)..(114): Homolog of NCBI NO: 15224898 NR Description: putative nonspecific lipid-transfer protein
  misc_feature (1)..(114): Homolog of NCBI NO: 2497737 NR Description: NONSPECIFIC LIPID-TRANSFER PROTEIN 3 PRECURSOR
  misc_feature (1)..(114): Homolog of NCBI NO: 2497736 NR Description: NONSPECIFIC LIPID-TRANSFER PROTEIN 2 PRECURSOR
  misc_feature (1)..(114): Homolog of NCBI NO: 2497739 NR Description: NONSPECIFIC LIPID-TRANSFER PROTEIN B PRECURSOR
  misc_feature (1)..(114): Homolog of NCBI NO: 5777389 NR Description: non-specific lipid transfer protein [Brassica
  misc_feature (1)..(114): Homolog of NCBI NO: 2497737 NR Description: NONSPECIFIC LIPID-TRANSFER PROTEIN 3 PRECURSOR
  misc_feature (1)..(114): Homolog of NCBI NO: 2497739 NR Description: NONSPECIFIC LIPID-TRANSFER PROTEIN B PRECURSOR
  misc_feature (1)..(114): Homolog of NCBI NO: 2497736 NR Description: NONSPECIFIC LIPID-TRANSFER PROTEIN 2 PRECURSOR
  misc_feature (1)..(114): Homolog of NCBI NO: 2497737 NR Description: NONSPECIFIC LIPID-TRANSFER PROTEIN 3 PRECURSOR
  misc_feature (1)..(114): Homolog of NCBI NO: 15224898 NR Description: putative nonspecific lipid-transfer protein
  misc_feature (1)..(114): Homolog of NCBI NO: 5777389 NR Description: non-specific lipid transfer protein [Brassica
  misc_feature (1)..(114): Homolog of NCBI NO: 15224899 NR Description: putative nonspecific lipid-transfer protein
  misc_feature (1)..(114): Homolog of NCBI NO: 2497738 NR Description: NONSPECIFIC LIPID-TRANSFER PROTEIN A PRECURSOR
  misc_feature (1)..(114): Homolog of NCBI NO: 11273805 NR Description: lipid transfer protein [imported] - wild cabbage
  misc_feature (1)..(110): Homolog of NCBI NO: 7438295 NR Description: lipid transfer protein wax9C - broccoli
  misc_feature (1)..(114): Homolog of NCBI NO: 2497735 NR Description: NONSPECIFIC LIPID-TRANSFER PROTEIN 1 PRECURSOR
  misc_feature (1)..(114): Homolog of NCBI NO: 15224899 NR Description: putative nonspecific lipid-transfer protein
  misc_feature (1)..(114): Homolog of NCBI NO: 2497738 NR Description: NONSPECIFIC LIPID-TRANSFER PROTEIN A PRECURSOR
  misc_feature (1)..(114): Homolog of NCBI NO: 11273805 NR Description: lipid transfer protein [imported] - wild cabbage
  misc_feature (1)..(110): Homolog of NCBI NO: 7438295 NR Description: lipid transfer protein wax9C - broccoli
  misc_feature (1)..(114): Homolog of NCBI NO: 2497735 NR Description: NONSPECIFIC LIPID-TRANSFER PROTEIN 1 PRECURSOR
  misc_feature (1)..(114): Homolog of NCBI NO: 2497739 NR Description: NONSPECIFIC LIPID-TRANSFER PROTEIN B PRECURSOR
  misc_feature (1)..(114): Homolog of NCBI NO: 2497736 NR Description: NONSPECIFIC LIPID-TRANSFER PROTEIN 2 PRECURSOR
  misc_feature (1)..(114): Homolog of NCBI NO: 2497737 NR Description: NONSPECIFIC LIPID-TRANSFER PROTEIN 3 PRECURSOR
  misc_feature (1)..(114): Homolog of NCBI NO: 15224898 NR Description: putative nonspecific lipid-transfer protein
  misc_feature (1)..(114): Homolog of NCBI NO: 5777389 NR Description: non-specific lipid transfer protein [Brassica
  misc_feature (1)..(114): Homolog of NCBI NO: 15224899 NR Description: putative nonspecific lipid-transfer protein
  misc_feature (1)..(114): Homolog of NCBI NO: 2497738 NR Description: NONSPECIFIC LIPID-TRANSFER PROTEIN A PRECURSOR
  misc_feature (1)..(114): Homolog of NCBI NO: 11273805 NR Description: lipid transfer protein [imported] - wild cabbage
  misc_feature (1)..(110): Homolog of NCBI NO: 7438295 NR Description: lipid transfer protein wax9C - broccoli
  misc_feature (1)..(114): Homolog of NCBI NO: 2497735 NR Description: NONSPECIFIC LIPID-TRANSFER PROTEIN 1 PRECURSOR
  misc_feature (1)..(114): Homolog of NCBI NO: 2497739 NR Description: NONSPECIFIC LIPID-TRANSFER PROTEIN B PRECURSOR
  misc_feature (1)..(114): Homolog of NCBI NO: 2497736 NR Description: NONSPECIFIC LIPID-TRANSFER PROTEIN 2 PRECURSOR
  misc_feature (1)..(114): Homolog of NCBI NO: 15224898 NR Description: putative nonspecific lipid-transfer protein
  misc_feature (1)..(114): Homolog of NCBI NO: 2497735 NR Description: NONSPECIFIC LIPID-TRANSFER PROTEIN 1 PRECURSOR
  misc_feature (1)..(110): Homolog of NCBI NO: 7438295 NR Description: lipid transfer protein wax9C - broccoli
  misc_feature (1)..(114): Homolog of NCBI NO: 11273805 NR Description: lipid transfer protein [imported] - wild cabbage
  misc_feature (1)..(114): Homolog of NCBI NO: 2497738 NR Description: NONSPECIFIC LIPID-TRANSFER PROTEIN A PRECURSOR
  misc_feature (1)..(114): Homolog of NCBI NO: 15224899 NR Description: putative nonspecific lipid-transfer protein
MKLACLLLACMIVAGPITSNAALSCGSVNSNLAACIGYVLQGGVIPPACCSGVKNLNSIAKTTPDRQQACNCIQGAARALGSGLNAGRAAGIPKACGVNIPYKISTSTNCKTVR

SEQ ID NO: 38923 - protein, 104 aa, Arabidopsis thaliana
  peptide (1)..(104): Ceres Seq. ID no. 12652849
  misc_feature (15)..(100): Pfam Name: Protease inhibitor/seed storage/LTP family Pfam Description: Protease inhibitor/seed storage/LTP family
  misc_feature (15)..(100): Pfam Name: Protease inhibitor/seed storage/LTP family Pfam Description: Protease inhibitor/seed storage/LTP family
  misc_feature (15)..(100): Pfam Name: Protease inhibitor/seed storage/LTP family Pfam Description: Protease inhibitor/seed storage/LTP family
  misc_feature (15)..(100): Pfam Name: Protease inhibitor/seed storage/LTP family Pfam Description: Protease inhibitor/seed storage/LTP family
  misc_feature (1)..(104): Homolog of NCBI NO: 5777389 NR Description: non-specific lipid transfer protein [Brassica
  misc_feature (1)..(104): Homolog of NCBI NO: 15224898 NR Description: putative nonspecific lipid-transfer protein
  misc_feature (1)..(104): Homolog of NCBI NO: 2497737 NR Description: NONSPECIFIC LIPID-TRANSFER PROTEIN 3 PRECURSOR
  misc_feature (1)..(104): Homolog of NCBI NO: 2497736 NR Description: NONSPECIFIC LIPID-TRANSFER PROTEIN 2 PRECURSOR
  misc_feature (1)..(104): Homolog of NCBI NO: 2497739 NR Description: NONSPECIFIC LIPID-TRANSFER PROTEIN B PRECURSOR
  misc_feature (1)..(104): Homolog of NCBI NO: 5777389 NR Description: non-specific lipid transfer protein [Brassica
  misc_feature (1)..(104): Homolog of NCBI NO: 2497737 NR Description: NONSPECIFIC LIPID-TRANSFER PROTEIN 3 PRECURSOR
  misc_feature (1)..(104): Homolog of NCBI NO: 2497739 NR Description: NONSPECIFIC LIPID-TRANSFER PROTEIN B PRECURSOR
  misc_feature (1)..(104): Homolog of NCBI NO: 2497736 NR Description: NONSPECIFIC LIPID-TRANSFER PROTEIN 2 PRECURSOR
  misc_feature (1)..(104): Homolog of NCBI NO: 2497737 NR Description: NONSPECIFIC LIPID-TRANSFER PROTEIN 3 PRECURSOR
  misc_feature (1)..(104): Homolog of NCBI NO: 15224898 NR Description: putative nonspecific lipid-transfer protein
  misc_feature (1)..(104): Homolog of NCBI NO: 5777389 NR Description: non-specific lipid transfer protein [Brassica
  misc_feature (1)..(104): Homolog of NCBI NO: 15224899 NR Description: putative nonspecific lipid-transfer protein
  misc_feature (1)..(104): Homolog of NCBI NO: 2497738 NR Description: NONSPECIFIC LIPID-TRANSFER PROTEIN A PRECURSOR
  misc_feature (1)..(104): Homolog of NCBI NO: 11273805 NR Description: lipid transfer protein [imported] - wild cabbage
  misc_feature (1)..(100): Homolog of NCBI NO: 7438295 NR Description: lipid transfer protein wax9C - broccoli
  misc_feature (1)..(104): Homolog of NCBI NO: 2497735 NR Description: NONSPECIFIC LIPID-TRANSFER PROTEIN 1 PRECURSOR
  misc_feature (1)..(104): Homolog of NCBI NO: 15224899 NR Description: putative nonspecific lipid-transfer protein
  misc_feature (1)..(104): Homolog of NCBI NO: 2497738 NR Description: NONSPECIFIC LIPID-TRANSFER PROTEIN A PRECURSOR
  misc_feature (1)..(104): Homolog of NCBI NO: 11273805 NR Description: lipid transfer protein [imported] - wild cabbage
  misc_feature (1)..(100): Homolog of NCBI NO: 7438295 NR Description: lipid transfer protein wax9C - broccoli
  misc_feature (1)..(104): Homolog of NCBI NO: 2497735 NR Description: NONSPECIFIC LIPID-TRANSFER PROTEIN 1 PRECURSOR
  misc_feature (1)..(104): Homolog of NCBI NO: 2497739 NR Description: NONSPECIFIC LIPID-TRANSFER PROTEIN B PRECURSOR
  misc_feature (1)..(104): Homolog of NCBI NO: 2497736 NR Description: NONSPECIFIC LIPID-TRANSFER PROTEIN 2 PRECURSOR
  misc_feature (1)..(104): Homolog of NCBI NO: 2497737 NR Description: NONSPECIFIC LIPID-TRANSFER PROTEIN 3 PRECURSOR
  misc_feature (1)..(104): Homolog of NCBI NO: 15224898 NR Description: putative nonspecific lipid-transfer protein
  misc_feature (1)..(104): Homolog of NCBI NO: 5777389 NR Description: non-specific lipid transfer protein [Brassica
  misc_feature (1)..(104): Homolog of NCBI NO: 15224899 NR Description: putative nonspecific lipid-transfer protein
  misc_feature (1)..(104): Homolog of NCBI NO: 2497738 NR Description: NONSPECIFIC LIPID-TRANSFER PROTEIN A PRECURSOR
  misc_feature (1)..(104): Homolog of NCBI NO: 11273805 NR Description: lipid transfer protein [imported] - wild cabbage
  misc_feature (1)..(100): Homolog of NCBI NO: 7438295 NR Description: lipid transfer protein wax9C - broccoli
  misc_feature (1)..(104): Homolog of NCBI NO: 2497735 NR Description: NONSPECIFIC LIPID-TRANSFER PROTEIN 1 PRECURSOR
  misc_feature (1)..(104): Homolog of NCBI NO: 2497739 NR Description: NONSPECIFIC LIPID-TRANSFER PROTEIN B PRECURSOR
  misc_feature (1)..(104): Homolog of NCBI NO: 2497736 NR Description: NONSPECIFIC LIPID-TRANSFER PROTEIN 2 PRECURSOR
  misc_feature (1)..(104): Homolog of NCBI NO: 15224898 NR Description: putative nonspecific lipid-transfer protein
  misc_feature (1)..(104): Homolog of NCBI NO: 2497735 NR Description: NONSPECIFIC LIPID-TRANSFER PROTEIN 1 PRECURSOR
  misc_feature (1)..(100): Homolog of NCBI NO: 7438295 NR Description: lipid transfer protein wax9C - broccoli
  misc_feature (1)..(104): Homolog of NCBI NO: 11273805 NR Description: lipid transfer protein [imported] - wild cabbage
  misc_feature (1)..(104): Homolog of NCBI NO: 2497738 NR Description: NONSPECIFIC LIPID-TRANSFER PROTEIN A PRECURSOR
  misc_feature (1)..(104): Homolog of NCBI NO: 15224899 NR Description: putative nonspecific lipid-transfer protein
MIVAGPITSNAALSCGSVNSNLAACIGYVLQGGVIPPACCSGVKNLNSIAKTTPDRQQACNCIQGAARALGSGLNAGRAAGIPKACGVNIPYKISTSTNCKTVR

SEQ ID NO: 38924 - DNA, 1230 bp, Arabidopsis thaliana
  misc_feature (1)..(1230): Ceres Seq. ID no. 12385150
  misc_feature: MA Experiment ID: 108434 Result: Down-regulated in Transcription
  misc_feature: MA Experiment 108434 PARAMETER Experiment Name: At_Root_Tips_cDNA_P Parameter: Tissue Value: Root Tips
  misc_feature: MA Experiment ID: 108435 Result: Down-regulated in Transcription
  misc_feature: MA Experiment 108435 PARAMETER Experiment Name: At_stm_Mutants_cDNA_P Parameter: Plant Line Value: wt Landsburg vs stm
  misc_feature: MA Experiment 108435 PARAMETER Experiment Name: At_stm_Mutants_cDNA_P Parameter: Tissue Value: Shoot Apical Meristem Region
  misc_feature: MA Experiment ID: 108461 Result: Up-regulated in Transcription
  misc_feature: MA Experiment 108461 PARAMETER Experiment Name: At_Germinating_Seeds_cDNA_P Parameter: Age (day) Value: 1 vs. 0
  misc_feature: MA Experiment 108461 PARAMETER Experiment Name: At_Germinating_Seeds_cDNA_P Parameter: Tissue Value: Germinating Seeds
  misc_feature: MA Experiment ID: 108462 Result: Up-regulated in Transcription
  misc_feature: MA Experiment 108462 PARAMETER Experiment Name: At_Germinating_Seeds_cDNA_P Parameter: Age (day) Value: 2 vs. 0
  misc_feature: MA Experiment 108462 PARAMETER Experiment Name: At_Germinating_Seeds_cDNA_P Parameter: Tissue Value: Germinating Seeds
  misc_feature: MA Experiment ID: 108463 Result: Up-regulated in Transcription
  misc_feature: MA Experiment 108463 PARAMETER Experiment Name: At_Germinating_Seeds_cDNA_P Parameter: Age (day) Value: 3 vs. 0
  misc_feature: MA Experiment 108463 PARAMETER Experiment Name: At_Germinating_Seeds_cDNA_P Parameter: Tissue Value: Germinating Seeds
  misc_feature: MA Experiment ID: 108464 Result: Up-regulated in Transcription
  misc_feature: MA Experiment 108464 PARAMETER Experiment Name: At_Germinating_Seeds_cDNA_P Parameter: Age (day) Value: 4 vs. 0
  misc_feature: MA Experiment 108464 PARAMETER Experiment Name: At_Germinating_Seeds_cDNA_P Parameter: Tissue Value: Germinating Seeds
  misc_feature: MA Experiment ID: 108474 Result: Up-regulated in Transcription
  misc_feature: MA Experiment 108474 PARAMETER Experiment Name: At_Drought_Flowers_cDNA_P Parameter: Timepoint (hr) Value: null
  misc_feature: MA Experiment 108474 PARAMETER Experiment Name: At_Drought_Flowers_cDNA_P Parameter: Treatment Value: Drought vs. No Drought
  misc_feature: MA Experiment ID: 108595 Result: Down-regulated in Transcription
  misc_feature: MA Experiment 108595 PARAMETER Experiment Name: At_Ler-pi_Ovule_cDNA_P Parameter: Plant Line Value: null
  misc_feature: MA Experiment ID: 108668 Result: Down-regulated in Transcription
  misc_feature: MA Experiment 108668 PARAMETER Experiment Name: At_2mM_SA_cDNA_P Parameter: Plant Line Value: WS
  misc_feature: MA Experiment 108668 PARAMETER Experiment Name: At_2mM_SA_cDNA_P Parameter: Timepoint (hr) Value: 6
  misc_feature: MA Experiment 108668 PARAMETER Experiment Name: At_2mM_SA_cDNA_P Parameter: Treatment Value: 2mM SA vs. No Treatment
  misc_feature: MA Experiment ID: 20000069 Result: Down-regulated in Transcription
  misc_feature: MA Experiment 20000069 PARAMETER Experiment Name: At_100uM_ABA_Mutants_cDNA_P Parameter: Plant Line Value: CS23
  misc_feature: MA Experiment 20000069 PARAMETER Experiment Name: At_100uM_ABA_Mutants_cDNA_P Parameter: Timepoint (hr) Value: 6
  misc_feature: MA Experiment 20000069 PARAMETER Experiment Name: At_100uM_ABA_Mutants_cDNA_P Parameter: Tissue Value: Aerial
  misc_feature: MA Experiment 20000069 PARAMETER Experiment Name: At_100uM_ABA_Mutants_cDNA_P Parameter: Treatment Value: 100uM ABA vs. No Treatment
  misc_feature: MA Experiment ID: 20000070 Result: Down-regulated in Transcription
  misc_feature: MA Experiment 20000070 PARAMETER Experiment Name: At_100uM_ABA_Mutants_cDNA_P Parameter: Plant Line Value: CS24
  misc_feature: MA Experiment 20000070 PARAMETER Experiment Name: At_100uM_ABA_Mutants_cDNA_P Parameter: Timepoint (hr) Value: 6
  misc_feature: MA Experiment 20000070 PARAMETER Experiment Name: At_100uM_ABA_Mutants_cDNA_P Parameter: Tissue Value: Aerial
  misc_feature: MA Experiment 20000070 PARAMETER Experiment Name: At_100uM_ABA_Mutants_cDNA_P Parameter: Treatment Value: 100uM ABA vs. No Treatment
  misc_feature: MA Experiment ID: 20000071 Result: Down-regulated in Transcription
  misc_feature: MA Experiment 20000071 PARAMETER Experiment Name: At_100uM_ABA_Mutants_cDNA_P Parameter: Plant Line Value: CS8104
  misc_feature: MA Experiment 20000071 PARAMETER Experiment Name: At_100uM_ABA_Mutants_cDNA_P Parameter: Timepoint (hr) Value: 6
  misc_feature: MA Experiment 20000071 PARAMETER Experiment Name: At_100uM_ABA_Mutants_cDNA_P Parameter: Tissue Value: Aerial
  misc_feature: MA Experiment 20000071 PARAMETER Experiment Name: At_100uM_ABA_Mutants_cDNA_P Parameter: Treatment Value: 100uM ABA vs. No Treatment
  misc_feature: MA Experiment ID: 20000072 Result: Down-regulated in Transcription
  misc_feature: MA Experiment 20000072 PARAMETER Experiment Name: At_100uM_ABA_Mutants_cDNA_P Parameter: Plant Line Value: CS8105
  misc_feature: MA Experiment 20000072 PARAMETER Experiment Name: At_100uM_ABA_Mutants_cDNA_P Parameter: Timepoint (hr) Value: 6
  misc_feature: MA Experiment 20000072 PARAMETER Experiment Name: At_100uM_ABA_Mutants_cDNA_P Parameter: Tissue Value: Aerial
  misc_feature: MA Experiment 20000072 PARAMETER Experiment Name: At_100uM_ABA_Mutants_cDNA_P Parameter: Treatment Value: 100uM ABA vs. No Treatment
  misc_feature: MA Experiment ID: 20000087 Result: Down-regulated in Transcription
  misc_feature: MA Experiment 20000087 PARAMETER Experiment Name: At_100uM_ABA_Mutants_cDNA_P Parameter: Plant Line Value: WS
  misc_feature: MA Experiment 20000087 PARAMETER Experiment Name: At_100uM_ABA_Mutants_cDNA_P Parameter: Timepoint (hr) Value: 6
  misc_feature: MA Experiment 20000087 PARAMETER Experiment Name: At_100uM_ABA_Mutants_cDNA_P Parameter: Tissue Value: Aerial
  misc_feature: MA Experiment 20000087 PARAMETER Experiment Name: At_100uM_ABA_Mutants_cDNA_P Parameter: Treatment Value: 100uM ABA vs. No Treatment
  misc_feature: MA Experiment ID: 20000088 Result: Down-regulated in Transcription
  misc_feature: MA Experiment 20000088 PARAMETER Experiment Name: At_100uM_ABA_Mutants_cDNA_P Parameter: Plant Line Value: Landsberg
  misc_feature: MA Experiment 20000088 PARAMETER Experiment Name: At_100uM_ABA_Mutants_cDNA_P Parameter: Timepoint (hr) Value: 6
  misc_feature: MA Experiment 20000088 PARAMETER Experiment Name: At_100uM_ABA_Mutants_cDNA_P Parameter: Tissue Value: Aerial
  misc_feature: MA Experiment 20000088 PARAMETER Experiment Name: At_100uM_ABA_Mutants_cDNA_P Parameter: Treatment Value: 100uM ABA vs. No Treatment
  misc_feature: MA Experiment ID: 20000090 Result: Down-regulated in Transcription
  misc_feature: MA Experiment ID: 20000111 Result: Down-regulated in Transcription
  misc_feature: MA Experiment 20000111 PARAMETER Experiment Name: At_42deg_Heat_cDNA_P Parameter: Temperature (deg C) Value: 42 vs. 22
  misc_feature: MA Experiment 20000111 PARAMETER Experiment Name: At_42deg_Heat_cDNA_P Parameter: Timepoint (hr) Value: 6
  misc_feature: MA Experiment 20000111 PARAMETER Experiment Name: At_42deg_Heat_cDNA_P Parameter: Tissue Value: Aerial
  misc_feature: MA Experiment ID: 20000113 Result: Down-regulated in Transcription
  misc_feature: MA Experiment 20000113 PARAMETER Experiment Name: At_42deg_Heat_cDNA_P Parameter: Temperature (deg C) Value: 42 vs. 22
  misc_feature: MA Experiment 20000113 PARAMETER Experiment Name: At_42deg_Heat_cDNA_P Parameter: Timepoint (hr) Value: 8
  misc_feature: MA Experiment 20000113 PARAMETER Experiment Name: At_42deg_Heat_cDNA_P Parameter: Tissue Value: Aerial
  misc_feature: MA Experiment ID: 20000117 Result: Down-regulated in Transcription
  misc_feature: MA Experiment 20000117 PARAMETER Experiment Name: At_100uM_ABA_Mutants_cDNA_P Parameter: Plant Line Value: Columbia
  misc_feature: MA Experiment 20000117 PARAMETER Experiment Name: At_100uM_ABA_Mutants_cDNA_P Parameter: Timepoint (hr) Value: 6
  misc_feature: MA Experiment 20000117 PARAMETER Experiment Name: At_100uM_ABA_Mutants_cDNA_P Parameter: Tissue Value: Aerial
  misc_feature: MA Experiment 20000117 PARAMETER Experiment Name: At_100uM_ABA_Mutants_cDNA_P Parameter: Treatment Value: 100uM ABA vs. No Treatment
  misc_feature: MA Experiment ID: 20000180 Result: Up-regulated in Transcription
  misc_feature: MA Experiment 20000180 PARAMETER Experiment Name: At_Germinating_Seeds_P Parameter: Age (hr) Value: 24 vs. 0
  misc_feature: MA Experiment 20000180 PARAMETER Experiment Name: At_Germinating_Seeds_P Parameter: Tissue Value: Germinating Seeds
  misc_feature: MA Experiment ID: 20000185 Result: Down-regulated in Transcription
  misc_feature: MA Experiment 20000185 PARAMETER Experiment Name: At_Roots__P Parameter: Age (day) Value: 7 vs. 21
  misc_feature: MA Experiment 20000185 PARAMETER Experiment Name: At_Roots__P Parameter: Organism Value: A. thaliana
  misc_feature: MA Experiment 20000185 PARAMETER Experiment Name: At_Roots__P Parameter: Tissue Value: Roots vs. Whole Plant
  misc_feature: MA Experiment ID: 20000264 Result: Down-regulated in Transcription
  misc_feature: MA Experiment 20000264 PARAMETER Experiment Name: At_Open_Flower_P Parameter: Age (day) Value: 21
  misc_feature: MA Experiment 20000264 PARAMETER Experiment Name: At_Open_Flower_P Parameter: Plant Line Value: WS
  misc_feature: MA Experiment 20000264 PARAMETER Experiment Name: At_Open_Flower_P Parameter: Tissue Value: Open Flower vs. Whole Plant
  misc_feature: MA Experiment ID: 20000286 Result: Down-regulated in Transcription
  misc_feature: MA Experiment 20000286 PARAMETER Experiment Name: At_Open_Flower_P Parameter: Age (day) Value: 21
  misc_feature: MA Experiment 20000286 PARAMETER Experiment Name: At_Open_Flower_P Parameter: Plant Line Value: WS
  misc_feature: MA Experiment 20000286 PARAMETER Experiment Name: At_Open_Flower_P Parameter: Tissue Value: Half Open vs. Whole Plant
  misc_feature: MA Experiment ID: 20000437 Result: Down-regulated in Transcription
  misc_feature: MA Experiment 20000437 PARAMETER Experiment Name: At_Drought_P Parameter: Age (day) Value: 8
  misc_feature: MA Experiment 20000437 PARAMETER Experiment Name: At_Drought_P Parameter: Organism Value: A. thaliana
  misc_feature: MA Experiment 20000437 PARAMETER Experiment Name: At_Drought_P Parameter: Plant Line Value: WS
  misc_feature: MA Experiment 20000437 PARAMETER Experiment Name: At_Drought_P Parameter: Timepoint (hr) Value: 24
  misc_feature: MA Experiment 20000437 PARAMETER Experiment Name: At_Drought_P Parameter: Tissue Value: Whole Plant
  misc_feature: MA Experiment 20000437 PARAMETER Experiment Name: At_Drought_P Parameter: Treatment Value: Drought vs. No Drought
  misc_feature: MA Experiment ID: 20000438 Result: Up-regulated in Transcription
  misc_feature: MA Experiment 20000438 PARAMETER Experiment Name: At_Shoots__P Parameter: Age (day) Value: 14
  misc_feature: MA Experiment 20000438 PARAMETER Experiment Name: At_Shoots__P Parameter: Tissue Value: Shoots vs. Whole Plant
  misc_feature: MA Experiment ID: 20000439 Result: Down-regulated in Transcription
  misc_feature: MA Experiment 20000439 PARAMETER Experiment Name: At_Roots__P Parameter: Age (day) Value: 14 vs. 21
  misc_feature: MA Experiment 20000439 PARAMETER Experiment Name: At_Roots__P Parameter: Organism Value: A. thaliana
  misc_feature: MA Experiment 20000439 PARAMETER Experiment Name: At_Roots__P Parameter: Tissue Value: Roots vs. Whole Plant
  misc_feature: MA Experiment ID: 20000573 Result: Down-regulated in Transcription
  misc_feature: MA Experiment 20000573 PARAMETER Experiment Name: At_100uM_ABA_Mutants__P Parameter: Organism Value: A. thaliana
  misc_feature: MA Experiment 20000573 PARAMETER Experiment Name: At_100uM_ABA_Mutants__P Parameter: Plant Line Value: CS22 vs. Ler wt
  misc_feature: MA Experiment 20000573 PARAMETER Experiment Name: At_100uM_ABA_Mutants__P Parameter: Timepoint (hr) Value: N/A
  misc_feature: MA Experiment 20000573 PARAMETER Experiment Name: At_100uM_ABA_Mutants__P Parameter: Tissue Value: Whole Plant
  misc_feature: MA Experiment 20000573 PARAMETER Experiment Name: At_100uM_ABA_Mutants__P Parameter: Treatment Value: None
  misc_feature: MA Experiment ID: 20000794 Result: Down-regulated in Transcription
  misc_feature: MA Experiment 20000794 PARAMETER Experiment Name: At_Petals_P Parameter: Age (day) Value: 23-25 days
  misc_feature: MA Experiment 20000794 PARAMETER Experiment Name: At_Petals_P Parameter: Plant Line Value: WS
  misc_feature: MA Experiment 20000794 PARAMETER Experiment Name: At_Petals_P Parameter: Tissue Value: Petals vs. Whole plant
  misc_feature: MA Experiment ID: 20001555 Result: Down-regulated in Transcription
  misc_feature: MA Experiment 20001555 PARAMETER Experiment Name: At_Drought_Soil_Dry_P Parameter: Age (day) Value: 24
  misc_feature: MA Experiment 20001555 PARAMETER Experiment Name: At_Drought_Soil_Dry_P Parameter: Organism Value: A. thaliana
  misc_feature: MA Experiment 20001555 PARAMETER Experiment Name: At_Drought_Soil_Dry_P Parameter: Plant Line Value: WS
  misc_feature: MA Experiment 20001555 PARAMETER Experiment Name: At_Drought_Soil_Dry_P Parameter: Post Timepoint (hr) Value: None
  misc_feature: MA Experiment 20001555 PARAMETER Experiment Name: At_Drought_Soil_Dry_P Parameter: Post-Treatment Value: None
  misc_feature: MA Experiment 20001555 PARAMETER Experiment Name: At_Drought_Soil_Dry_P Parameter: Timepoint (day) Value: 10
  misc_feature: MA Experiment 20001555 PARAMETER Experiment Name: At_Drought_Soil_Dry_P Parameter: Treatment Value: Drought vs. No Drought
  misc_feature: MA Experiment ID: 20001556 Result: Down-regulated in Transcription
  misc_feature: MA Experiment 20001556 PARAMETER Experiment Name: At_Drought_Soil_Dry_P Parameter: Age (day) Value: 26
  misc_feature: MA Experiment 20001556 PARAMETER Experiment Name: At_Drought_Soil_Dry_P Parameter: Organism Value: A. thaliana
  misc_feature: MA Experiment 20001556 PARAMETER Experiment Name: At_Drought_Soil_Dry_P Parameter: Plant Line Value: WS
  misc_feature: MA Experiment 20001556 PARAMETER Experiment Name: At_Drought_Soil_Dry_P Parameter: Post Timepoint (hr) Value: None
  misc_feature: MA Experiment 20001556 PARAMETER Experiment Name: At_Drought_Soil_Dry_P Parameter: Post-Treatment Value: None
  misc_feature: MA Experiment 20001556 PARAMETER Experiment Name: At_Drought_Soil_Dry_P Parameter: Timepoint (day) Value: 12
  misc_feature: MA Experiment 20001556 PARAMETER Experiment Name: At_Drought_Soil_Dry_P Parameter: Treatment Value: Drought vs. No Drought
  misc_feature: MA Experiment ID: 20001557 Result: Down-regulated in Transcription
  misc_feature: MA Experiment 20001557 PARAMETER Experiment Name: At_Drought_Soil_Dry_P Parameter: Age (day) Value: 27
  misc_feature: MA Experiment 20001557 PARAMETER Experiment Name: At_Drought_Soil_Dry_P Parameter: Organism Value: A. thaliana
  misc_feature: MA Experiment 20001557 PARAMETER Experiment Name: At_Drought_Soil_Dry_P Parameter: Plant Line Value: WS
  misc_feature: MA Experiment 20001557 PARAMETER Experiment Name: At_Drought_Soil_Dry_P Parameter: Post Timepoint (hr) Value: 3
  misc_feature: MA Experiment 20001557 PARAMETER Experiment Name: At_Drought_Soil_Dry_P Parameter: Post-Treatment Value: Re-Water vs. No Drought
  misc_feature: MA Experiment 20001557 PARAMETER Experiment Name: At_Drought_Soil_Dry_P Parameter: Timepoint (day) Value: 13
  misc_feature: MA Experiment 20001557 PARAMETER Experiment Name: At_Drought_Soil_Dry_P Parameter: Treatment Value: Drought vs. No Drought
  misc_feature: MA Experiment ID: 20001558 Result: Down-regulated in Transcription
  misc_feature: MA Experiment 20001558 PARAMETER Experiment Name: At_Drought_Soil_Dry_P Parameter: Age (day) Value: 27
  misc_feature: MA Experiment 20001558 PARAMETER Experiment Name: At_Drought_Soil_Dry_P Parameter: Organism Value: A. thaliana
  misc_feature: MA Experiment 20001558 PARAMETER Experiment Name: At_Drought_Soil_Dry_P Parameter: Plant Line Value: WS
  misc_feature: MA Experiment 20001558 PARAMETER Experiment Name: At_Drought_Soil_Dry_P Parameter: Post Timepoint (hr) Value: 6
  misc_feature: MA Experiment 20001558 PARAMETER Experiment Name: At_Drought_Soil_Dry_P Parameter: Post-Treatment Value: Re-Water vs. No Drought
  misc_feature: MA Experiment 20001558 PARAMETER Experiment Name: At_Drought_Soil_Dry_P Parameter: Timepoint (day) Value: 13
  misc_feature: MA Experiment 20001558 PARAMETER Experiment Name: At_Drought_Soil_Dry_P Parameter: Treatment Value: Drought vs. No Drought
  misc_feature: MA Experiment ID: 20001559 Result: Down-regulated in Transcription
  misc_feature: MA Experiment 20001559 PARAMETER Experiment Name: At_Drought_Soil_Dry_P Parameter: Age (day) Value: 28
  misc_feature: MA Experiment 20001559 PARAMETER Experiment Name: At_Drought_Soil_Dry_P Parameter: Organism Value: A. thaliana
  misc_feature: MA Experiment 20001559 PARAMETER Experiment Name: At_Drought_Soil_Dry_P Parameter: Plant Line Value: WS
  misc_feature: MA Experiment 20001559 PARAMETER Experiment Name: At_Drought_Soil_Dry_P Parameter: Post Timepoint (hr) Value: 29
  misc_feature: MA Experiment 20001559 PARAMETER Experiment Name: At_Drought_Soil_Dry_P Parameter: Post-Treatment Value: Re-Water vs. No Drought
  misc_feature: MA Experiment 20001559 PARAMETER Experiment Name: At_Drought_Soil_Dry_P Parameter: Timepoint (day) Value: 14
  misc_feature: MA Experiment 20001559 PARAMETER Experiment Name: At_Drought_Soil_Dry_P Parameter: Treatment Value: Drought vs. No Drought
  misc_feature: MA Experiment ID: 20001757 Result: Up-regulated in Transcription
  misc_feature: MA Experiment 20001757 PARAMETER Experiment Name: At_50mM_NH4NO3_L-to-H_P Parameter: Timepoint (hr) Value: 6
  misc_feature: MA Experiment 20001757 PARAMETER Experiment Name: At_50mM_NH4NO3_L-to-H_P Parameter: Tissue Value: Leaf
  misc_feature: MA Experiment 20001757 PARAMETER Experiment Name: At_50mM_NH4NO3_L-to-H_P Parameter: Treatment Value: 50mM NH4NO3 vs 100mM Mannitol
  misc_feature: MA Experiment ID: 20001904 Result: Down-regulated in Transcription
  misc_feature: MA Experiment 20001904 PARAMETER Experiment Name: At_Drought_Reproduction_P Parameter: Age (day) Value: 37
  misc_feature: MA Experiment 20001904 PARAMETER Experiment Name: At_Drought_Reproduction_P Parameter: Organism Value: A. thaliana
  misc_feature: MA Experiment 20001904 PARAMETER Experiment Name: At_Drought_Reproduction_P Parameter: Plant Line Value: WS
  misc_feature: MA Experiment 20001904 PARAMETER Experiment Name: At_Drought_Reproduction_P Parameter: Timepoint (day) Value: 7
  misc_feature: MA Experiment 20001904 PARAMETER Experiment Name: At_Drought_Reproduction_P Parameter: Tissue Value: Rosettes
  misc_feature: MA Experiment 20001904 PARAMETER Experiment Name: At_Drought_Reproduction_P Parameter: Treatment Value: Drought vs. No Drought
  misc_feature: MA Experiment ID: 20001905 Result: Down-regulated in Transcription
  misc_feature: MA Experiment 20001905 PARAMETER Experiment Name: At_Drought_Reproduction_P Parameter: Age (day) Value: 40
  misc_feature: MA Experiment 20001905 PARAMETER Experiment Name: At_Drought_Reproduction_P Parameter: Organism Value: A. thaliana
  misc_feature: MA Experiment 20001905 PARAMETER Experiment Name: At_Drought_Reproduction_P Parameter: Plant Line Value: WS
  misc_feature: MA Experiment 20001905 PARAMETER Experiment Name: At_Drought_Reproduction_P Parameter: Timepoint (day) Value: 10
  misc_feature: MA Experiment 20001905 PARAMETER Experiment Name: At_Drought_Reproduction_P Parameter: Tissue Value: Rosettes
  misc_feature: MA Experiment 20001905 PARAMETER Experiment Name: At_Drought_Reproduction_P Parameter: Treatment Value: Drought vs. No Drought
  misc_feature: MA Experiment ID: 20001906 Result: Down-regulated in Transcription
  misc_feature: MA Experiment 20001906 PARAMETER Experiment Name: At_Drought_Reproduction_P Parameter: Age (day) Value: 35
  misc_feature: MA Experiment 20001906 PARAMETER Experiment Name: At_Drought_Reproduction_P Parameter: Organism Value: A. thaliana
  misc_feature: MA Experiment 20001906 PARAMETER Experiment Name: At_Drought_Reproduction_P Parameter: Plant Line Value: WS
  misc_feature: MA Experiment 20001906 PARAMETER Experiment Name: At_Drought_Reproduction_P Parameter: Timepoint (day) Value: 5
  misc_feature: MA Experiment 20001906 PARAMETER Experiment Name: At_Drought_Reproduction_P Parameter: Tissue Value: Siliques
  misc_feature: MA Experiment 20001906 PARAMETER Experiment Name: At_Drought_Reproduction_P Parameter: Treatment Value: Drought vs. No Drought
  misc_feature: MA Experiment ID: 20001908 Result: Down-regulated in Transcription
  misc_feature: MA Experiment 20001908 PARAMETER Experiment Name: At_Drought_Reproduction_P Parameter: Age (day) Value: 40
  misc_feature: MA Experiment 20001908 PARAMETER Experiment Name: At_Drought_Reproduction_P Parameter: Organism Value: A. thaliana
  misc_feature: MA Experiment 20001908 PARAMETER Experiment Name: At_Drought_Reproduction_P Parameter: Plant Line Value: WS
  misc_feature: MA Experiment 20001908 PARAMETER Experiment Name: At_Drought_Reproduction_P Parameter: Timepoint (day) Value: 10
  misc_feature: MA Experiment 20001908 PARAMETER Experiment Name: At_Drought_Reproduction_P Parameter: Tissue Value: Siliques
  misc_feature: MA Experiment 20001908 PARAMETER Experiment Name: At_Drought_Reproduction_P Parameter: Treatment Value: Drought vs. No Drought
tgatgaagtcaagaggctaaacgcagttcaatcccccttccaagacgctgaatcaatagcaaaagcgattggaaacgcgaccaaagttgttgttacggtcggggcaacagagaatggtccggacgcccaagtctcgacctcaaacgcattgctcgtggtccaagcagctgagctagccggcgtaagccacgtggcgatagtctacgacggcaccatcagcgggtctacatacaacgtgctcgacgggattacttcgtttttcggcaatcttttcgcaaaatctcagccattgactatctctgacctcatcgagaaagtagctcaaaccgacgtggcctacacactcataaagacgagtttgacggaggatttctctccggagaaagcttataacgtcgtcgtttcagctgaagggagtaacagcggcagtggcagtagttcgtccgaggcctacaaagttccgaagttgaagattgcgtcgctggtagcagacatttttgcgaatacggccgtggcagaaaataaggtggtggaagtttctacagatccatcagcaccatcgcggccagtggacgagcttttcagtgtaatcccggaagatgggaggagaaaagtgtacgcagatgcgatcgcaagggaaagagcagaggaagaagctaaagttgcagctgacaaagctcgagaggcagcagaagcagcgaaagagttcgagaaacaaatgcaaaagctctctgagaaagaagcagaagctgcaagcttagctgaggatgcgcagcagaaagcagatgccgtgggagtcacagtggacggtttatttaacaaggcgaaagatatcagctcaggtctctcctggaataaactcggctctcagttcgcaactgcgattcagaacgcttcagagacgcctaaagtacaggttgctacggtcagaggacaagcaaaagcgagaaacttgccacccaagaaagcagtggtgaagcagagaccatcatctccgtttgcatccaaaccgaaagaagaacgtccgaagaagccggagaaagaggtgaggaaagtgttcggaggattgtttaagcaagagaccatctacatcgacgatgattgaaaaggccatatgcgatgtcgttttgaagttccgtacagtttcctttttttctctttccttctgtttcaagttaaaattctgtaatcgtatgacaaaattatacataaaaaaccatcattctctcc

SEQ ID NO: 38925 - protein, 367 aa, Arabidopsis thaliana
  peptide (1)..(367): Ceres Seq. ID no. 12385151
  misc_feature (1)..(153): Homolog of NCBI NO: 18408279 NR Description: putative protein
  misc_feature (1)..(367): Homolog of NCBI NO: 7487756 NR Description: hypothetical protein T6H20.190 - Arabidopsis
DEVKRLNAVQSPFQDAESIAKAIGNATKVVVTVGATENGPDAQVSTSNALLVVQAAELAGVSHVAIVYDGTISGSTYNVLDGITSFFGNLFAKSQPLTISDLIEKVAQTDVAYTLIKTSLTEDFSPEKAYNVVVSAEGSNSGSGSSSSEAYKVPKLKIASLVADIFANTAVAENKVVEVSTDPSAPSRPVDELFSVIPEDGRRKVYADAIARERAEEEAKVAADKAREAAEAAKEFEKQMQKLSEKEAEAASLAEDAQQKADAVGVTVDGLFNKAKDISSGLSWNKLGSQFATAIQNASETPKVQVATVRGQAKARNLPPKKAVVKQRPSSPFASKPKEERPKKPEKEVRKVFGGLFKQETIYIDDD

SEQ ID NO: 38926 - DNA, 1702 bp, Arabidopsis thaliana
  misc_feature (1)..(1702): Ceres Seq. ID no. 12330215
  misc_feature: MA Experiment ID: 108462 Result: Down-regulated in Transcription
  misc_feature: MA Experiment 108462 PARAMETER Experiment Name: At_Germinating_Seeds_cDNA_P Parameter: Age (day) Value: 2 vs. 0
  misc_feature: MA Experiment 108462 PARAMETER Experiment Name: At_Germinating_Seeds_cDNA_P Parameter: Tissue Value: Germinating Seeds
  misc_feature: MA Experiment ID: 108577 Result: Down-regulated in Transcription
  misc_feature: MA Experiment 108577 PARAMETER Experiment Name: At_42deg_Heat_cDNA_P Parameter: Temperature (deg C) Value: 42 vs. 22
  misc_feature: MA Experiment 108577 PARAMETER Experiment Name: At_42deg_Heat_cDNA_P Parameter: Timepoint (hr) Value: 6
  misc_feature: MA Experiment 108577 PARAMETER Experiment Name: At_42deg_Heat_cDNA_P Parameter: Tissue Value: Aerial
  misc_feature: MA Experiment ID: 20000069 Result: Up-regulated in Transcription
  misc_feature: MA Experiment 20000069 PARAMETER Experiment Name: At_100uM_ABA_Mutants_cDNA_P Parameter: Plant Line Value: CS23
  misc_feature: MA Experiment 20000069 PARAMETER Experiment Name: At_100uM_ABA_Mutants_cDNA_P Parameter: Timepoint (hr) Value: 6
  misc_feature: MA Experiment 20000069 PARAMETER Experiment Name: At_100uM_ABA_Mutants_cDNA_P Parameter: Tissue Value: Aerial
  misc_feature: MA Experiment 20000069 PARAMETER Experiment Name: At_100uM_ABA_Mutants_cDNA_P Parameter: Treatment Value: 100uM ABA vs. No Treatment
  misc_feature: MA Experiment ID: 20000070 Result: Up-regulated in Transcription
  misc_feature: MA Experiment 20000070 PARAMETER Experiment Name: At_100uM_ABA_Mutants_cDNA_P Parameter: Plant Line Value: CS24
  misc_feature: MA Experiment 20000070 PARAMETER Experiment Name: At_100uM_ABA_Mutants_cDNA_P Parameter: Timepoint (hr) Value: 6
  misc_feature: MA Experiment 20000070 PARAMETER Experiment Name: At_100uM_ABA_Mutants_cDNA_P Parameter: Tissue Value: Aerial
  misc_feature: MA Experiment 20000070 PARAMETER Experiment Name: At_100uM_ABA_Mutants_cDNA_P Parameter: Treatment Value: 100uM ABA vs. No Treatment
  misc_feature: MA Experiment ID: 20000071 Result: Up-regulated in Transcription
  misc_feature: MA Experiment 20000071 PARAMETER Experiment Name: At_100uM_ABA_Mutants_cDNA_P Parameter: Plant Line Value: CS8104
  misc_feature: MA Experiment 20000071 PARAMETER Experiment Name: At_100uM_ABA_Mutants_cDNA_P Parameter: Timepoint (hr) Value: 6
  misc_feature: MA Experiment 20000071 PARAMETER Experiment Name: At_100uM_ABA_Mutants_cDNA_P Parameter: Tissue Value: Aerial
  misc_feature: MA Experiment 20000071 PARAMETER Experiment Name: At_100uM_ABA_Mutants_cDNA_P Parameter: Treatment Value: 100uM ABA vs. No Treatment
  misc_feature: MA Experiment ID: 20000072 Result: Up-regulated in Transcription
  misc_feature: MA Experiment 20000072 PARAMETER Experiment Name: At_100uM_ABA_Mutants_cDNA_P Parameter: Plant Line Value: CS8105
  misc_feature: MA Experiment 20000072 PARAMETER Experiment Name: At_100uM_ABA_Mutants_cDNA_P Parameter: Timepoint (hr) Value: 6
  misc_feature: MA Experiment 20000072 PARAMETER Experiment Name: At_100uM_ABA_Mutants_cDNA_P Parameter: Tissue Value: Aerial
  misc_feature: MA Experiment 20000072 PARAMETER Experiment Name: At_100uM_ABA_Mutants_cDNA_P Parameter: Treatment Value: 100uM ABA vs. No Treatment
  misc_feature: MA Experiment ID: 20000086 Result: Up-regulated in Transcription
  misc_feature: MA Experiment 20000086 PARAMETER Experiment Name: At_100uM_ABA_Mutants_cDNA_P Parameter: Plant Line Value: CS22
  misc_feature: MA Experiment 20000086 PARAMETER Experiment Name: At_100uM_ABA_Mutants_cDNA_P Parameter: Timepoint (hr) Value: 6
  misc_feature: MA Experiment 20000086 PARAMETER Experiment Name: At_100uM_ABA_Mutants_cDNA_P Parameter: Tissue Value: Aerial
  misc_feature: MA Experiment 20000086 PARAMETER Experiment Name: At_100uM_ABA_Mutants_cDNA_P Parameter: Treatment Value: 100uM ABA vs. No Treatment
  misc_feature: MA Experiment ID: 20000087 Result: Up-regulated in Transcription
  misc_feature: MA Experiment 20000087 PARAMETER Experiment Name: At_100uM_ABA_Mutants_cDNA_P Parameter: Plant Line Value: WS
  misc_feature: MA Experiment 20000087 PARAMETER Experiment Name: At_100uM_ABA_Mutants_cDNA_P Parameter: Timepoint (hr) Value: 6
  misc_feature: MA Experiment 20000087 PARAMETER Experiment Name: At_100uM_ABA_Mutants_cDNA_P Parameter: Tissue Value: Aerial
  misc_feature: MA Experiment 20000087 PARAMETER Experiment Name: At_100uM_ABA_Mutants_cDNA_P Parameter: Treatment Value: 100uM ABA vs. No Treatment
  misc_feature: MA Experiment ID: 20000088 Result: Up-regulated in Transcription
  misc_feature: MA Experiment 20000088 PARAMETER Experiment Name: At_100uM_ABA_Mutants_cDNA_P Parameter: Plant Line Value: Landsberg
  misc_feature: MA Experiment 20000088 PARAMETER Experiment Name: At_100uM_ABA_Mutants_cDNA_P Parameter: Timepoint (hr) Value: 6
  misc_feature: MA Experiment 20000088 PARAMETER Experiment Name: At_100uM_ABA_Mutants_cDNA_P Parameter: Tissue Value: Aerial
  misc_feature: MA Experiment 20000088 PARAMETER Experiment Name: At_100uM_ABA_Mutants_cDNA_P Parameter: Treatment Value: 100uM ABA vs. No Treatment
  misc_feature: MA Experiment ID: 20000089 Result: Up-regulated in Transcription
  misc_feature: MA Experiment ID: 20000111 Result: Down-regulated in Transcription
  misc_feature: MA Experiment 20000111 PARAMETER Experiment Name: At_42deg_Heat_cDNA_P Parameter: Temperature (deg C) Value: 42 vs. 22
  misc_feature: MA Experiment 20000111 PARAMETER Experiment Name: At_42deg_Heat_cDNA_P Parameter: Timepoint (hr) Value: 6
  misc_feature: MA Experiment 20000111 PARAMETER Experiment Name: At_42deg_Heat_cDNA_P Parameter: Tissue Value: Aerial
  misc_feature: MA Experiment ID: 20000113 Result: Down-regulated in Transcription
  misc_feature: MA Experiment 20000113 PARAMETER Experiment Name: At_42deg_Heat_cDNA_P Parameter: Temperature (deg C) Value: 42 vs. 22
  misc_feature: MA Experiment 20000113 PARAMETER Experiment Name: At_42deg_Heat_cDNA_P Parameter: Timepoint (hr) Value: 8
  misc_feature: MA Experiment 20000113 PARAMETER Experiment Name: At_42deg_Heat_cDNA_P Parameter: Tissue Value: Aerial
  misc_feature: MA Experiment ID: 20000117 Result: Up-regulated in Transcription
  misc_feature: MA Experiment 20000117 PARAMETER Experiment Name: At_100uM_ABA_Mutants_cDNA_P Parameter: Plant Line Value: Columbia
  misc_feature: MA Experiment 20000117 PARAMETER Experiment Name: At_100uM_ABA_Mutants_cDNA_P Parameter: Timepoint (hr) Value: 6
  misc_feature: MA Experiment 20000117 PARAMETER Experiment Name: At_100uM_ABA_Mutants_cDNA_P Parameter: Tissue Value: Aerial
  misc_feature: MA Experiment 20000117 PARAMETER Experiment Name: At_100uM_ABA_Mutants_cDNA_P Parameter: Treatment Value: 100uM ABA vs. No Treatment
  misc_feature: MA Experiment ID: 20000173 Result: Down-regulated in Transcription
  misc_feature: MA Experiment 20000173 PARAMETER Experiment Name: At_42deg_Heat_P Parameter: Age (day) Value: 14
  misc_feature: MA Experiment 20000173 PARAMETER Experiment Name: At_42deg_Heat_P Parameter: Organism Value: A. thaliana
  misc_feature: MA Experiment 20000173 PARAMETER Experiment Name: At_42deg_Heat_P Parameter: Plant Line Value: WS
  misc_feature: MA Experiment 20000173 PARAMETER Experiment Name: At_42deg_Heat_P Parameter: Temperature (deg C) Value: 42 vs. 22
  misc_feature: MA Experiment 20000173 PARAMETER Experiment Name: At_42deg_Heat_P Parameter: Timepoint (hr) Value: 6
  misc_feature: MA Experiment 20000173 PARAMETER Experiment Name: At_42deg_Heat_P Parameter: Tissue Value: Aerial
  misc_feature: MA Experiment ID: 20000180 Result: Down-regulated in Transcription
  misc_feature: MA Experiment 20000180 PARAMETER Experiment Name: At_Germinating_Seeds_P Parameter: Age (hr) Value: 24 vs. 0
  misc_feature: MA Experiment 20000180 PARAMETER Experiment Name: At_Germinating_Seeds_P Parameter: Tissue Value: Germinating Seeds
  misc_feature: MA Experiment ID: 20000184 Result: Down-regulated in Transcription
  misc_feature: MA Experiment 20000184 PARAMETER Experiment Name: At_Shoots__P Parameter: Age (day) Value: 7
  misc_feature: MA Experiment 20000184 PARAMETER Experiment Name: At_Shoots__P Parameter: Tissue Value: Shoots vs. Whole Plant
  misc_feature: MA Experiment ID: 20000185 Result: Down-regulated in Transcription
  misc_feature: MA Experiment 20000185 PARAMETER Experiment Name: At_Roots__P Parameter: Age (day) Value: 7 vs. 21
  misc_feature: MA Experiment 20000185 PARAMETER Experiment Name: At_Roots__P Parameter: Organism Value: A. thaliana
  misc_feature: MA Experiment 20000185 PARAMETER Experiment Name: At_Roots__P Parameter: Tissue Value: Roots vs. Whole Plant
  misc_feature: MA Experiment ID: 20000224 Result: Up-regulated in Transcription
  misc_feature: MA Experiment ID: 20000286 Result: Up-regulated in Transcription
  misc_feature: MA Experiment 20000286 PARAMETER Experiment Name: At_Open_Flower_P Parameter: Age (day) Value: 21
  misc_feature: MA Experiment 20000286 PARAMETER Experiment Name: At_Open_Flower_P Parameter: Plant Line Value: WS
  misc_feature: MA Experiment 20000286 PARAMETER Experiment Name: At_Open_Flower_P Parameter: Tissue Value: Half Open vs. Whole Plant
  misc_feature: MA Experiment ID: 20000437 Result: Up-regulated in Transcription
  misc_feature: MA Experiment 20000437 PARAMETER Experiment Name: At_Drought_P Parameter: Age (day) Value: 8
  misc_feature: MA Experiment 20000437 PARAMETER Experiment Name: At_Drought_P Parameter: Organism Value: A. thaliana
  misc_feature: MA Experiment 20000437 PARAMETER Experiment Name: At_Drought_P Parameter: Plant Line Value: WS
  misc_feature: MA Experiment 20000437 PARAMETER Experiment Name: At_Drought_P Parameter: Timepoint (hr) Value: 24
  misc_feature: MA Experiment 20000437 PARAMETER Experiment Name: At_Drought_P Parameter: Tissue Value: Whole Plant
  misc_feature: MA Experiment 20000437 PARAMETER Experiment Name: At_Drought_P Parameter: Treatment Value: Drought vs. No Drought
  misc_feature: MA Experiment ID: 20000438 Result: Down-regulated in Transcription
  misc_feature: MA Experiment 20000438 PARAMETER Experiment Name: At_Shoots__P Parameter: Age (day) Value: 14
  misc_feature: MA Experiment 20000438 PARAMETER Experiment Name: At_Shoots__P Parameter: Tissue Value: Shoots vs. Whole Plant
  misc_feature: MA Experiment ID: 20000495 Result: Up-regulated in Transcription
  misc_feature: MA Experiment 20000495 PARAMETER Experiment Name: At_Guard_Cells_P Parameter: Harvest Date Value: 8/2/2002
  misc_feature: MA Experiment 20000495 PARAMETER Experiment Name: At_Guard_Cells_P Parameter: Organism Value: A. thaliana
  misc_feature: MA Experiment 20000495 PARAMETER Experiment Name: At_Guard_Cells_P Parameter: Tissue Value: Guard Cells vs. Leaves
  misc_feature: MA Experiment ID: 20000794 Result: Up-regulated in Transcription
  misc_feature: MA Experiment 20000794 PARAMETER Experiment Name: At_Petals_P Parameter: Age (day) Value: 23-25 days
  misc_feature: MA Experiment 20000794 PARAMETER Experiment Name: At_Petals_P Parameter: Plant Line Value: WS
  misc_feature: MA Experiment 20000794 PARAMETER Experiment Name: At_Petals_P Parameter: Tissue Value: Petals vs. Whole plant
ctgttgtttgttttatcatctctccataattgcttcgatttctctccaaagacacaacacaaaaagtgctttttttaatcagatattttctgggcttcactttaactctcttcgtgcttggttttccgatcttagtcgttactaattgagtcggagactgttcatttcctgattctgaagaaagttttggagaaggagaagatgtcaactctgcgagtgagctagggtttagtgtgttttccgatttttgagctcttggggattgttgttttctcttaaagagtcgattttgaatggcggtggagtatgtatgttgcagcccaaacttctttatacatatagctgtgattgtgtttcttgtcttgttcgctggactcatgtctggcttaacattgggtcttatgtctttgagtctcgttgatcttgaagttctcgctaaatccggtacacctgaacatcgtaaatatgcagcaaagatattgccagtggtaaagaatcagcacttgttgcttgtcactttacttatatgcaatgcagctgctatggagacgcttcctatttttcttgatggccttgtgacggcatggggtgccattttgatttcagttacattgattcttctctttggtgagattatacctcagtcgatttgttcacgttatggtttagcgattggtgcaacagtggctccgtttgtccgtgtcctagtctttatctgcttacctgttgcatggccaataagcaagcgctttttcgaagagctgagctgaaaacacttgtggattttcatggaaatgaggctggaaagggtggggagttgactcatgacgaaacgacaatcattgcaggagctcttgaactctctgagaaaatggtcaaagatgcaatgacaccaatatcggatatctttgtgattgatatcaatgccaaactagacagagacttgatgaacttgattcttgagaaagggcatagcagagttccagtatactatgagcagccaactaacataatcggccttgttctggtgaagaacttattaactatcaacccagatgaagaaatacctgtcaagaatgtcacgataagaaggattccaagagttccagaaatcttgcctttatatgacatattgaacgaattccagaaaggactcagccacatggctgttgttgtaagacagtgtgacaaaatccacccattaccttctaaaaatgggagtgttaaggaagcccgagtggatgtggatagtgagggaactcctactcctcaggagagaatgttaaggacaaaaagatcgcttcaaaagtggaagagctttccgaatcgagcaagttcgtttaaaggagggtcaaagagcaagaagtggtcaaaagacaatgatgcagacatcctgcaattgaatggcaatccgctgcctaaacttgctgaggaagaagaagcagtcggaatcattacgatggaggatgtcattgaagaacttctgcaggaggagatctttgacgaaactgatcaccattttgaagactcctaacacagagtgcatgaccactgaactggttatgaatgtcgaaaactttagtctttgttttcaactttcaaactgtcacttgtccggcgaatgtgtatcaatgtaggcatgaacaacaactttttctatggtttcaagatgttttctctctatatatatatcattggtctc

SEQ ID NO: 38927 - protein, 267 aa, Arabidopsis thaliana
  peptide (1)..(267): Ceres Seq. ID no. 12330216
  misc_feature (53)..(108): Pfam Name: CBS domain Pfam Description: CBS domain
  misc_feature (6)..(100): Homolog of NCBI NO: 12039276 NR Description: putative ancient conserved domain protein [Oryza
  misc_feature (234)..(265): Homolog of NCBI NO: 15237264 NR Description: putative protein; protein id: At5g52790.1
  misc_feature (1)..(170): Homolog of NCBI NO: 15237264 NR Description: putative protein; protein id: At5g52790.1
  misc_feature (221)..(263): Homolog of NCBI NO: 22330087 NR Description: unknown protein
  misc_feature (7)..(163): Homolog of NCBI NO: 22330087 NR Description: unknown protein
  misc_feature (6)..(266): Homolog of NCBI NO: 40538933 NR Description: expressed protein [Oryza sativa (japonica
  misc_feature (23)..(253): Homolog of NCBI NO: 25411569 NR Description: hypothetical protein At2g14520 [imported] -
  misc_feature (6)..(266): Homolog of NCBI NO: 30679136 NR Description: CBS domain containing protein [Arabidopsis
  misc_feature (1)..(267): Homolog of NCBI NO: 7487085 NR Description: hypothetical protein T16L1.190 - Arabidopsis
  misc_feature (1)..(267): Homolog of NCBI NO: 22329131 NR Description: putative protein
MANKQALFRRAELKTLVDFHGNEAGKGGELTHDETTIIAGALELSEKMVKDAMTPISDIFVIDINAKLDRDLMNLILEKGHSRVPVYYEQPTNIIGLVLVKNLLTINPDEEIPVKNVTIRRIPRVPEILPLYDILNEFQKGLSHMAVVVRQCDKIHPLPSKNGSVKEARVDVDSEGTPTPQERMLRTKRSLQKWKSFPNRASSFKGGSKSKKWSKDNDADILQLNGNPLPKLAEEEEAVGIITMEDVIEELLQEEIFDETDHHFEDS

SEQ ID NO: 38928 - protein, 220 aa, Arabidopsis thaliana
  peptide (1)..(220): Ceres Seq. ID no. 12330217
  misc_feature (6)..(61): Pfam Name: CBS domain Pfam Description: CBS domain
  misc_feature (1)..(53): Homolog of NCBI NO: 12039276 NR Description: putative ancient conserved domain protein [Oryza
  misc_feature (187)..(218): Homolog of NCBI NO: 15237264 NR Description: putative protein; protein id: At5g52790.1
  misc_feature (1)..(123): Homolog of NCBI NO: 15237264 NR Description: putative protein; protein id: At5g52790.1
  misc_feature (174)..(216): Homolog of NCBI NO: 22330087 NR Description: unknown protein
  misc_feature (1)..(116): Homolog of NCBI NO: 22330087 NR Description: unknown protein
  misc_feature (1)..(219): Homolog of NCBI NO: 40538933 NR Description: expressed protein [Oryza sativa (japonica
  misc_feature (1)..(206): Homolog of NCBI NO: 25411569 NR Description: hypothetical protein At2g14520 [imported] -
  misc_feature (1)..(219): Homolog of NCBI NO: 30679136 NR Description: CBS domain containing protein [Arabidopsis
  misc_feature (1)..(220): Homolog of NCBI NO: 7487085 NR Description: hypothetical protein T16L1.190 - Arabidopsis
  misc_feature (1)..(220): Homolog of NCBI NO: 22329131 NR Description: putative protein
MVKDAMTPISDIFVIDINAKLDRDLMNLILEKGHSRVPVYYEQPTNIIGLVLVKNLLTINPDEEIPVKNVTIRRIPRVPEILPLYDILNEFQKGLSHMAVVVRQCDKIHPLPSKNGSVKEARVDVDSEGTPTPQERMLRTKRSLQKWKSFPNRASSFKGGSKSKKWSKDNDADILQLNGNPLPKLAEEEEAVGIITMEDVIEELLQEEIFDETDHHFEDS

SEQ ID NO: 38929 - protein, 215 aa, Arabidopsis thaliana
  peptide (1)..(215): Ceres Seq. ID no. 12330218
  misc_feature (1)..(56): Pfam Name: CBS domain Pfam Description: CBS domain
  misc_feature (1)..(48): Homolog of NCBI NO: 12039276 NR Description: putative ancient conserved domain protein [Oryza
  misc_feature (182)..(213): Homolog of NCBI NO: 15237264 NR Description: putative protein; protein id: At5g52790.1
  misc_feature (1)..(118): Homolog of NCBI NO: 15237264 NR Description: putative protein; protein id: At5g52790.1
  misc_feature (169)..(211): Homolog of NCBI NO: 22330087 NR Description: unknown protein
  misc_feature (1)..(111): Homolog of NCBI NO: 22330087 NR Description: unknown protein
  misc_feature (1)..(214): Homolog of NCBI NO: 40538933 NR Description: expressed protein [Oryza sativa (japonica
  misc_feature (1)..(201): Homolog of NCBI NO: 25411569 NR Description: hypothetical protein At2g14520 [imported] -
  misc_feature (1)..(214): Homolog of NCBI NO: 30679136 NR Description: CBS domain containing protein [Arabidopsis
  misc_feature (1)..(215): Homolog of NCBI NO: 7487085 NR Description: hypothetical protein T16L1.190 - Arabidopsis
  misc_feature (1)..(215): Homolog of NCBI NO: 22329131 NR Description: putative protein
MTPISDIFVIDINAKLDRDLMNLILEKGHSRVPVYYEQPTNIIGLVLVKNLLTINPDEEIPVKNVTIRRIPRVPEILPLYDILNEFQKGLSHMAVVVRQCDKIHPLPSKNGSVKEARVDVDSEGTPTPQERMLRTKRSLQKWKSFPNRASSFKGGSKSKKWSKDNDADILQLNGNPLPKLAEEEEAVGIITMEDVIEELLQEEIFDETDHHFEDS

SEQ ID NO: 38930 - DNA, 1391 bp, Arabidopsis thaliana; identical to SEQ ID NO: 21324
  misc_feature (1)..(1391): Ceres Seq. ID no. 13488285
  misc_feature: MA Experiment ID: 108561 Result: Down-regulated in Transcription
  misc_feature: MA Experiment 108561 PARAMETER Experiment Name: At_100uM_ABA_cDNA_P Parameter: Timepoint (hr) Value: 6
  misc_feature: MA Experiment 108561 PARAMETER Experiment Name: At_100uM_ABA_cDNA_P Parameter: Tissue Value: Aerial
  misc_feature: MA Experiment 108561 PARAMETER Experiment Name: At_100uM_ABA_cDNA_P Parameter: Treatment Value: 100uM ABA vs. No Treatment
  misc_feature: MA Experiment ID: 108569 Result: Up-regulated in Transcription
  misc_feature: MA Experiment 108569 PARAMETER Experiment Name: At_0.001%_MeJA__cDNA_P Parameter: Timepoint (hr) Value: 6
  misc_feature: MA Experiment 108569 PARAMETER Experiment Name: At_0.001%_MeJA__cDNA_P Parameter: Tissue Value: Aerial
  misc_feature: MA Experiment 108569 PARAMETER Experiment Name: At_0.001%_MeJA__cDNA_P Parameter: Treatment Value: 0.001% MeJA vs. No Treatment
  misc_feature: MA Experiment ID: 108572 Result: Down-regulated in Transcription
  misc_feature: MA Experiment 108572 PARAMETER Experiment Name: At_Drought_cDNA_P Parameter: Timepoint (hr) Value: 1
  misc_feature: MA Experiment 108572 PARAMETER Experiment Name: At_Drought_cDNA_P Parameter: Tissue Value: Aerial
  misc_feature: MA Experiment 108572 PARAMETER Experiment Name: At_Drought_cDNA_P Parameter: Treatment Value: Drought vs. No Drought
  misc_feature: MA Experiment ID: 108576 Result: Down-regulated in Transcription
  misc_feature: MA Experiment 108576 PARAMETER Experiment Name: At_42deg_Heat_cDNA_P Parameter: Temperature (deg C) Value: 42 vs. 22
  misc_feature: MA Experiment 108576 PARAMETER Experiment Name: At_42deg_Heat_cDNA_P Parameter: Timepoint (hr) Value: 1
  misc_feature: MA Experiment 108576 PARAMETER Experiment Name: At_42deg_Heat_cDNA_P Parameter: Tissue Value: Aerial
  misc_feature: MA Experiment ID: 108668 Result: Down-regulated in Transcription
  misc_feature: MA Experiment 108668 PARAMETER Experiment Name: At_2mM_SA_cDNA_P Parameter: Plant Line Value: WS
  misc_feature: MA Experiment 108668 PARAMETER Experiment Name: At_2mM_SA_cDNA_P Parameter: Timepoint (hr) Value: 6
  misc_feature: MA Experiment 108668 PARAMETER Experiment Name: At_2mM_SA_cDNA_P Parameter: Treatment Value: 2mM SA vs. No Treatment
  misc_feature: MA Experiment ID: 20000169 Result: Down-regulated in Transcription
  misc_feature: MA Experiment 20000169 PARAMETER Experiment Name: At_100uM_ABA_P Parameter: Age (day) Value: 14
  misc_feature: MA Experiment 20000169 PARAMETER Experiment Name: At_100uM_ABA_P Parameter: Organism Value: A. thaliana
  misc_feature: MA Experiment 20000169 PARAMETER Experiment Name: At_100uM_ABA_P Parameter: Plant Line Value: WS
  misc_feature: MA Experiment 20000169 PARAMETER Experiment Name: At_100uM_ABA_P Parameter: Timepoint (hr) Value: 6
  misc_feature: MA Experiment 20000169 PARAMETER Experiment Name: At_100uM_ABA_P Parameter: Tissue Value: Aerial
  misc_feature: MA Experiment 20000169 PARAMETER Experiment Name: At_100uM_ABA_P Parameter: Treatment Value: 100uM ABA vs. No Treatment
  misc_feature: MA Experiment ID: 20000171 Result: Down-regulated in Transcription
  misc_feature: MA Experiment 20000171 PARAMETER Experiment Name: At_42deg_Heat_P Parameter: Age (day) Value: 14
  misc_feature: MA Experiment 20000171 PARAMETER Experiment Name: At_42deg_Heat_P Parameter: Organism Value: A. thaliana
  misc_feature: MA Experiment 20000171 PARAMETER Experiment Name: At_42deg_Heat_P Parameter: Plant Line Value: WS
  misc_feature: MA Experiment 20000171 PARAMETER Experiment Name: At_42deg_Heat_P Parameter: Temperature (deg C) Value: 42 vs. 22
  misc_feature: MA Experiment 20000171 PARAMETER Experiment Name: At_42deg_Heat_P Parameter: Timepoint (hr) Value: 1
  misc_feature: MA Experiment 20000171 PARAMETER Experiment Name: At_42deg_Heat_P Parameter: Tissue Value: Aerial
  misc_feature: MA Experiment ID: 20000173 Result: Down-regulated in Transcription
  misc_feature: MA Experiment 20000173 PARAMETER Experiment Name: At_42deg_Heat_P Parameter: Age (day) Value: 14
  misc_feature: MA Experiment 20000173 PARAMETER Experiment Name: At_42deg_Heat_P Parameter: Organism Value: A. thaliana
  misc_feature: MA Experiment 20000173 PARAMETER Experiment Name: At_42deg_Heat_P Parameter: Plant Line Value: WS
  misc_feature: MA Experiment 20000173 PARAMETER Experiment Name: At_42deg_Heat_P Parameter: Temperature (deg C) Value: 42 vs. 22
  misc_feature: MA Experiment 20000173 PARAMETER Experiment Name: At_42deg_Heat_P Parameter: Timepoint (hr) Value: 6
  misc_feature: MA Experiment 20000173 PARAMETER Experiment Name: At_42deg_Heat_P Parameter: Tissue Value: Aerial
  misc_feature: MA Experiment ID: 20000180 Result: Up-regulated in Transcription
  misc_feature: MA Experiment 20000180 PARAMETER Experiment Name: At_Germinating_Seeds_P Parameter: Age (hr) Value: 24 vs. 0
  misc_feature: MA Experiment 20000180 PARAMETER Experiment Name: At_Germinating_Seeds_P Parameter: Tissue Value: Germinating Seeds
  misc_feature: MA Experiment ID: 20000182 Result: Down-regulated in Transcription
  misc_feature: MA Experiment 20000182 PARAMETER Experiment Name: At_2mM_SA_P Parameter: Age (day) Value: 14
  misc_feature: MA Experiment 20000182 PARAMETER Experiment Name: At_2mM_SA_P Parameter: Organism Value: A. thaliana
  misc_feature: MA Experiment 20000182 PARAMETER Experiment Name: At_2mM_SA_P Parameter: Plant Line Value: WS
  misc_feature: MA Experiment 20000182 PARAMETER Experiment Name: At_2mM_SA_P Parameter: Timepoint (hr) Value: 6
  misc_feature: MA Experiment 20000182 PARAMETER Experiment Name: At_2mM_SA_P Parameter: Tissue Value: Aerial
  misc_feature: MA Experiment 20000182 PARAMETER Experiment Name: At_2mM_SA_P Parameter: Treatment Value: 2mM SA vs. No Treatment
  misc_feature: MA Experiment ID: 20000184 Result: Up-regulated in Transcription
  misc_feature: MA Experiment 20000184 PARAMETER Experiment Name: At_Shoots__P Parameter: Age (day) Value: 7
  misc_feature: MA Experiment 20000184 PARAMETER Experiment Name: At_Shoots__P Parameter: Tissue Value: Shoots vs. Whole Plant
  misc_feature: MA Experiment ID: 20000227 Result: Up-regulated in Transcription
  misc_feature: MA Experiment 20000227 PARAMETER Experiment Name: At_Root-Tips-vs-Tops_P Parameter: Tissue Value: Root Tips vs. Root Tops
  misc_feature: MA Experiment ID: 20000234 Result: Up-regulated in Transcription
  misc_feature: MA Experiment 20000234 PARAMETER Experiment Name: At_Siliques_P Parameter: Age (day) Value: 21
  misc_feature: MA Experiment 20000234 PARAMETER Experiment Name: At_Siliques_P Parameter: Organism Value: A. thaliana
  misc_feature: MA Experiment 20000234 PARAMETER Experiment Name: At_Siliques_P Parameter: Plant Line Value: WS
  misc_feature: MA Experiment 20000234 PARAMETER Experiment Name: At_Siliques_P Parameter: Tissue Value: Less Than 5mm Siliques vs. Whole Plant
  misc_feature: MA Experiment ID: 20000264 Result: Up-regulated in Transcription
  misc_feature: MA Experiment 20000264 PARAMETER Experiment Name: At_Open_Flower_P Parameter: Age (day) Value: 21
  misc_feature: MA Experiment 20000264 PARAMETER Experiment Name: At_Open_Flower_P Parameter: Plant Line Value: WS
  misc_feature: MA Experiment 20000264 PARAMETER Experiment Name: At_Open_Flower_P Parameter: Tissue Value: Open Flower vs. Whole Plant
  misc_feature: MA Experiment ID: 20000265 Result: Up-regulated in Transcription
  misc_feature: MA Experiment 20000265 PARAMETER Experiment Name: At_Open_Flower_P Parameter: Age (day) Value: 21
  misc_feature: MA Experiment 20000265 PARAMETER Experiment Name: At_Open_Flower_P Parameter: Plant Line Value: WS
  misc_feature: MA Experiment 20000265 PARAMETER Experiment Name: At_Open_Flower_P Parameter: Tissue Value: Closed Flower vs. Whole Plant
  misc_feature: MA Experiment ID: 20000267 Result: Down-regulated in Transcription
  misc_feature: MA Experiment 20000267 PARAMETER Experiment Name: At_Drought_P Parameter: Age (day) Value: 7
  misc_feature: MA Experiment 20000267 PARAMETER Experiment Name: At_Drought_P Parameter: Organism Value: A. thaliana
  misc_feature: MA Experiment 20000267 PARAMETER Experiment Name: At_Drought_P Parameter: Plant Line Value: WS
  misc_feature: MA Experiment 20000267 PARAMETER Experiment Name: At_Drought_P Parameter: Timepoint (hr) Value: 6
  misc_feature: MA Experiment 20000267 PARAMETER Experiment Name: At_Drought_P Parameter: Tissue Value: Whole Plant
  misc_feature: MA Experiment 20000267 PARAMETER Experiment Name: At_Drought_P Parameter: Treatment Value: Drought vs. No Drought
  misc_feature: MA Experiment ID: 20000286 Result: Up-regulated in Transcription
  misc_feature: MA Experiment 20000286 PARAMETER Experiment Name: At_Open_Flower_P Parameter: Age (day) Value: 21
  misc_feature: MA Experiment 20000286 PARAMETER Experiment Name: At_Open_Flower_P Parameter: Plant Line Value: WS
  misc_feature: MA Experiment 20000286 PARAMETER Experiment Name: At_Open_Flower_P Parameter: Tissue Value: Half Open vs. Whole Plant
  misc_feature: MA Experiment ID: 20000436 Result: Down-regulated in Transcription
  misc_feature: MA Experiment 20000436 PARAMETER Experiment Name: At_Drought_P Parameter: Age (day) Value: 7
  misc_feature: MA Experiment 20000436 PARAMETER Experiment Name: At_Drought_P Parameter: Organism Value: A. thaliana
  misc_feature: MA Experiment 20000436 PARAMETER Experiment Name: At_Drought_P Parameter: Plant Line Value: WS
  misc_feature: MA Experiment 20000436 PARAMETER Experiment Name: At_Drought_P Parameter: Timepoint (hr) Value: 12
  misc_feature: MA Experiment 20000436 PARAMETER Experiment Name: At_Drought_P Parameter: Tissue Value: Whole Plant
  misc_feature: MA Experiment 20000436 PARAMETER Experiment Name: At_Drought_P Parameter: Treatment Value: Drought vs. No Drought
  misc_feature: MA Experiment ID: 20000437 Result: Down-regulated in Transcription
  misc_feature: MA Experiment 20000437 PARAMETER Experiment Name: At_Drought_P Parameter: Age (day) Value: 8
  misc_feature: MA Experiment 20000437 PARAMETER Experiment Name: At_Drought_P Parameter: Organism Value: A. thaliana
  misc_feature: MA Experiment 20000437 PARAMETER Experiment Name: At_Drought_P Parameter: Plant Line Value: WS
  misc_feature: MA Experiment 20000437 PARAMETER Experiment Name: At_Drought_P Parameter: Timepoint (hr) Value: 24
  misc_feature: MA Experiment 20000437 PARAMETER Experiment Name: At_Drought_P Parameter: Tissue Value: Whole Plant
  misc_feature: MA Experiment 20000437 PARAMETER Experiment Name: At_Drought_P Parameter: Treatment Value: Drought vs. No Drought
  misc_feature: MA Experiment ID: 20000438 Result: Up-regulated in Transcription
  misc_feature: MA Experiment 20000438 PARAMETER Experiment Name: At_Shoots__P Parameter: Age (day) Value: 14
  misc_feature: MA Experiment 20000438 PARAMETER Experiment Name: At_Shoots__P Parameter: Tissue Value: Shoots vs. Whole Plant
  misc_feature: MA Experiment ID: 20000527 Result: Down-regulated in Transcription
  misc_feature: MA Experiment 20000527 PARAMETER Experiment Name: At_10percent_PEG_P Parameter: Age (day) Value: 20
  misc_feature: MA Experiment 20000527 PARAMETER Experiment Name: At_10percent_PEG_P Parameter: Organism Value: A. thaliana
  misc_feature: MA Experiment 20000527 PARAMETER Experiment Name: At_10percent_PEG_P Parameter: Plant Line Value: WS
  misc_feature: MA Experiment 20000527 PARAMETER Experiment Name: At_10percent_PEG_P Parameter: Timepoint (day) Value: 20
  misc_feature: MA Experiment 20000527 PARAMETER Experiment Name: At_10percent_PEG_P Parameter: Tissue Value: Whole Plant
  misc_feature: MA Experiment 20000527 PARAMETER Experiment Name: At_10percent_PEG_P Parameter: Treatment Value: 10percent PEG vs. No Treatment
  misc_feature: MA Experiment ID: 20000794 Result: Up-regulated in Transcription
  misc_feature: MA Experiment 20000794 PARAMETER Experiment Name: At_Petals_P Parameter: Age (day) Value: 23-25 days
  misc_feature: MA Experiment 20000794 PARAMETER Experiment Name: At_Petals_P Parameter: Plant Line Value: WS
  misc_feature: MA Experiment 20000794 PARAMETER Experiment Name: At_Petals_P Parameter: Tissue Value: Petals vs. Whole plant
  misc_feature: MA Experiment ID: 20001450 Result: Up-regulated in Transcription
  misc_feature: MA Experiment 20001450 PARAMETER Experiment Name: At_Far-red-induction_P Parameter: Age (day) Value: 7
  misc_feature: MA Experiment 20001450 PARAMETER Experiment Name: At_Far-red-induction_P Parameter: Light Value: Far-red vs. White
  misc_feature: MA Experiment 20001450 PARAMETER Experiment Name: At_Far-red-induction_P Parameter: Organism Value: A. thaliana
  misc_feature: MA Experiment 20001450 PARAMETER Experiment Name: At_Far-red-induction_P Parameter: Plant Line Value: Columbia
  misc_feature: MA Experiment 20001450 PARAMETER Experiment Name: At_Far-red-induction_P Parameter: Timepoint (hr) Value: 8
  misc_feature: MA Experiment 20001450 PARAMETER Experiment Name: At_Far-red-induction_P Parameter: Tissue Value: Whole Plant
  misc_feature: MA Experiment ID: 20001554 Result: Down-regulated in Transcription
  misc_feature: MA Experiment 20001554 PARAMETER Experiment Name: At_Drought_Soil_Dry_P Parameter: Age (day) Value: 21
  misc_feature: MA Experiment 20001554 PARAMETER Experiment Name: At_Drought_Soil_Dry_P Parameter: Organism Value: A. thaliana
  misc_feature: MA Experiment 20001554 PARAMETER Experiment Name: At_Drought_Soil_Dry_P Parameter: Plant Line Value: WS
  misc_feature: MA Experiment 20001554 PARAMETER Experiment Name: At_Drought_Soil_Dry_P Parameter: Post Timepoint (hr) Value: None
  misc_feature: MA Experiment 20001554 PARAMETER Experiment Name: At_Drought_Soil_Dry_P Parameter: Post-Treatment Value: None
  misc_feature: MA Experiment 20001554 PARAMETER Experiment Name: At_Drought_Soil_Dry_P Parameter: Timepoint (day) Value: 7
  misc_feature: MA Experiment 20001554 PARAMETER Experiment Name: At_Drought_Soil_Dry_P Parameter: Treatment Value: Drought vs. No Drought
  misc_feature: MA Experiment ID: 20001555 Result: Down-regulated in Transcription
  misc_feature: MA Experiment 20001555 PARAMETER Experiment Name: At_Drought_Soil_Dry_P Parameter: Age (day) Value: 24
  misc_feature: MA Experiment 20001555 PARAMETER Experiment Name: At_Drought_Soil_Dry_P Parameter: Organism Value: A. thaliana
  misc_feature: MA Experiment 20001555 PARAMETER Experiment Name: At_Drought_Soil_Dry_P Parameter: Plant Line Value: WS
  misc_feature: MA Experiment 20001555 PARAMETER Experiment Name: At_Drought_Soil_Dry_P Parameter: Post Timepoint (hr) Value: None
  misc_feature: MA Experiment 20001555 PARAMETER Experiment Name: At_Drought_Soil_Dry_P Parameter: Post-Treatment Value: None
  misc_feature: MA Experiment 20001555 PARAMETER Experiment Name: At_Drought_Soil_Dry_P Parameter: Timepoint (day) Value: 10
  misc_feature: MA Experiment 20001555 PARAMETER Experiment Name: At_Drought_Soil_Dry_P Parameter: Treatment Value: Drought vs. No Drought
  misc_feature: MA Experiment ID: 20001556 Result: Down-regulated in Transcription
  misc_feature: MA Experiment 20001556 PARAMETER Experiment Name: At_Drought_Soil_Dry_P Parameter: Age (day) Value: 26
  misc_feature: MA Experiment 20001556 PARAMETER Experiment Name: At_Drought_Soil_Dry_P Parameter: Organism Value: A. thaliana
  misc_feature: MA Experiment 20001556 PARAMETER Experiment Name: At_Drought_Soil_Dry_P Parameter: Plant Line Value: WS
  misc_feature: MA Experiment 20001556 PARAMETER Experiment Name: At_Drought_Soil_Dry_P Parameter: Post Timepoint (hr) Value: None
  misc_feature: MA Experiment 20001556 PARAMETER Experiment Name: At_Drought_Soil_Dry_P Parameter: Post-Treatment Value: None
  misc_feature: MA Experiment 20001556 PARAMETER Experiment Name: At_Drought_Soil_Dry_P Parameter: Timepoint (day) Value: 12
  misc_feature: MA Experiment 20001556 PARAMETER Experiment Name: At_Drought_Soil_Dry_P Parameter: Treatment Value: Drought vs. No Drought
  misc_feature: MA Experiment ID: 20001559 Result: Down-regulated in Transcription
  misc_feature: MA Experiment 20001559 PARAMETER Experiment Name: At_Drought_Soil_Dry_P Parameter: Age (day) Value: 28
  misc_feature: MA Experiment 20001559 PARAMETER Experiment Name: At_Drought_Soil_Dry_P Parameter: Organism Value: A. thaliana
  misc_feature: MA Experiment 20001559 PARAMETER Experiment Name: At_Drought_Soil_Dry_P Parameter: Plant Line Value: WS
  misc_feature: MA Experiment 20001559 PARAMETER Experiment Name: At_Drought_Soil_Dry_P Parameter: Post Timepoint (hr) Value: 29
  misc_feature: MA Experiment 20001559 PARAMETER Experiment Name: At_Drought_Soil_Dry_P Parameter: Post-Treatment Value: Re-Water vs. No Drought
  misc_feature: MA Experiment 20001559 PARAMETER Experiment Name: At_Drought_Soil_Dry_P Parameter: Timepoint (day) Value: 14
  misc_feature: MA Experiment 20001559 PARAMETER Experiment Name: At_Drought_Soil_Dry_P Parameter: Treatment Value: Drought vs. No Drought
  misc_feature: MA Experiment ID: 20001757 Result: Up-regulated in Transcription
  misc_feature: MA Experiment 20001757 PARAMETER Experiment Name: At_50mM_NH4NO3_L-to-H_P Parameter: Timepoint (hr) Value: 6
  misc_feature: MA Experiment 20001757 PARAMETER Experiment Name: At_50mM_NH4NO3_L-to-H_P Parameter: Tissue Value: Leaf
  misc_feature: MA Experiment 20001757 PARAMETER Experiment Name: At_50mM_NH4NO3_L-to-H_P Parameter: Treatment Value: 50mM NH4NO3 vs 100mM Mannitol
  misc_feature: MA Experiment ID: 20001904 Result: Down-regulated in Transcription
  misc_feature: MA Experiment 20001904 PARAMETER Experiment Name: At_Drought_Reproduction_P Parameter: Age (day) Value: 37
  misc_feature: MA Experiment 20001904 PARAMETER Experiment Name: At_Drought_Reproduction_P Parameter: Organism Value: A. thaliana
  misc_feature: MA Experiment 20001904 PARAMETER Experiment Name: At_Drought_Reproduction_P Parameter: Plant Line Value: WS
  misc_feature: MA Experiment 20001904 PARAMETER Experiment Name: At_Drought_Reproduction_P Parameter: Timepoint (day) Value: 7
  misc_feature: MA Experiment 20001904 PARAMETER Experiment Name: At_Drought_Reproduction_P Parameter: Tissue Value: Rosettes
  misc_feature: MA Experiment 20001904 PARAMETER Experiment Name: At_Drought_Reproduction_P Parameter: Treatment Value: Drought vs. No Drought
  misc_feature: MA Experiment ID: 20001906 Result: Down-regulated in Transcription
  misc_feature: MA Experiment 20001906 PARAMETER Experiment Name: At_Drought_Reproduction_P Parameter: Age (day) Value: 35
  misc_feature: MA Experiment 20001906 PARAMETER Experiment Name: At_Drought_Reproduction_P Parameter: Organism Value: A. thaliana
  misc_feature: MA Experiment 20001906 PARAMETER Experiment Name: At_Drought_Reproduction_P Parameter: Plant Line Value: WS
  misc_feature: MA Experiment 20001906 PARAMETER Experiment Name: At_Drought_Reproduction_P Parameter: Timepoint (day) Value: 5
  misc_feature: MA Experiment 20001906 PARAMETER Experiment Name: At_Drought_Reproduction_P Parameter: Tissue Value: Siliques
  misc_feature: MA Experiment 20001906 PARAMETER Experiment Name: At_Drought_Reproduction_P Parameter: Treatment Value: Drought vs. No Drought
  misc_feature: MA Experiment ID: 20001908 Result: Down-regulated in Transcription
  misc_feature: MA Experiment 20001908 PARAMETER Experiment Name: At_Drought_Reproduction_P Parameter: Age (day) Value: 40
  misc_feature: MA Experiment 20001908 PARAMETER Experiment Name: At_Drought_Reproduction_P Parameter: Organism Value: A. thaliana
  misc_feature: MA Experiment 20001908 PARAMETER Experiment Name: At_Drought_Reproduction_P Parameter: Plant Line Value: WS
  misc_feature: MA Experiment 20001908 PARAMETER Experiment Name: At_Drought_Reproduction_P Parameter: Timepoint (day) Value: 10
  misc_feature: MA Experiment 20001908 PARAMETER Experiment Name: At_Drought_Reproduction_P Parameter: Tissue Value: Siliques
  misc_feature: MA Experiment 20001908 PARAMETER Experiment Name: At_Drought_Reproduction_P Parameter: Treatment Value: Drought vs. No Drought
  misc_feature: MA Experiment ID: 20001911 Result: Down-regulated in Transcription
  misc_feature: MA Experiment 20001911 PARAMETER Experiment Name: At_Drought_Reproduction_P Parameter: Age (day) Value: 40
  misc_feature: MA Experiment 20001911 PARAMETER Experiment Name: At_Drought_Reproduction_P Parameter: Organism Value: A. thaliana
  misc_feature: MA Experiment 20001911 PARAMETER Experiment Name: At_Drought_Reproduction_P Parameter: Plant Line Value: WS
  misc_feature: MA Experiment 20001911 PARAMETER Experiment Name: At_Drought_Reproduction_P Parameter: Timepoint (day) Value: 10
  misc_feature: MA Experiment 20001911 PARAMETER Experiment Name: At_Drought_Reproduction_P Parameter: Tissue Value: Flowers
  misc_feature: MA Experiment 20001911 PARAMETER Experiment Name: At_Drought_Reproduction_P Parameter: Treatment Value: Drought vs. No Drought

SEQ ID NO: 38931 - protein, 381 aa, Arabidopsis thaliana; identical to SEQ ID NO: 21325
  peptide (1)..(381): Ceres Seq. ID no. 13488286
  misc_feature (241)..(264): Pfam Name: Leucine Rich Repeat Pfam Description: Leucine Rich Repeat
  misc_feature (241)..(264): Pfam Name: Leucine Rich Repeat Pfam Description: Leucine Rich Repeat
  misc_feature (241)..(264): Pfam Name: Leucine Rich Repeat Pfam Description: Leucine Rich Repeat
  misc_feature (24)..(347): Homolog of NCBI NO: 21536600 NR Description: putative disease resistance protein [Arabidopsis
  misc_feature (18)..(347): Homolog of NCBI NO: 15225296 NR Description: disease resistance protien-related (LRR)
  misc_feature (59)..(377): Homolog of NCBI NO: 25004882 NR Description: polygalacturonase inhibitor-like protein [Cicer
  misc_feature (24)..(377): Homolog of NCBI NO: 15239943 NR Description: leucine rich repeat protein family [Arabidopsis
  misc_feature (24)..(377): Homolog of NCBI NO: 14532722 NR Description: unknown protein [Arabidopsis thaliana]
  misc_feature (24)..(347): Homolog of NCBI NO: 21536600 NR Description: putative disease resistance protein [Arabidopsis
  misc_feature (59)..(377): Homolog of NCBI NO: 25004882 NR Description: polygalacturonase inhibitor-like protein [Cicer
  misc_feature (24)..(377): Homolog of NCBI NO: 14532722 NR Description: unknown protein [Arabidopsis thaliana]
  misc_feature (24)..(377): Homolog of NCBI NO: 15239943 NR Description: leucine rich repeat protein family [Arabidopsis
  misc_feature (59)..(377): Homolog of NCBI NO: 25004882 NR Description: polygalacturonase inhibitor-like protein [Cicer
  misc_feature (18)..(347): Homolog of NCBI NO: 15225296 NR Description: disease resistance protien-related (LRR)
  misc_feature (24)..(347): Homolog of NCBI NO: 21536600 NR Description: putative disease resistance protein [Arabidopsis
  misc_feature (10)..(381): Homolog of NCBI NO: 15230539 NR Description: DNA-damage-repair/toleration protein, putative
  misc_feature (62)..(381): Homolog of NCBI NO: 421844 NR Description: DRT100 protein precursor - Arabidopsis thaliana
  misc_feature (14)..(379): Homolog of NCBI NO: 38566726 NR Description: leucine rich repeat protein [Cicer arietinum]
  misc_feature (20)..(377): Homolog of NCBI NO: 15232373 NR Description: disease resistance protein family (LRR)
  misc_feature (24)..(377): Homolog of NCBI NO: 21593689 NR Description: leucine rich repeat protein, putative
  misc_feature (10)..(381): Homolog of NCBI NO: 15230539 NR Description: DNA-damage-repair/toleration protein, putative
  misc_feature (62)..(381): Homolog of NCBI NO: 421844 NR Description: DRT100 protein precursor - Arabidopsis thaliana
  misc_feature (14)..(379): Homolog of NCBI NO: 38566726 NR Description: leucine rich repeat protein [Cicer arietinum]
  misc_feature (20)..(377): Homolog of NCBI NO: 15232373 NR Description: disease resistance protein family (LRR)
  misc_feature (24)..(377): Homolog of NCBI NO: 21593689 NR Description: leucine rich repeat protein, putative
  misc_feature (24)..(377): Homolog of NCBI NO: 14532722 NR Description: unknown protein [Arabidopsis thaliana]
  misc_feature (24)..(377): Homolog of NCBI NO: 15239943 NR Description: leucine rich repeat protein family [Arabidopsis
  misc_feature (18)..(347): Homolog of NCBI NO: 15225296 NR Description: disease resistance protien-related (LRR)
  misc_feature (24)..(377): Homolog of NCBI NO: 21593689 NR Description: leucine rich repeat protein, putative
  misc_feature (20)..(377): Homolog of NCBI NO: 15232373 NR Description: disease resistance protein family (LRR)
  misc_feature (14)..(379): Homolog of NCBI NO: 38566726 NR Description: leucine rich repeat protein [Cicer arietinum]
  misc_feature (62)..(381): Homolog of NCBI NO: 421844 NR Description: DRT100 protein precursor - Arabidopsis thaliana
  misc_feature (10)..(381): Homolog of NCBI NO: 15230539 NR Description: DNA-damage-repair/toleration protein, putative

SEQ ID NO: 38932 - protein, 372 aa, Arabidopsis thaliana; identical to SEQ ID NO: 21326
  peptide (1)..(372): Ceres Seq. ID no. 13488287
  misc_feature (232)..(255): Pfam Name: Leucine Rich Repeat Pfam Description: Leucine Rich Repeat
  misc_feature (232)..(255): Pfam Name: Leucine Rich Repeat Pfam Description: Leucine Rich Repeat
  misc_feature (232)..(255): Pfam Name: Leucine Rich Repeat Pfam Description: Leucine Rich Repeat
  misc_feature (15)..(338): Homolog of NCBI NO: 21536600 NR Description: putative disease resistance protein [Arabidopsis
  misc_feature (9)..(338): Homolog of NCBI NO: 15225296 NR Description: disease resistance protien-related (LRR)
  misc_feature (50)..(368): Homolog of NCBI NO: 25004882 NR Description: polygalacturonase inhibitor-like protein [Cicer
  misc_feature (15)..(368): Homolog of NCBI NO: 15239943 NR Description: leucine rich repeat protein family [Arabidopsis
  misc_feature (15)..(368): Homolog of NCBI NO: 14532722 NR Description: unknown protein [Arabidopsis thaliana]
  misc_feature (15)..(368): Homolog of NCBI NO: 14532722 NR Description: unknown protein [Arabidopsis thaliana]
  misc_feature (11)..(368): Homolog of NCBI NO: 15232373 NR Description: disease resistance protein family (LRR)
  misc_feature (53)..(372): Homolog of NCBI NO: 421844 NR Description: DRT100 protein precursor - Arabidopsis thaliana
  misc_feature (15)..(368): Homolog of NCBI NO: 15239943 NR Description: leucine rich repeat protein family [Arabidopsis
  misc_feature (50)..(368): Homolog of NCBI NO: 25004882 NR Description: polygalacturonase inhibitor-like protein [Cicer
  misc_feature (9)..(338): Homolog of NCBI NO: 15225296 NR Description: disease resistance protien-related (LRR)
  misc_feature (15)..(338): Homolog of NCBI NO: 21536600 NR Description: putative disease resistance protein [Arabidopsis
  misc_feature (15)..(368): Homolog of NCBI NO: 15239943 NR Description: leucine rich repeat protein family [Arabidopsis
  misc_feature (50)..(368): Homolog of NCBI NO: 25004882 NR Description: polygalacturonase inhibitor-like protein [Cicer
  misc_feature (9)..(338): Homolog of NCBI NO: 15225296 NR Description: disease resistance protien-related (LRR)
  misc_feature (15)..(338): Homolog of NCBI NO: 21536600 NR Description: putative disease resistance protein [Arabidopsis
  misc_feature (1)..(372): Homolog of NCBI NO: 15230539 NR Description: DNA-damage-repair/toleration protein, putative
  misc_feature (1)..(372): Homolog of NCBI NO: 15230539 NR Description: DNA-damage-repair/toleration protein, putative
  misc_feature (53)..(372): Homolog of NCBI NO: 421844 NR Description: DRT100 protein precursor - Arabidopsis thaliana
  misc_feature (5)..(370): Homolog of NCBI NO: 38566726 NR Description: leucine rich repeat protein [Cicer arietinum]
  misc_feature (11)..(368): Homolog of NCBI NO: 15232373 NR Description: disease resistance protein family (LRR)
  misc_feature (15)..(368): Homolog of NCBI NO: 21593689 NR Description: leucine rich repeat protein, putative
  misc_feature (15)..(368): Homolog of NCBI NO: 14532722 NR Description: unknown protein [Arabidopsis thaliana]
  misc_feature (5)..(370): Homolog of NCBI NO: 38566726 NR Description: leucine rich repeat protein [Cicer arietinum]
  misc_feature (15)..(368): Homolog of NCBI NO: 21593689 NR Description: leucine rich repeat protein, putative
  misc_feature (15)..(368): Homolog of NCBI NO: 21593689 NR Description: leucine rich repeat protein, putative
  misc_feature (11)..(368): Homolog of NCBI NO: 15232373 NR Description: disease resistance protein family (LRR)
  misc_feature (5)..(370): Homolog of NCBI NO: 38566726 NR Description: leucine rich repeat protein [Cicer arietinum]
  misc_feature (53)..(372): Homolog of NCBI NO: 421844 NR Description: DRT100 protein precursor - Arabidopsis thaliana
  misc_feature (1)..(372): Homolog of NCBI NO: 15230539 NR Description: DNA-damage-repair/toleration protein, putative

SEQ ID NO: 38933 - protein, 275 aa, Arabidopsis thaliana; identical to SEQ ID NO: 21327
  peptide (1)..(275): Ceres Seq. ID no. 13488288
  misc_feature (135)..(158): Pfam Name: Leucine Rich Repeat Pfam Description: Leucine Rich Repeat
  misc_feature (135)..(158): Pfam Name: Leucine Rich Repeat Pfam Description: Leucine Rich Repeat
  misc_feature (135)..(158): Pfam Name: Leucine Rich Repeat Pfam Description: Leucine Rich Repeat
  misc_feature (1)..(241): Homolog of NCBI NO: 21536600 NR Description: putative disease resistance protein [Arabidopsis
  misc_feature (1)..(241): Homolog of NCBI NO: 15225296 NR Description: disease resistance protien-related (LRR)
  misc_feature (1)..(271): Homolog of NCBI NO: 25004882 NR Description: polygalacturonase inhibitor-like protein [Cicer
  misc_feature (1)..(271): Homolog of NCBI NO: 15239943 NR Description: leucine rich repeat protein family [Arabidopsis
  misc_feature (1)..(271): Homolog of NCBI NO: 14532722 NR Description: unknown protein [Arabidopsis thaliana]
  misc_feature (1)..(241): Homolog of NCBI NO: 21536600 NR Description: putative disease resistance protein [Arabidopsis
  misc_feature (1)..(271): Homolog of NCBI NO: 25004882 NR Description: polygalacturonase inhibitor-like protein [Cicer
  misc_feature (1)..(271): Homolog of NCBI NO: 14532722 NR Description: unknown protein [Arabidopsis thaliana]
  misc_feature (1)..(241): Homolog of NCBI NO: 21536600 NR Description: putative disease resistance protein [Arabidopsis
  misc_feature (1)..(275): Homolog of NCBI NO: 15230539 NR Description: DNA-damage-repair/toleration protein, putative
  misc_feature (1)..(275): Homolog of NCBI NO: 421844 NR Description: DRT100 protein precursor - Arabidopsis thaliana
  misc_feature (1)..(273): Homolog of NCBI NO: 38566726 NR Description: leucine rich repeat protein [Cicer arietinum]
  misc_feature (1)..(275): Homolog of NCBI NO: 15230539 NR Description: DNA-damage-repair/toleration protein, putative
  misc_feature (1)..(275): Homolog of NCBI NO: 421844 NR Description: DRT100 protein precursor - Arabidopsis thaliana
  misc_feature (1)..(273): Homolog of NCBI NO: 38566726 NR Description: leucine rich repeat protein [Cicer arietinum]
  misc_feature (1)..(271): Homolog of NCBI NO: 15232373 NR Description: disease resistance protein family (LRR)
  misc_feature (1)..(271): Homolog of NCBI NO: 21593689 NR Description: leucine rich repeat protein, putative
  misc_feature (1)..(271): Homolog of NCBI NO: 15232373 NR Description: disease resistance protein family (LRR)
  misc_feature (1)..(271): Homolog of NCBI NO: 21593689 NR Description: leucine rich repeat protein, putative
  misc_feature (1)..(271): Homolog of NCBI NO: 14532722 NR Description: unknown protein [Arabidopsis thaliana]
  misc_feature (1)..(271): Homolog of NCBI NO: 15239943 NR Description: leucine rich repeat protein family [Arabidopsis
  misc_feature (1)..(271): Homolog of NCBI NO: 25004882 NR Description: polygalacturonase inhibitor-like protein [Cicer
  misc_feature (1)..(241): Homolog of NCBI NO: 15225296 NR Description: disease resistance protien-related (LRR)
  misc_feature (1)..(271): Homolog of NCBI NO: 15239943 NR Description: leucine rich repeat protein family [Arabidopsis
  misc_feature (1)..(241): Homolog of NCBI NO: 15225296 NR Description: disease resistance protien-related (LRR)
  misc_feature (1)..(271): Homolog of NCBI NO: 21593689 NR Description: leucine rich repeat protein, putative
  misc_feature (1)..(271): Homolog of NCBI NO: 15232373 NR Description: disease resistance protein family (LRR)
  misc_feature (1)..(273): Homolog of NCBI NO: 38566726 NR Description: leucine rich repeat protein [Cicer arietinum]
  misc_feature (1)..(275): Homolog of NCBI NO: 421844 NR Description: DRT100 protein precursor - Arabidopsis thaliana
  misc_feature (1)..(275): Homolog of NCBI NO: 15230539 NR Description: DNA-damage-repair/toleration protein, putative

SEQ ID NO: 38934 - DNA, 1720 bp, Arabidopsis thaliana
  misc_feature (1)..(1720): Ceres Seq. ID no. 12371256
  misc_feature: MA Experiment ID: 108434 Result: Up-regulated in Transcription
  misc_feature: MA Experiment 108434 PARAMETER Experiment Name: At_Root_Tips_cDNA_P Parameter: Tissue Value: Root Tips
  misc_feature: MA Experiment ID: 108473 Result: Down-regulated in Transcription
  misc_feature: MA Experiment 108473 PARAMETER Experiment Name: At_Drought_Flowers_cDNA_P Parameter: Timepoint (hr) Value: 7 d
  misc_feature: MA Experiment 108473 PARAMETER Experiment Name: At_Drought_Flowers_cDNA_P Parameter: Tissue Value: Flower
  misc_feature: MA Experiment 108473 PARAMETER Experiment Name: At_Drought_Flowers_cDNA_P Parameter: Treatment Value: Drought vs. No Drought
  misc_feature: MA Experiment ID: 108594 Result: Up-regulated in Transcription
  misc_feature: MA Experiment 108594 PARAMETER Experiment Name: At_Ler-rhl_Root_cDNA_P Parameter: Plant Line Value: null
  misc_feature: MA Experiment ID: 108595 Result: Up-regulated in Transcription
  misc_feature: MA Experiment 108595 PARAMETER Experiment Name: At_Ler-pi_Ovule_cDNA_P Parameter: Plant Line Value: null
  misc_feature: MA Experiment ID: 20000069 Result: Down-regulated in Transcription
  misc_feature: MA Experiment 20000069 PARAMETER Experiment Name: At_100uM_ABA_Mutants_cDNA_P Parameter: Plant Line Value: CS23
  misc_feature: MA Experiment 20000069 PARAMETER Experiment Name: At_100uM_ABA_Mutants_cDNA_P Parameter: Timepoint (hr) Value: 6
  misc_feature: MA Experiment 20000069 PARAMETER Experiment Name: At_100uM_ABA_Mutants_cDNA_P Parameter: Tissue Value: Aerial
  misc_feature: MA Experiment 20000069 PARAMETER Experiment Name: At_100uM_ABA_Mutants_cDNA_P Parameter: Treatment Value: 100uM ABA vs. No Treatment
  misc_feature: MA Experiment ID: 20000087 Result: Down-regulated in Transcription
  misc_feature: MA Experiment 20000087 PARAMETER Experiment Name: At_100uM_ABA_Mutants_cDNA_P Parameter: Plant Line Value: WS
  misc_feature: MA Experiment 20000087 PARAMETER Experiment Name: At_100uM_ABA_Mutants_cDNA_P Parameter: Timepoint (hr) Value: 6
  misc_feature: MA Experiment 20000087 PARAMETER Experiment Name: At_100uM_ABA_Mutants_cDNA_P Parameter: Tissue Value: Aerial
  misc_feature: MA Experiment 20000087 PARAMETER Experiment Name: At_100uM_ABA_Mutants_cDNA_P Parameter: Treatment Value: 100uM ABA vs. No Treatment
  misc_feature: MA Experiment ID: 20000090 Result: Down-regulated in Transcription
  misc_feature: MA Experiment ID: 20000185 Result: Down-regulated in Transcription
  misc_feature: MA Experiment 20000185 PARAMETER Experiment Name: At_Roots__P Parameter: Age (day) Value: 7 vs. 21
  misc_feature: MA Experiment 20000185 PARAMETER Experiment Name: At_Roots__P Parameter: Organism Value: A. thaliana
  misc_feature: MA Experiment 20000185 PARAMETER Experiment Name: At_Roots__P Parameter: Tissue Value: Roots vs. Whole Plant
  misc_feature: MA Experiment ID: 20000234 Result: Up-regulated in Transcription
  misc_feature: MA Experiment 20000234 PARAMETER Experiment Name: At_Siliques_P Parameter: Age (day) Value: 21
  misc_feature: MA Experiment 20000234 PARAMETER Experiment Name: At_Siliques_P Parameter: Organism Value: A. thaliana
  misc_feature: MA Experiment 20000234 PARAMETER Experiment Name: At_Siliques_P Parameter: Plant Line Value: WS
  misc_feature: MA Experiment 20000234 PARAMETER Experiment Name: At_Siliques_P Parameter: Tissue Value: Less Than 5mm Siliques vs. Whole Plant
  misc_feature: MA Experiment ID: 20000264 Result: Up-regulated in Transcription
  misc_feature: MA Experiment 20000264 PARAMETER Experiment Name: At_Open_Flower_P Parameter: Age (day) Value: 21
  misc_feature: MA Experiment 20000264 PARAMETER Experiment Name: At_Open_Flower_P Parameter: Plant Line Value: WS
  misc_feature: MA Experiment 20000264 PARAMETER Experiment Name: At_Open_Flower_P Parameter: Tissue Value: Open Flower vs. Whole Plant
  misc_feature: MA Experiment ID: 20000265 Result: Up-regulated in Transcription
  misc_feature: MA Experiment 20000265 PARAMETER Experiment Name: At_Open_Flower_P Parameter: Age (day) Value: 21
  misc_feature: MA Experiment 20000265 PARAMETER Experiment Name: At_Open_Flower_P Parameter: Plant Line Value: WS
  misc_feature: MA Experiment 20000265 PARAMETER Experiment Name: At_Open_Flower_P Parameter: Tissue Value: Closed Flower vs. Whole Plant
  misc_feature: MA Experiment ID: 20000286 Result: Up-regulated in Transcription
  misc_feature: MA Experiment 20000286 PARAMETER Experiment Name: At_Open_Flower_P Parameter: Age (day) Value: 21
  misc_feature: MA Experiment 20000286 PARAMETER Experiment Name: At_Open_Flower_P Parameter: Plant Line Value: WS
  misc_feature: MA Experiment 20000286 PARAMETER Experiment Name: At_Open_Flower_P Parameter: Tissue Value: Half Open vs. Whole Plant
  misc_feature: MA Experiment ID: 20001558 Result: Up-regulated in Transcription
  misc_feature: MA Experiment 20001558 PARAMETER Experiment Name: At_Drought_Soil_Dry_P Parameter: Age (day) Value: 27
  misc_feature: MA Experiment 20001558 PARAMETER Experiment Name: At_Drought_Soil_Dry_P Parameter: Organism Value: A. thaliana
  misc_feature: MA Experiment 20001558 PARAMETER Experiment Name: At_Drought_Soil_Dry_P Parameter: Plant Line Value: WS
  misc_feature: MA Experiment 20001558 PARAMETER Experiment Name: At_Drought_Soil_Dry_P Parameter: Post Timepoint (hr) Value: 6
  misc_feature: MA Experiment 20001558 PARAMETER Experiment Name: At_Drought_Soil_Dry_P Parameter: Post-Treatment Value: Re-Water vs. No Drought
  misc_feature: MA Experiment 20001558 PARAMETER Experiment Name: At_Drought_Soil_Dry_P Parameter: Timepoint (day) Value: 13
  misc_feature: MA Experiment 20001558 PARAMETER Experiment Name: At_Drought_Soil_Dry_P Parameter: Treatment Value: Drought vs. No Drought
  misc_feature: MA Experiment ID: 20001905 Result: Down-regulated in Transcription
  misc_feature: MA Experiment 20001905 PARAMETER Experiment Name: At_Drought_Reproduction_P Parameter: Age (day) Value: 40
  misc_feature: MA Experiment 20001905 PARAMETER Experiment Name: At_Drought_Reproduction_P Parameter: Organism Value: A. thaliana
  misc_feature: MA Experiment 20001905 PARAMETER Experiment Name: At_Drought_Reproduction_P Parameter: Plant Line Value: WS
  misc_feature: MA Experiment 20001905 PARAMETER Experiment Name: At_Drought_Reproduction_P Parameter: Timepoint (day) Value: 10
  misc_feature: MA Experiment 20001905 PARAMETER Experiment Name: At_Drought_Reproduction_P Parameter: Tissue Value: Rosettes
  misc_feature: MA Experiment 20001905 PARAMETER Experiment Name: At_Drought_Reproduction_P Parameter: Treatment Value: Drought vs. No Drought
  misc_feature: MA Experiment ID: 20001906 Result: Down-regulated in Transcription
  misc_feature: MA Experiment 20001906 PARAMETER Experiment Name: At_Drought_Reproduction_P Parameter: Age (day) Value: 35
  misc_feature: MA Experiment 20001906 PARAMETER Experiment Name: At_Drought_Reproduction_P Parameter: Organism Value: A. thaliana
  misc_feature: MA Experiment 20001906 PARAMETER Experiment Name: At_Drought_Reproduction_P Parameter: Plant Line Value: WS
  misc_feature: MA Experiment 20001906 PARAMETER Experiment Name: At_Drought_Reproduction_P Parameter: Timepoint (day) Value: 5
  misc_feature: MA Experiment 20001906 PARAMETER Experiment Name: At_Drought_Reproduction_P Parameter: Tissue Value: Siliques
  misc_feature: MA Experiment 20001906 PARAMETER Experiment Name: At_Drought_Reproduction_P Parameter: Treatment Value: Drought vs. No Drought
actcttaatctttaaaaaaaagaaaaaaaaaaacagaacaatttcttcttcctctgggatccataagttttgaggtatgttgttgctgattttgtccttttatctctgcaaataacagagaagataaatgaggattttctcctaggttgaagttttatattttggtggtcagtgtctgatggagtgtaatgcaaagccaccgtttcaatgggaattggaaaacttgatatcttttggcacttctacagctgaagttcctagaaagctaaagccaatggagtgggaaattgatggatttgattgcacctctctgtattcttcaagctttgatgcagtagcttatggtggtagttcaggttctgatatagctcatgctttctctaaaagctcaaagtcaacttccattagctcttcatcaactgaagttagaacacacaattttacatcagaaactggtgaaagtcttcctggagaatttgcaaaggggattgatacttctccaactcttgaactttcttttggctctggtgatccggttctcggtttaaagcttggtaaacgaacgtactttgaagacttttgggaagtggagaatgctaaaggtttgggacttcccgtgagccttgcttcgtcttctgtttctccggtgaagaaatcgaaatccattcctcagaggttacaaactcctcactgtcaagttgaaggctgtaatcttgatctttcatcagctaaagactatcatcggaaacataggatttgtgaaaaccattcaaagtttcctaaagtcgttgtgagtggcgtagagcgtcggttctgccaacaatgtagcaggttccactgtctctccgagtttgatgagaagaaacgtagctgtcgccgacgtctctcagatcacaatgcaagacgtcgcaagccaaatcctggaaggacatatgatgggaaaccacaggtggattttgtatggaacagatttgcacttatccatccaagaagtgaggaaaagtttctatggcccagttcaaagcctgtaccatcaagagtcttaatgccgcagcctgcaaagaccgagatttccaataagctgttcaccgagcacagtagatttggattgttggaccccaaaacaaaatccgcaagagcggagttattcagtaaagaaaaggtcacaatctcttcacacatgggtgcttctcaagatcttgatggtgctctctctcttctgtcaaattcaacaacatgggtttcttcctctgaccaaccaagacgttttacccttgatcaccatccctcaagcaacctccaacccatagctaaccggtctgcggctcaactcagttcagtgtccggctattggcagccggacccacccgcagttgaaggcccgaccgctctgcatagaaatggggcaggccagtttaatgaaaactacttcagcttgaaccagttttataactgaaagctgtatgcctttaaatcctatttaggatcaagcaagctagtgataagttaagataggagctgtgaaacttgcaagacaccaaatcctctcttatttctttgtccaaatattttcatgggttagagagctttgacaattgtctttaatatcaactttatcgtgttatacattaggattataaatcttgatggtgtactacgaaattgatatatagcatgctaagtattatatgattagaattagaagtatttttcgtttggg

SEQ ID NO: 38935 - protein, 425 aa, Arabidopsis thaliana
  peptide (1)..(425): Ceres Seq. ID no. 12371257
  misc_feature (171)..(249): Pfam Name: SBP domain Pfam Description: SBP domain
  misc_feature (97)..(350): Homolog of NCBI NO: 15028115 NR Description: putative squamosa-promoter binding protein
  misc_feature (98)..(256): Homolog of NCBI NO: 5931778 NR Description: SBP-domain protein 1 [Zea mays]
  misc_feature (116)..(356): Homolog of NCBI NO: 25352584 NR Description: squamosa promoter binding protein-homolog 4
  misc_feature (10)..(352): Homolog of NCBI NO: 25403307 NR Description: protein F17L21.14 [imported] - Arabidopsis
  misc_feature (1)..(352): Homolog of NCBI NO: 18396302 NR Description: putative squamosa-promoter binding protein 2
  misc_feature (9)..(352): Homolog of NCBI NO: 9802546 NR Description: F17L21.15 [Arabidopsis thaliana]
  misc_feature (1)..(352): Homolog of NCBI NO: 18650611 NR Description: At1g27370/F17L21_16 [Arabidopsis thaliana]
  misc_feature (1)..(352): Homolog of NCBI NO: 22329813 NR Description: putative squamosa-promoter binding protein 2
  misc_feature (1)..(425): Homolog of NCBI NO: 15239820 NR Description: squamosa promoter binding protein-like 2
  misc_feature (1)..(425): Homolog of NCBI NO: 25456646 NR Description: squamosa promoter binding protein 2
MECNAKPPFQWELENLISFGTSTAEVPRKLKPMEWEIDGFDCTSLYSSSFDAVAYGGSSGSDIAHAFSKSSKSTSISSSSTEVRTHNFTSETGESLPGEFAKGIDTSPTLELSFGSGDPVLGLKLGKRTYFEDFWEVENAKGLGLPVSLASSSVSPVKKSKSIPQRLQTPHCQVEGCNLDLSSAKDYHRKHRICENHSKFPKVVVSGVERRFCQQCSRFHCLSEFDEKKRSCRRRLSDHNARRRKPNPGRTYDGKPQVDFVWNRFALIHPRSEEKFLWPSSKPVPSRVLMPQPAKTEISNKLFTEHSRFGLLDPKTKSARAELFSKEKVTISSHMGASQDLDGALSLLSNSTTWVSSSDQPRRFTLDHHPSSNLQPIANRSAAQLSSVSGYWQPDPPAVEGPTALHRNGAGQFNENYFSLNQFYN

SEQ ID NO: 38936 - protein, 393 aa, Arabidopsis thaliana
  peptide (1)..(393): Ceres Seq. ID no. 12371258
  misc_feature (139)..(217): Pfam Name: SBP domain Pfam Description: SBP domain
  misc_feature (65)..(318): Homolog of NCBI NO: 15028115 NR Description: putative squamosa-promoter binding protein
  misc_feature (66)..(224): Homolog of NCBI NO: 5931778 NR Description: SBP-domain protein 1 [Zea mays]
  misc_feature (84)..(324): Homolog of NCBI NO: 25352584 NR Description: squamosa promoter binding protein-homolog 4
  misc_feature (1)..(320): Homolog of NCBI NO: 25403307 NR Description: protein F17L21.14 [imported] - Arabidopsis
  misc_feature (1)..(320): Homolog of NCBI NO: 18396302 NR Description: putative squamosa-promoter binding protein 2
  misc_feature (1)..(320): Homolog of NCBI NO: 9802546 NR Description: F17L21.15 [Arabidopsis thaliana]
  misc_feature (1)..(320): Homolog of NCBI NO: 18650611 NR Description: At1g27370/F17L21_16 [Arabidopsis thaliana]
  misc_feature (1)..(320): Homolog of NCBI NO: 22329813 NR Description: putative squamosa-promoter binding protein 2
  misc_feature (1)..(393): Homolog of NCBI NO: 15239820 NR Description: squamosa promoter binding protein-like 2
  misc_feature (1)..(393): Homolog of NCBI NO: 25456646 NR Description: squamosa promoter binding protein 2
MEWEIDGFDCTSLYSSSFDAVAYGGSSGSDIAHAFSKSSKSTSISSSSTEVRTHNFTSETGESLPGEFAKGIDTSPTLELSFGSGDPVLGLKLGKRTYFEDFWEVENAKGLGLPVSLASSSVSPVKKSKSIPQRLQTPHCQVEGCNLDLSSAKDYHRKHRICENHSKFPKVVVSGVERRFCQQCSRFHCLSEFDEKKRSCRRRLSDHNARRRKPNPGRTYDGKPQVDFVWNRFALIHPRSEEKFLWPSSKPVPSRVLMPQPAKTEISNKLFTEHSRFGLLDPKTKSARAELFSKEKVTISSHMGASQDLDGALSLLSNSTTWVSSSDQPRRFTLDHHPSSNLQPIANRSAAQLSSVSGYWQPDPPAVEGPTALHRNGAGQFNENYFSLNQFYN

SEQ ID NO: 38937 - DNA, 1244 bp, Arabidopsis thaliana
  misc_feature (1)..(1244): Ceres Seq. ID no. 13491334
  misc_feature: MA Experiment ID: 108462 Result: Up-regulated in Transcription
  misc_feature: MA Experiment 108462 PARAMETER Experiment Name: At_Germinating_Seeds_cDNA_P Parameter: Age (day) Value: 2 vs. 0
  misc_feature: MA Experiment 108462 PARAMETER Experiment Name: At_Germinating_Seeds_cDNA_P Parameter: Tissue Value: Germinating Seeds
  misc_feature: MA Experiment ID: 108464 Result: Up-regulated in Transcription
  misc_feature: MA Experiment 108464 PARAMETER Experiment Name: At_Germinating_Seeds_cDNA_P Parameter: Age (day) Value: 4 vs. 0
  misc_feature: MA Experiment 108464 PARAMETER Experiment Name: At_Germinating_Seeds_cDNA_P Parameter: Tissue Value: Germinating Seeds
  misc_feature: MA Experiment ID: 108501 Result: Up-regulated in Transcription
  misc_feature: MA Experiment 108501 PARAMETER Experiment Name: At_ap2_floral_buds_cDNA_P Parameter: Plant Line Value: ap2 (Ler.)
  misc_feature: MA Experiment 108501 PARAMETER Experiment Name: At_ap2_floral_buds_cDNA_P Parameter: Tissue Value: Closed Flower
  misc_feature: MA Experiment ID: 108561 Result: Down-regulated in Transcription
  misc_feature: MA Experiment 108561 PARAMETER Experiment Name: At_100uM_ABA_cDNA_P Parameter: Timepoint (hr) Value: 6
  misc_feature: MA Experiment 108561 PARAMETER Experiment Name: At_100uM_ABA_cDNA_P Parameter: Tissue Value: Aerial
  misc_feature: MA Experiment 108561 PARAMETER Experiment Name: At_100uM_ABA_cDNA_P Parameter: Treatment Value: 100uM ABA vs. No Treatment
  misc_feature: MA Experiment ID: 108595 Result: Up-regulated in Transcription
  misc_feature: MA Experiment 108595 PARAMETER Experiment Name: At_Ler-pi_Ovule_cDNA_P Parameter: Plant Line Value: null
  misc_feature: MA Experiment ID: 108668 Result: Down-regulated in Transcription
  misc_feature: MA Experiment 108668 PARAMETER Experiment Name: At_2mM_SA_cDNA_P Parameter: Plant Line Value: WS
  misc_feature: MA Experiment 108668 PARAMETER Experiment Name: At_2mM_SA_cDNA_P Parameter: Timepoint (hr) Value: 6
  misc_feature: MA Experiment 108668 PARAMETER Experiment Name: At_2mM_SA_cDNA_P Parameter: Treatment Value: 2mM SA vs. No Treatment
  misc_feature: MA Experiment ID: 20000072 Result: Down-regulated in Transcription
  misc_feature: MA Experiment 20000072 PARAMETER Experiment Name: At_100uM_ABA_Mutants_cDNA_P Parameter: Plant Line Value: CS8105
  misc_feature: MA Experiment 20000072 PARAMETER Experiment Name: At_100uM_ABA_Mutants_cDNA_P Parameter: Timepoint (hr) Value: 6
  misc_feature: MA Experiment 20000072 PARAMETER Experiment Name: At_100uM_ABA_Mutants_cDNA_P Parameter: Tissue Value: Aerial
  misc_feature: MA Experiment 20000072 PARAMETER Experiment Name: At_100uM_ABA_Mutants_cDNA_P Parameter: Treatment Value: 100uM ABA vs. No Treatment
  misc_feature: MA Experiment ID: 20000086 Result: Down-regulated in Transcription
  misc_feature: MA Experiment 20000086 PARAMETER Experiment Name: At_100uM_ABA_Mutants_cDNA_P Parameter: Plant Line Value: CS22
  misc_feature: MA Experiment 20000086 PARAMETER Experiment Name: At_100uM_ABA_Mutants_cDNA_P Parameter: Timepoint (hr) Value: 6
  misc_feature: MA Experiment 20000086 PARAMETER Experiment Name: At_100uM_ABA_Mutants_cDNA_P Parameter: Tissue Value: Aerial
  misc_feature: MA Experiment 20000086 PARAMETER Experiment Name: At_100uM_ABA_Mutants_cDNA_P Parameter: Treatment Value: 100uM ABA vs. No Treatment
  misc_feature: MA Experiment ID: 20000087 Result: Down-regulated in Transcription
  misc_feature: MA Experiment 20000087 PARAMETER Experiment Name: At_100uM_ABA_Mutants_cDNA_P Parameter: Plant Line Value: WS
  misc_feature: MA Experiment 20000087 PARAMETER Experiment Name: At_100uM_ABA_Mutants_cDNA_P Parameter: Timepoint (hr) Value: 6
  misc_feature: MA Experiment 20000087 PARAMETER Experiment Name: At_100uM_ABA_Mutants_cDNA_P Parameter: Tissue Value: Aerial
  misc_feature: MA Experiment 20000087 PARAMETER Experiment Name: At_100uM_ABA_Mutants_cDNA_P Parameter: Treatment Value: 100uM ABA vs. No Treatment
  misc_feature: MA Experiment ID: 20000088 Result: Down-regulated in Transcription
  misc_feature: MA Experiment 20000088 PARAMETER Experiment Name: At_100uM_ABA_Mutants_cDNA_P Parameter: Plant Line Value: Landsberg
  misc_feature: MA Experiment 20000088 PARAMETER Experiment Name: At_100uM_ABA_Mutants_cDNA_P Parameter: Timepoint (hr) Value: 6
  misc_feature: MA Experiment 20000088 PARAMETER Experiment Name: At_100uM_ABA_Mutants_cDNA_P Parameter: Tissue Value: Aerial
  misc_feature: MA Experiment 20000088 PARAMETER Experiment Name: At_100uM_ABA_Mutants_cDNA_P Parameter: Treatment Value: 100uM ABA vs. No Treatment
  misc_feature: MA Experiment ID: 20000117 Result: Down-regulated in Transcription
  misc_feature: MA Experiment 20000117 PARAMETER Experiment Name: At_100uM_ABA_Mutants_cDNA_P Parameter: Plant Line Value: Columbia
  misc_feature: MA Experiment 20000117 PARAMETER Experiment Name: At_100uM_ABA_Mutants_cDNA_P Parameter: Timepoint (hr) Value: 6
  misc_feature: MA Experiment 20000117 PARAMETER Experiment Name: At_100uM_ABA_Mutants_cDNA_P Parameter: Tissue Value: Aerial
  misc_feature: MA Experiment 20000117 PARAMETER Experiment Name: At_100uM_ABA_Mutants_cDNA_P Parameter: Treatment Value: 100uM ABA vs. No Treatment
  misc_feature: MA Experiment ID: 20000182 Result: Down-regulated in Transcription
  misc_feature: MA Experiment 20000182 PARAMETER Experiment Name: At_2mM_SA_P Parameter: Age (day) Value: 14
  misc_feature: MA Experiment 20000182 PARAMETER Experiment Name: At_2mM_SA_P Parameter: Organism Value: A. thaliana
  misc_feature: MA Experiment 20000182 PARAMETER Experiment Name: At_2mM_SA_P Parameter: Plant Line Value: WS
  misc_feature: MA Experiment 20000182 PARAMETER Experiment Name: At_2mM_SA_P Parameter: Timepoint (hr) Value: 6
  misc_feature: MA Experiment 20000182 PARAMETER Experiment Name: At_2mM_SA_P Parameter: Tissue Value: Aerial
  misc_feature: MA Experiment 20000182 PARAMETER Experiment Name: At_2mM_SA_P Parameter: Treatment Value: 2mM SA vs. No Treatment
  misc_feature: MA Experiment ID: 20000227 Result: Down-regulated in Transcription
  misc_feature: MA Experiment 20000227 PARAMETER Experiment Name: At_Root-Tips-vs-Tops_P Parameter: Tissue Value: Root Tips vs. Root Tops
  misc_feature: MA Experiment ID: 20000265 Result: Down-regulated in Transcription
  misc_feature: MA Experiment 20000265 PARAMETER Experiment Name: At_Open_Flower_P Parameter: Age (day) Value: 21
  misc_feature: MA Experiment 20000265 PARAMETER Experiment Name: At_Open_Flower_P Parameter: Plant Line Value: WS
  misc_feature: MA Experiment 20000265 PARAMETER Experiment Name: At_Open_Flower_P Parameter: Tissue Value: Closed Flower vs. Whole Plant
  misc_feature: MA Experiment ID: 20000437 Result: Down-regulated in Transcription
  misc_feature: MA Experiment 20000437 PARAMETER Experiment Name: At_Drought_P Parameter: Age (day) Value: 8
  misc_feature: MA Experiment 20000437 PARAMETER Experiment Name: At_Drought_P Parameter: Organism Value: A. thaliana
  misc_feature: MA Experiment 20000437 PARAMETER Experiment Name: At_Drought_P Parameter: Plant Line Value: WS
  misc_feature: MA Experiment 20000437 PARAMETER Experiment Name: At_Drought_P Parameter: Timepoint (hr) Value: 24
  misc_feature: MA Experiment 20000437 PARAMETER Experiment Name: At_Drought_P Parameter: Tissue Value: Whole Plant
  misc_feature: MA Experiment 20000437 PARAMETER Experiment Name: At_Drought_P Parameter: Treatment Value: Drought vs. No Drought
  misc_feature: MA Experiment ID: 20000439 Result: Up-regulated in Transcription
  misc_feature: MA Experiment 20000439 PARAMETER Experiment Name: At_Roots__P Parameter: Age (day) Value: 14 vs. 21
  misc_feature: MA Experiment 20000439 PARAMETER Experiment Name: At_Roots__P Parameter: Organism Value: A. thaliana
  misc_feature: MA Experiment 20000439 PARAMETER Experiment Name: At_Roots__P Parameter: Tissue Value: Roots vs. Whole Plant
  misc_feature: MA Experiment ID: 20000495 Result: Up-regulated in Transcription
  misc_feature: MA Experiment 20000495 PARAMETER Experiment Name: At_Guard_Cells_P Parameter: Harvest Date Value: 8/2/2002
  misc_feature: MA Experiment 20000495 PARAMETER Experiment Name: At_Guard_Cells_P Parameter: Organism Value: A. thaliana
  misc_feature: MA Experiment 20000495 PARAMETER Experiment Name: At_Guard_Cells_P Parameter: Tissue Value: Guard Cells vs. Leaves
  misc_feature: MA Experiment ID: 20000794 Result: Down-regulated in Transcription
  misc_feature: MA Experiment 20000794 PARAMETER Experiment Name: At_Petals_P Parameter: Age (day) Value: 23-25 days
  misc_feature: MA Experiment 20000794 PARAMETER Experiment Name: At_Petals_P Parameter: Plant Line Value: WS
  misc_feature: MA Experiment 20000794 PARAMETER Experiment Name: At_Petals_P Parameter: Tissue Value: Petals vs. Whole plant
  misc_feature: MA Experiment ID: 20001451 Result: Down-regulated in Transcription
  misc_feature: MA Experiment 20001451 PARAMETER Experiment Name: At_Far-red-induction_P Parameter: Age (day) Value: 7
  misc_feature: MA Experiment 20001451 PARAMETER Experiment Name: At_Far-red-induction_P Parameter: Light Value: Far-red vs. White
  misc_feature: MA Experiment 20001451 PARAMETER Experiment Name: At_Far-red-induction_P Parameter: Organism Value: A. thaliana
  misc_feature: MA Experiment 20001451 PARAMETER Experiment Name: At_Far-red-induction_P Parameter: Plant Line Value: Columbia
  misc_feature: MA Experiment 20001451 PARAMETER Experiment Name: At_Far-red-induction_P Parameter: Timepoint (hr) Value: 24
  misc_feature: MA Experiment 20001451 PARAMETER Experiment Name: At_Far-red-induction_P Parameter: Tissue Value: Whole Plant
  misc_feature: MA Experiment ID: 20001556 Result: Down-regulated in Transcription
  misc_feature: MA Experiment 20001556 PARAMETER Experiment Name: At_Drought_Soil_Dry_P Parameter: Age (day) Value: 26
  misc_feature: MA Experiment 20001556 PARAMETER Experiment Name: At_Drought_Soil_Dry_P Parameter: Organism Value: A. thaliana
  misc_feature: MA Experiment 20001556 PARAMETER Experiment Name: At_Drought_Soil_Dry_P Parameter: Plant Line Value: WS
  misc_feature: MA Experiment 20001556 PARAMETER Experiment Name: At_Drought_Soil_Dry_P Parameter: Post Timepoint (hr) Value: None
  misc_feature: MA Experiment 20001556 PARAMETER Experiment Name: At_Drought_Soil_Dry_P Parameter: Post-Treatment Value: None
  misc_feature: MA Experiment 20001556 PARAMETER Experiment Name: At_Drought_Soil_Dry_P Parameter: Timepoint (day) Value: 12
  misc_feature: MA Experiment 20001556 PARAMETER Experiment Name: At_Drought_Soil_Dry_P Parameter: Treatment Value: Drought vs. No Drought
  misc_feature: MA Experiment ID: 20001557 Result: Down-regulated in Transcription
  misc_feature: MA Experiment 20001557 PARAMETER Experiment Name: At_Drought_Soil_Dry_P Parameter: Age (day) Value: 27
  misc_feature: MA Experiment 20001557 PARAMETER Experiment Name: At_Drought_Soil_Dry_P Parameter: Organism Value: A. thaliana
  misc_feature: MA Experiment 20001557 PARAMETER Experiment Name: At_Drought_Soil_Dry_P Parameter: Plant Line Value: WS
  misc_feature: MA Experiment 20001557 PARAMETER Experiment Name: At_Drought_Soil_Dry_P Parameter: Post Timepoint (hr) Value: 3
  misc_feature: MA Experiment 20001557 PARAMETER Experiment Name: At_Drought_Soil_Dry_P Parameter: Post-Treatment Value: Re-Water vs. No Drought
  misc_feature: MA Experiment 20001557 PARAMETER Experiment Name: At_Drought_Soil_Dry_P Parameter: Timepoint (day) Value: 13
  misc_feature: MA Experiment 20001557 PARAMETER Experiment Name: At_Drought_Soil_Dry_P Parameter: Treatment Value: Drought vs. No Drought
  misc_feature: MA Experiment ID: 20001558 Result: Down-regulated in Transcription
  misc_feature: MA Experiment 20001558 PARAMETER Experiment Name: At_Drought_Soil_Dry_P Parameter: Age (day) Value: 27
  misc_feature: MA Experiment 20001558 PARAMETER Experiment Name: At_Drought_Soil_Dry_P Parameter: Organism Value: A. thaliana
  misc_feature: MA Experiment 20001558 PARAMETER Experiment Name: At_Drought_Soil_Dry_P Parameter: Plant Line Value: WS
  misc_feature: MA Experiment 20001558 PARAMETER Experiment Name: At_Drought_Soil_Dry_P Parameter: Post Timepoint (hr) Value: 6
  misc_feature: MA Experiment 20001558 PARAMETER Experiment Name: At_Drought_Soil_Dry_P Parameter: Post-Treatment Value: Re-Water vs. No Drought
  misc_feature: MA Experiment 20001558 PARAMETER Experiment Name: At_Drought_Soil_Dry_P Parameter: Timepoint (day) Value: 13
  misc_feature: MA Experiment 20001558 PARAMETER Experiment Name: At_Drought_Soil_Dry_P Parameter: Treatment Value: Drought vs. No Drought
  misc_feature: MA Experiment ID: 20001906 Result: Down-regulated in Transcription
  misc_feature: MA Experiment 20001906 PARAMETER Experiment Name: At_Drought_Reproduction_P Parameter: Age (day) Value: 35
  misc_feature: MA Experiment 20001906 PARAMETER Experiment Name: At_Drought_Reproduction_P Parameter: Organism Value: A. thaliana
  misc_feature: MA Experiment 20001906 PARAMETER Experiment Name: At_Drought_Reproduction_P Parameter: Plant Line Value: WS
  misc_feature: MA Experiment 20001906 PARAMETER Experiment Name: At_Drought_Reproduction_P Parameter: Timepoint (day) Value: 5
  misc_feature: MA Experiment 20001906 PARAMETER Experiment Name: At_Drought_Reproduction_P Parameter: Tissue Value: Siliques
  misc_feature: MA Experiment 20001906 PARAMETER Experiment Name: At_Drought_Reproduction_P Parameter: Treatment Value: Drought vs. No Drought
  misc_feature: MA Experiment ID: 20001907 Result: Down-regulated in Transcription
  misc_feature: MA Experiment 20001907 PARAMETER Experiment Name: At_Drought_Reproduction_P Parameter: Age (day) Value: 37
  misc_feature: MA Experiment 20001907 PARAMETER Experiment Name: At_Drought_Reproduction_P Parameter: Organism Value: A. thaliana
  misc_feature: MA Experiment 20001907 PARAMETER Experiment Name: At_Drought_Reproduction_P Parameter: Plant Line Value: WS
  misc_feature: MA Experiment 20001907 PARAMETER Experiment Name: At_Drought_Reproduction_P Parameter: Timepoint (day) Value: 7
  misc_feature: MA Experiment 20001907 PARAMETER Experiment Name: At_Drought_Reproduction_P Parameter: Tissue Value: Siliques
  misc_feature: MA Experiment 20001907 PARAMETER Experiment Name: At_Drought_Reproduction_P Parameter: Treatment Value: Drought vs. No Drought
gctcagtttcctggtcaaatggctacctcagagactcgagtcttgttcttatctttgtgtctcatccttggcaaagtagttttgtctcagtttgatgagttatggctagtaggggacgatgatccactcaacgccttgcagacgaggcgtgaaagaagagaggagaggtgtgattactcggtggggaaatggacgttcgatgaaacgtatccgctctatgattcaagctgtccatatctgagttctgcactaagttgccaaagaaatggaagacccgactcttattaccagaaatggagatggatccctaaggcttgttcactaccaaggtttgacgcattgaaatttcttgggaaaatgagaggaaaaagaataatgctggttggagattcaatgatgagaaaccagtgggaatctcttgtctgcttagtacagtctgttcttcccactcatcgtaagaagctcacttacaatggtcctacgatgtctttccattctctggattttgagacatcaattgagttttgttgggctcctctgcttgtggaactcaagagaggagttgaccgtaaaagggtgttacatttggactcaatcgaagacaatgctagatattggcgtggtgtagatgttcttgtattcgattccgctcactggtggactcactctcagagatggagttcgtgggattattacatggatgggaataagatcttcaaagctatggacccaatggttgcttatgagagaggactaaccacatgggctaaatgggttgagataaatcttgatccatccaaaacaaaagtcattttccgcactgtctcaccgagagagagtggtcagatgtgctacaaccagaaacatcccttgccttctttatcttcttccaccaaaccccacgtgcctcaacagtcaagagtgttgaacaaagtgctaaggacaatgaaataccgagtgtatttatacgatatcacaacaatgtctgcgtatagaagagacggtcatccttcggtgttcaagagagcaatgcacgaggaagagaagcaccatcgtatcgctggaccttcatcagattgcagtcattggtgcttgcccggtgtcccggatatttggaatgagatgctttcttcaattatcttaaccaatgctgtatgagctataataagagtctgtttttactcatgaacaatggtgttacttatatgaatcagtggtttatatattacatatcctttcccagc

SEQ ID NO: 38938 - protein, 385 aa, Arabidopsis thaliana
  peptide (1)..(385): Ceres Seq. ID no. 13491335
  misc_feature (56)..(378): Homolog of NCBI NO: 28393769 NR Description: unknown protein [Arabidopsis thaliana]
  misc_feature (56)..(378): Homolog of NCBI NO: 21593142 NR Description: unknown [Arabidopsis thaliana]
  misc_feature (57)..(381): Homolog of NCBI NO: 21553643 NR Description: unknown [Arabidopsis thaliana]
  misc_feature (57)..(381): Homolog of NCBI NO: 15237711 NR Description: expressed protein [Arabidopsis thaliana]
  misc_feature (57)..(378): Homolog of NCBI NO: 30350855 NR Description: hypothetical protein At2g30900 [Arabidopsis
  misc_feature (47)..(383): Homolog of NCBI NO: 18406003 NR Description: expressed protein [Arabidopsis thaliana]
  misc_feature (57)..(378): Homolog of NCBI NO: 15224585 NR Description: expressed protein [Arabidopsis thaliana]
  misc_feature (7)..(110): Homolog of NCBI NO: 11291878 NR Description: hypothetical protein F24B22.220 - Arabidopsis
  misc_feature (111)..(385): Homolog of NCBI NO: 11291878 NR Description: hypothetical protein F24B22.220 - Arabidopsis
  misc_feature (7)..(385): Homolog of NCBI NO: 18410028 NR Description: expressed protein [Arabidopsis thaliana]
AQFPGQMATSETRVLFLSLCLILGKVVLSQFDELWLVGDDDPLNALQTRRERREERCDYSVGKWTFDETYPLYDSSCPYLSSALSCQRNGRPDSYYQKWRWIPKACSLPRFDALKFLGKMRGKRIMLVGDSMMRNQWESLVCLVQSVLPTHRKKLTYNGPTMSFHSLDFETSIEFCWAPLLVELKRGVDRKRVLHLDSIEDNARYWRGVDVLVFDSAHWWTHSQRWSSWDYYMDGNKIFKAMDPMVAYERGLTTWAKWVEINLDPSKTKVIFRTVSPRESGQMCYNQKHPLPSLSSSTKPHVPQQSRVLNKVLRTMKYRVYLYDITTMSAYRRDGHPSVFKRAMHEEEKHHRIAGPSSDCSHWCLPGVPDIWNEMLSSIILTNAV

SEQ ID NO: 38939 - protein, 379 aa, Arabidopsis thaliana
  peptide (1)..(379): Ceres Seq. ID no. 13491336
  misc_feature (50)..(372): Homolog of NCBI NO: 28393769 NR Description: unknown protein [Arabidopsis thaliana]
  misc_feature (50)..(372): Homolog of NCBI NO: 21593142 NR Description: unknown [Arabidopsis thaliana]
  misc_feature (51)..(375): Homolog of NCBI NO: 21553643 NR Description: unknown [Arabidopsis thaliana]
  misc_feature (51)..(375): Homolog of NCBI NO: 15237711 NR Description: expressed protein [Arabidopsis thaliana]
  misc_feature (51)..(372): Homolog of NCBI NO: 30350855 NR Description: hypothetical protein At2g30900 [Arabidopsis
  misc_feature (41)..(377): Homolog of NCBI NO: 18406003 NR Description: expressed protein [Arabidopsis thaliana]
  misc_feature (51)..(372): Homolog of NCBI NO: 15224585 NR Description: expressed protein [Arabidopsis thaliana]
  misc_feature (1)..(104): Homolog of NCBI NO: 11291878 NR Description: hypothetical protein F24B22.220 - Arabidopsis
  misc_feature (105)..(379): Homolog of NCBI NO: 11291878 NR Description: hypothetical protein F24B22.220 - Arabidopsis
  misc_feature (1)..(379): Homolog of NCBI NO: 18410028 NR Description: expressed protein [Arabidopsis thaliana]
MATSETRVLFLSLCLILGKVVLSQFDELWLVGDDDPLNALQTRRERREERCDYSVGKWTFDETYPLYDSSCPYLSSALSCQRNGRPDSYYQKWRWIPKACSLPRFDALKFLGKMRGKRIMLVGDSMMRNQWESLVCLVQSVLPTHRKKLTYNGPTMSFHSLDFETSIEFCWAPLLVELKRGVDRKRVLHLDSIEDNARYWRGVDVLVFDSAHWWTHSQRWSSWDYYMDGNKIFKAMDPMVAYERGLTTWAKWVEINLDPSKTKVIFRTVSPRESGQMCYNQKHPLPSLSSSTKPHVPQQSRVLNKVLRTMKYRVYLYDITTMSAYRRDGHPSVFKRAMHEEEKHHRIAGPSSDCSHWCLPGVPDIWNEMLSSIILTNAV

SEQ ID NO: 38940 - protein, 266 aa, Arabidopsis thaliana
  peptide (1)..(266): Ceres Seq. ID no. 13491337
  misc_feature (1)..(257): Homolog of NCBI NO: 15228743 NR Description: expressed protein [Arabidopsis thaliana]
  misc_feature (1)..(259): Homolog of NCBI NO: 28393769 NR Description: unknown protein [Arabidopsis thaliana]
  misc_feature (1)..(259): Homolog of NCBI NO: 21593142 NR Description: unknown [Arabidopsis thaliana]
  misc_feature (1)..(262): Homolog of NCBI NO: 21553643 NR Description: unknown [Arabidopsis thaliana]
  misc_feature (1)..(262): Homolog of NCBI NO: 15237711 NR Description: expressed protein [Arabidopsis thaliana]
  misc_feature (1)..(259): Homolog of NCBI NO: 30350855 NR Description: hypothetical protein At2g30900 [Arabidopsis
  misc_feature (1)..(264): Homolog of NCBI NO: 18406003 NR Description: expressed protein [Arabidopsis thaliana]
  misc_feature (1)..(259): Homolog of NCBI NO: 15224585 NR Description: expressed protein [Arabidopsis thaliana]
  misc_feature (1)..(266): Homolog of NCBI NO: 11291878 NR Description: hypothetical protein F24B22.220 - Arabidopsis
  misc_feature (1)..(266): Homolog of NCBI NO: 18410028 NR Description: expressed protein [Arabidopsis thaliana]
MRGKRIMLVGDSMMRNQWESLVCLVQSVLPTHRKKLTYNGPTMSFHSLDFETSIEFCWAPLLVELKRGVDRKRVLHLDSIEDNARYWRGVDVLVFDSAHWWTHSQRWSSWDYYMDGNKIFKAMDPMVAYERGLTTWAKWVEINLDPSKTKVIFRTVSPRESGQMCYNQKHPLPSLSSSTKPHVPQQSRVLNKVLRTMKYRVYLYDITTMSAYRRDGHPSVFKRAMHEEEKHHRIAGPSSDCSHWCLPGVPDIWNEMLSSIILTNAV

SEQ ID NO: 38941 - DNA, 1657 bp, Arabidopsis thaliana
  misc_feature (1)..(1657): Ceres Seq. ID no. 13492212
  misc_feature: MA Experiment ID: 108579 Result: Down-regulated in Transcription
  misc_feature: MA Experiment 108579 PARAMETER Experiment Name: At_4deg_Cold_cDNA_P Parameter: Temperature (deg C) Value: 4 vs. 22
  misc_feature: MA Experiment 108579 PARAMETER Experiment Name: At_4deg_Cold_cDNA_P Parameter: Timepoint (hr) Value: 6
  misc_feature: MA Experiment 108579 PARAMETER Experiment Name: At_4deg_Cold_cDNA_P Parameter: Tissue Value: Aerial
  misc_feature: MA Experiment ID: 108595 Result: Down-regulated in Transcription
  misc_feature: MA Experiment 108595 PARAMETER Experiment Name: At_Ler-pi_Ovule_cDNA_P Parameter: Plant Line Value: null
  misc_feature: MA Experiment ID: 20000180 Result: Up-regulated in Transcription
  misc_feature: MA Experiment 20000180 PARAMETER Experiment Name: At_Germinating_Seeds_P Parameter: Age (hr) Value: 24 vs. 0
  misc_feature: MA Experiment 20000180 PARAMETER Experiment Name: At_Germinating_Seeds_P Parameter: Tissue Value: Germinating Seeds
  misc_feature: MA Experiment ID: 20000185 Result: Down-regulated in Transcription
  misc_feature: MA Experiment 20000185 PARAMETER Experiment Name: At_Roots__P Parameter: Age (day) Value: 7 vs. 21
  misc_feature: MA Experiment 20000185 PARAMETER Experiment Name: At_Roots__P Parameter: Organism Value: A. thaliana
  misc_feature: MA Experiment 20000185 PARAMETER Experiment Name: At_Roots__P Parameter: Tissue Value: Roots vs. Whole Plant
  misc_feature: MA Experiment ID: 20000286 Result: Down-regulated in Transcription
  misc_feature: MA Experiment 20000286 PARAMETER Experiment Name: At_Open_Flower_P Parameter: Age (day) Value: 21
  misc_feature: MA Experiment 20000286 PARAMETER Experiment Name: At_Open_Flower_P Parameter: Plant Line Value: WS
  misc_feature: MA Experiment 20000286 PARAMETER Experiment Name: At_Open_Flower_P Parameter: Tissue Value: Half Open vs. Whole Plant
  misc_feature: MA Experiment ID: 20000439 Result: Down-regulated in Transcription
  misc_feature: MA Experiment 20000439 PARAMETER Experiment Name: At_Roots__P Parameter: Age (day) Value: 14 vs. 21
  misc_feature: MA Experiment 20000439 PARAMETER Experiment Name: At_Roots__P Parameter: Organism Value: A. thaliana
  misc_feature: MA Experiment 20000439 PARAMETER Experiment Name: At_Roots__P Parameter: Tissue Value: Roots vs. Whole Plant
  misc_feature: MA Experiment ID: 20000573 Result: Up-regulated in Transcription
  misc_feature: MA Experiment 20000573 PARAMETER Experiment Name: At_100uM_ABA_Mutants__P Parameter: Organism Value: A. thaliana
  misc_feature: MA Experiment 20000573 PARAMETER Experiment Name: At_100uM_ABA_Mutants__P Parameter: Plant Line Value: CS22 vs. Ler wt
  misc_feature: MA Experiment 20000573 PARAMETER Experiment Name: At_100uM_ABA_Mutants__P Parameter: Timepoint (hr) Value: N/A
  misc_feature: MA Experiment 20000573 PARAMETER Experiment Name: At_100uM_ABA_Mutants__P Parameter: Tissue Value: Whole Plant
  misc_feature: MA Experiment 20000573 PARAMETER Experiment Name: At_100uM_ABA_Mutants__P Parameter: Treatment Value: None
  misc_feature: MA Experiment ID: 20001247 Result: Up-regulated in Transcription
  misc_feature: MA Experiment 20001247 PARAMETER Experiment Name: At_Far-red-induction_P Parameter: Age (day) Value: 7
  misc_feature: MA Experiment 20001247 PARAMETER Experiment Name: At_Far-red-induction_P Parameter: Light Value: Far-red vs. White
  misc_feature: MA Experiment 20001247 PARAMETER Experiment Name: At_Far-red-induction_P Parameter: Organism Value: A. thaliana
  misc_feature: MA Experiment 20001247 PARAMETER Experiment Name: At_Far-red-induction_P Parameter: Plant Line Value: Columbia
  misc_feature: MA Experiment 20001247 PARAMETER Experiment Name: At_Far-red-induction_P Parameter: Timepoint (hr) Value: 1
  misc_feature: MA Experiment 20001247 PARAMETER Experiment Name: At_Far-red-induction_P Parameter: Tissue Value: Whole Plant
  misc_feature: MA Experiment ID: 20001248 Result: Up-regulated in Transcription
  misc_feature: MA Experiment 20001248 PARAMETER Experiment Name: At_Far-red-induction_P Parameter: Age (day) Value: 7
  misc_feature: MA Experiment 20001248 PARAMETER Experiment Name: At_Far-red-induction_P Parameter: Light Value: Far-red vs. White
  misc_feature: MA Experiment 20001248 PARAMETER Experiment Name: At_Far-red-induction_P Parameter: Organism Value: A. thaliana
  misc_feature: MA Experiment 20001248 PARAMETER Experiment Name: At_Far-red-induction_P Parameter: Plant Line Value: Columbia
  misc_feature: MA Experiment 20001248 PARAMETER Experiment Name: At_Far-red-induction_P Parameter: Timepoint (hr) Value: 4
  misc_feature: MA Experiment 20001248 PARAMETER Experiment Name: At_Far-red-induction_P Parameter: Tissue Value: Whole Plant
  misc_feature: MA Experiment ID: 20001450 Result: Up-regulated in Transcription
  misc_feature: MA Experiment 20001450 PARAMETER Experiment Name: At_Far-red-induction_P Parameter: Age (day) Value: 7
  misc_feature: MA Experiment 20001450 PARAMETER Experiment Name: At_Far-red-induction_P Parameter: Light Value: Far-red vs. White
  misc_feature: MA Experiment 20001450 PARAMETER Experiment Name: At_Far-red-induction_P Parameter: Organism Value: A. thaliana
  misc_feature: MA Experiment 20001450 PARAMETER Experiment Name: At_Far-red-induction_P Parameter: Plant Line Value: Columbia
  misc_feature: MA Experiment 20001450 PARAMETER Experiment Name: At_Far-red-induction_P Parameter: Timepoint (hr) Value: 8
  misc_feature: MA Experiment 20001450 PARAMETER Experiment Name: At_Far-red-induction_P Parameter: Tissue Value: Whole Plant
  misc_feature: MA Experiment ID: 20001556 Result: Down-regulated in Transcription
  misc_feature: MA Experiment 20001556 PARAMETER Experiment Name: At_Drought_Soil_Dry_P Parameter: Age (day) Value: 26
  misc_feature: MA Experiment 20001556 PARAMETER Experiment Name: At_Drought_Soil_Dry_P Parameter: Organism Value: A. thaliana
  misc_feature: MA Experiment 20001556 PARAMETER Experiment Name: At_Drought_Soil_Dry_P Parameter: Plant Line Value: WS
  misc_feature: MA Experiment 20001556 PARAMETER Experiment Name: At_Drought_Soil_Dry_P Parameter: Post Timepoint (hr) Value: None
  misc_feature: MA Experiment 20001556 PARAMETER Experiment Name: At_Drought_Soil_Dry_P Parameter: Post-Treatment Value: None
  misc_feature: MA Experiment 20001556 PARAMETER Experiment Name: At_Drought_Soil_Dry_P Parameter: Timepoint (day) Value: 12
  misc_feature: MA Experiment 20001556 PARAMETER Experiment Name: At_Drought_Soil_Dry_P Parameter: Treatment Value: Drought vs. No Drought
  misc_feature: MA Experiment ID: 20001904 Result: Down-regulated in Transcription
  misc_feature: MA Experiment 20001904 PARAMETER Experiment Name: At_Drought_Reproduction_P Parameter: Age (day) Value: 37
  misc_feature: MA Experiment 20001904 PARAMETER Experiment Name: At_Drought_Reproduction_P Parameter: Organism Value: A. thaliana
  misc_feature: MA Experiment 20001904 PARAMETER Experiment Name: At_Drought_Reproduction_P Parameter: Plant Line Value: WS
  misc_feature: MA Experiment 20001904 PARAMETER Experiment Name: At_Drought_Reproduction_P Parameter: Timepoint (day) Value: 7
  misc_feature: MA Experiment 20001904 PARAMETER Experiment Name: At_Drought_Reproduction_P Parameter: Tissue Value: Rosettes
  misc_feature: MA Experiment 20001904 PARAMETER Experiment Name: At_Drought_Reproduction_P Parameter: Treatment Value: Drought vs. No Drought
  misc_feature: MA Experiment ID: 20001905 Result: Down-regulated in Transcription
  misc_feature: MA Experiment 20001905 PARAMETER Experiment Name: At_Drought_Reproduction_P Parameter: Age (day) Value: 40
  misc_feature: MA Experiment 20001905 PARAMETER Experiment Name: At_Drought_Reproduction_P Parameter: Organism Value: A. thaliana
  misc_feature: MA Experiment 20001905 PARAMETER Experiment Name: At_Drought_Reproduction_P Parameter: Plant Line Value: WS
  misc_feature: MA Experiment 20001905 PARAMETER Experiment Name: At_Drought_Reproduction_P Parameter: Timepoint (day) Value: 10
  misc_feature: MA Experiment 20001905 PARAMETER Experiment Name: At_Drought_Reproduction_P Parameter: Tissue Value: Rosettes
  misc_feature: MA Experiment 20001905 PARAMETER Experiment Name: At_Drought_Reproduction_P Parameter: Treatment Value: Drought vs. No Drought
  misc_feature: MA Experiment ID: 20001906 Result: Down-regulated in Transcription
  misc_feature: MA Experiment 20001906 PARAMETER Experiment Name: At_Drought_Reproduction_P Parameter: Age (day) Value: 35
  misc_feature: MA Experiment 20001906 PARAMETER Experiment Name: At_Drought_Reproduction_P Parameter: Organism Value: A. thaliana
  misc_feature: MA Experiment 20001906 PARAMETER Experiment Name: At_Drought_Reproduction_P Parameter: Plant Line Value: WS
  misc_feature: MA Experiment 20001906 PARAMETER Experiment Name: At_Drought_Reproduction_P Parameter: Timepoint (day) Value: 5
  misc_feature: MA Experiment 20001906 PARAMETER Experiment Name: At_Drought_Reproduction_P Parameter: Tissue Value: Siliques
  misc_feature: MA Experiment 20001906 PARAMETER Experiment Name: At_Drought_Reproduction_P Parameter: Treatment Value: Drought vs. No Drought
  misc_feature: MA Experiment ID: 20001911 Result: Down-regulated in Transcription
  misc_feature: MA Experiment 20001911 PARAMETER Experiment Name: At_Drought_Reproduction_P Parameter: Age (day) Value: 40
  misc_feature: MA Experiment 20001911 PARAMETER Experiment Name: At_Drought_Reproduction_P Parameter: Organism Value: A. thaliana
  misc_feature: MA Experiment 20001911 PARAMETER Experiment Name: At_Drought_Reproduction_P Parameter: Plant Line Value: WS
  misc_feature: MA Experiment 20001911 PARAMETER Experiment Name: At_Drought_Reproduction_P Parameter: Timepoint (day) Value: 10
  misc_feature: MA Experiment 20001911 PARAMETER Experiment Name: At_Drought_Reproduction_P Parameter: Tissue Value: Flowers
  misc_feature: MA Experiment 20001911 PARAMETER Experiment Name: At_Drought_Reproduction_P Parameter: Treatment Value: Drought vs. No Drought
gatcttctcaaaaacttcacctttttttgtttttccagtttctcagaggagatcttccttcaaagctcaaatccttttgtctgaattgtgatactgctgtccccatttttctgcaagttgggaaatttctgtcaaagttttgtgggtctgttaaaaagatctgagctttgaacatggggagctcaatggaggagaaagtggtggctgtgatcatggtcggtggtccaaccaaaggcactcgatttcggccattgtcgctgaatattccaaagcctctgtttcctattgcgggacaaccaatggtgcatcatccaatttcagcttgtaaaagaattccaaatttagctcaaatatatcttgttggcttctatgaggaaagggaatttgcactttatgtttcagccatctctaatgaacttaaagttcctgttagatatctgcgagaagacaaaccacatggttcagctggtgggctgtatcactttagaaatcttattatggaagatagtccgtctcatatcttcctgcttaactgtgatgtttgctgcagtttccccttgcccaaaatgctcgaggctcacaggggatatggtggaattggaactcttcttgtgatcaaggtctctcctgaatcagccagccaatttggagaattggttgcagatccagttactaatgagctgcttcattacaccgagaaacccgaaacttttgtcagtgatcgaattaactgtggtgtttatgtatttacacctgaaatttttaatgccataggagatgtttctactcagaggaaagatagagcaactctaaaacgtgtttccagcttcgaagctcttcaaccggcaacaaggatcccgacagattttgtaagactggatcaagacatcctttcacctctagctgggaagaaacggctatatacttatgagactatggatttctgggagcaaatcaaatctcctgggatgtcgttgaggtgttcaggactctatctttcccaattccgcttgacatctccccaactgttggctagtggtgatggaacaaggagtgccattgtgattggtgatgtttacatacatccttctgcaaaagttcacccaactgcaaagattggtcccaacgtctcaatctctgcaaatgctcgtgttggaccgggcgtcaggcttatgagctgcatcatccttgacgatgttgagatcatggaaaatgcagtggtgactaacgcaattgttgggtggaaatcttctatcgggagatggtcccgcgtccaggctgagggagtctacaattcgaaactcggagttacaattctcggagactcggttgcagttgaagacgaggttgtggtgaccagcagtattgttcttccaaacaagacactgaacgtcagtgttcaagacgagatcattttgtaactgaaaaacggaagttgaaaaatggaaccaacccagtggggagcagccacactatctccctctgattcaatatctactggagaaccacataagcaaatatttgggaactaattcacatgtatcatttatttacaccaagaattttccaacattgtatcaattccattttctatactcacaacacagctactgtaaaaggcactgaatttttgcccagaataataaagcacttgtgc

SEQ ID NO: 38942 - protein, 415 aa, Arabidopsis thaliana
  peptide (1)..(415): Ceres Seq. ID no. 13492213
  misc_feature (10)..(246): Pfam Name: Nucleotidyl transferase Pfam Description: Nucleotidyl transferase
  misc_feature (11)..(415): Homolog of NCBI NO: 19526884 NR Description: RIKEN cDNA 1810012N01 [Mus musculus]
  misc_feature (11)..(415): Homolog of NCBI NO: 28830182 NR Description: similar to Homo sapiens (Human). GDP-mannose
  misc_feature (11)..(415): Homolog of NCBI NO: 33416563 NR Description: Unknown (protein for MGC:66135) [Danio rerio]
  misc_feature (3)..(394): Homolog of NCBI NO: 26006499 NR Description: Putative GDP-mannose pyrophosphorylase
  misc_feature (6)..(394): Homolog of NCBI NO: 25411099 NR Description: probable GDP-mannose pyrophosphorylase
  misc_feature (6)..(415): Homolog of NCBI NO: 17064890 NR Description: putative GDP-mannose pyrophosphorylase
  misc_feature (6)..(415): Homolog of NCBI NO: 22325477 NR Description: ADP-glucose pyrophosphorylase family [Arabidopsis
  misc_feature (1)..(369): Homolog of NCBI NO: 30699056 NR Description: ADP-glucose pyrophosphorylase family [Arabidopsis
  misc_feature (5)..(415): Homolog of NCBI NO: 5882732 NR Description: Similar to gb|AF135422 GDP-mannose A (GMPPA) from Homo sapiens. ESTs gb|AA712990, gb|N65247, gb|T04179, gb|Z38092, gb|T76473, gb|N96403, gb|AA394551 and
  misc_feature (1)..(415): Homolog of NCBI NO: 15222037 NR Description: ADP-glucose pyrophosphorylase family [Arabidopsis
MGSSMEEKVVAVIMVGGPTKGTRFRPLSLNIPKPLFPIAGQPMVHHPISACKRIPNLAQIYLVGFYEEREFALYVSAISNELKVPVRYLREDKPHGSAGGLYHFRNLIMEDSPSHIFLLNCDVCCSFPLPKMLEAHRGYGGIGTLLVIKVSPESASQFGELVADPVTNELLHYTEKPETFVSDRINCGVYVFTPEIFNAIGDVSTQRKDRATLKRVSSFEALQPATRIPTDFVRLDQDILSPLAGKKRLYTYETMDFWEQIKSPGMSLRCSGLYLSQFRLTSPQLLASGDGTRSAIVIGDVYIHPSAKVHPTAKIGPNVSISANARVGPGVRLMSCIILDDVEIMENAVVTNAIVGWKSSIGRWSRVQAEGVYNSKLGVTILGDSVAVEDEVVVTSSIVLPNKTLNVSVQDEIIL

SEQ ID NO: 38943 - protein, 411 aa, Arabidopsis thaliana
  peptide (1)..(411): Ceres Seq. ID no. 13492214
  misc_feature (6)..(242): Pfam Name: Nucleotidyl transferase Pfam Description: Nucleotidyl transferase
  misc_feature (7)..(411): Homolog of NCBI NO: 19526884 NR Description: RIKEN cDNA 1810012N01 [Mus musculus]
  misc_feature (7)..(411): Homolog of NCBI NO: 28830182 NR Description: similar to Homo sapiens (Human). GDP-mannose
  misc_feature (7)..(411): Homolog of NCBI NO: 33416563 NR Description: Unknown (protein for MGC:66135) [Danio rerio]
  misc_feature (1)..(390): Homolog of NCBI NO: 26006499 NR Description: Putative GDP-mannose pyrophosphorylase
  misc_feature (2)..(390): Homolog of NCBI NO: 25411099 NR Description: probable GDP-mannose pyrophosphorylase
  misc_feature (2)..(411): Homolog of NCBI NO: 17064890 NR Description: putative GDP-mannose pyrophosphorylase
  misc_feature (2)..(411): Homolog of NCBI NO: 22325477 NR Description: ADP-glucose pyrophosphorylase family [Arabidopsis
  misc_feature (1)..(365): Homolog of NCBI NO: 30699056 NR Description: ADP-glucose pyrophosphorylase family [Arabidopsis
  misc_feature (1)..(411): Homolog of NCBI NO: 5882732 NR Description: Similar to gb|AF135422 GDP-mannose A (GMPPA) from Homo sapiens. ESTs gb|AA712990, gb|N65247, gb|T04179, gb|Z38092, gb|T76473, gb|N96403, gb|AA394551 and
  misc_feature (1)..(411): Homolog of NCBI NO: 15222037 NR Description: ADP-glucose pyrophosphorylase family [Arabidopsis
MEEKVVAVIMVGGPTKGTRFRPLSLNIPKPLFPIAGQPMVHHPISACKRIPNLAQIYLVGFYEEREFALYVSAISNELKVPVRYLREDKPHGSAGGLYHFRNLIMEDSPSHIFLLNCDVCCSFPLPKMLEAHRGYGGIGTLLVIKVSPESASQFGELVADPVTNELLHYTEKPETFVSDRINCGVYVFTPEIFNAIGDVSTQRKDRATLKRVSSFEALQPATRIPTDFVRLDQDILSPLAGKKRLYTYETMDFWEQIKSPGMSLRCSGLYLSQFRLTSPQLLASGDGTRSAIVIGDVYIHPSAKVHPTAKIGPNVSISANARVGPGVRLMSCIILDDVEIMENAVVTNAIVGWKSSIGRWSRVQAEGVYNSKLGVTILGDSVAVEDEVVVTSSIVLPNKTLNVSVQDEIIL

SEQ ID NO: 38944 - protein, 402 aa, Arabidopsis thaliana
  peptide (1)..(402): Ceres Seq. ID no. 13492215
  misc_feature (1)..(233): Pfam Name: Nucleotidyl transferase Pfam Description: Nucleotidyl transferase
  misc_feature (1)..(402): Homolog of NCBI NO: 19526884 NR Description: RIKEN cDNA 1810012N01 [Mus musculus]
  misc_feature (1)..(402): Homolog of NCBI NO: 28830182 NR Description: similar to Homo sapiens (Human). GDP-mannose
  misc_feature (1)..(402): Homolog of NCBI NO: 33416563 NR Description: Unknown (protein for MGC:66135) [Danio rerio]
  misc_feature (1)..(381): Homolog of NCBI NO: 26006499 NR Description: Putative GDP-mannose pyrophosphorylase
  misc_feature (1)..(381): Homolog of NCBI NO: 25411099 NR Description: probable GDP-mannose pyrophosphorylase
  misc_feature (1)..(402): Homolog of NCBI NO: 17064890 NR Description: putative GDP-mannose pyrophosphorylase
  misc_feature (1)..(402): Homolog of NCBI NO: 22325477 NR Description: ADP-glucose pyrophosphorylase family [Arabidopsis
  misc_feature (1)..(356): Homolog of NCBI NO: 30699056 NR Description: ADP-glucose pyrophosphorylase family [Arabidopsis
  misc_feature (1)..(402): Homolog of NCBI NO: 5882732 NR Description: Similar to gb|AF135422 GDP-mannose A (GMPPA) from Homo sapiens. ESTs gb|AA712990, gb|N65247, gb|T04179, gb|Z38092, gb|T76473, gb|N96403, gb|AA394551 and
  misc_feature (1)..(402): Homolog of NCBI NO: 15222037 NR Description: ADP-glucose pyrophosphorylase family [Arabidopsis
MVGGPTKGTRFRPLSLNIPKPLFPIAGQPMVHHPISACKRIPNLAQIYLVGFYEEREFALYVSAISNELKVPVRYLREDKPHGSAGGLYHFRNLIMEDSPSHIFLLNCDVCCSFPLPKMLEAHRGYGGIGTLLVIKVSPESASQFGELVADPVTNELLHYTEKPETFVSDRINCGVYVFTPEIFNAIGDVSTQRKDRATLKRVSSFEALQPATRIPTDFVRLDQDILSPLAGKKRLYTYETMDFWEQIKSPGMSLRCSGLYLSQFRLTSPQLLASGDGTRSAIVIGDVYIHPSAKVHPTAKIGPNVSISANARVGPGVRLMSCIILDDVEIMENAVVTNAIVGWKSSIGRWSRVQAEGVYNSKLGVTILGDSVAVEDEVVVTSSIVLPNKTLNVSVQDEIIL

SEQ ID NO: 38945 - DNA, 1679 bp, Arabidopsis thaliana
  misc_feature (1)..(1679): Ceres Seq. ID no. 13489356
  misc_feature: MA Experiment ID: 108434 Result: Down-regulated in Transcription
  misc_feature: MA Experiment 108434 PARAMETER Experiment Name: At_Root_Tips_cDNA_P Parameter: Tissue Value: Root Tips
  misc_feature: MA Experiment ID: 108461 Result: Up-regulated in Transcription
  misc_feature: MA Experiment 108461 PARAMETER Experiment Name: At_Germinating_Seeds_cDNA_P Parameter: Age (day) Value: 1 vs. 0
  misc_feature: MA Experiment 108461 PARAMETER Experiment Name: At_Germinating_Seeds_cDNA_P Parameter: Tissue Value: Germinating Seeds
  misc_feature: MA Experiment ID: 108462 Result: Up-regulated in Transcription
  misc_feature: MA Experiment 108462 PARAMETER Experiment Name: At_Germinating_Seeds_cDNA_P Parameter: Age (day) Value: 2 vs. 0
  misc_feature: MA Experiment 108462 PARAMETER Experiment Name: At_Germinating_Seeds_cDNA_P Parameter: Tissue Value: Germinating Seeds
  misc_feature: MA Experiment ID: 108463 Result: Up-regulated in Transcription
  misc_feature: MA Experiment 108463 PARAMETER Experiment Name: At_Germinating_Seeds_cDNA_P Parameter: Age (day) Value: 3 vs. 0
  misc_feature: MA Experiment 108463 PARAMETER Experiment Name: At_Germinating_Seeds_cDNA_P Parameter: Tissue Value: Germinating Seeds
  misc_feature: MA Experiment ID: 108464 Result: Up-regulated in Transcription
  misc_feature: MA Experiment 108464 PARAMETER Experiment Name: At_Germinating_Seeds_cDNA_P Parameter: Age (day) Value: 4 vs. 0
  misc_feature: MA Experiment 108464 PARAMETER Experiment Name: At_Germinating_Seeds_cDNA_P Parameter: Tissue Value: Germinating Seeds
  misc_feature: MA Experiment ID: 108576 Result: Up-regulated in Transcription
  misc_feature: MA Experiment 108576 PARAMETER Experiment Name: At_42deg_Heat_cDNA_P Parameter: Temperature (deg C) Value: 42 vs. 22
  misc_feature: MA Experiment 108576 PARAMETER Experiment Name: At_42deg_Heat_cDNA_P Parameter: Timepoint (hr) Value: 1
  misc_feature: MA Experiment 108576 PARAMETER Experiment Name: At_42deg_Heat_cDNA_P Parameter: Tissue Value: Aerial
  misc_feature: MA Experiment ID: 20000087 Result: Up-regulated in Transcription
  misc_feature: MA Experiment 20000087 PARAMETER Experiment Name: At_100uM_ABA_Mutants_cDNA_P Parameter: Plant Line Value: WS
  misc_feature: MA Experiment 20000087 PARAMETER Experiment Name: At_100uM_ABA_Mutants_cDNA_P Parameter: Timepoint (hr) Value: 6
  misc_feature: MA Experiment 20000087 PARAMETER Experiment Name: At_100uM_ABA_Mutants_cDNA_P Parameter: Tissue Value: Aerial
  misc_feature: MA Experiment 20000087 PARAMETER Experiment Name: At_100uM_ABA_Mutants_cDNA_P Parameter: Treatment Value: 100uM ABA vs. No Treatment
  misc_feature: MA Experiment ID: 20000211 Result: Up-regulated in Transcription
  misc_feature: MA Experiment 20000211 PARAMETER Experiment Name: At_0.001percent_MeJA__P Parameter: Age (day) Value: 14
  misc_feature: MA Experiment 20000211 PARAMETER Experiment Name: At_0.001percent_MeJA__P Parameter: Organism Value: A. thaliana
  misc_feature: MA Experiment 20000211 PARAMETER Experiment Name: At_0.001percent_MeJA__P Parameter: Plant Line Value: WS
  misc_feature: MA Experiment 20000211 PARAMETER Experiment Name: At_0.001percent_MeJA__P Parameter: Timepoint (hr) Value: 1
  misc_feature: MA Experiment 20000211 PARAMETER Experiment Name: At_0.001percent_MeJA__P Parameter: Tissue Value: Aerial
  misc_feature: MA Experiment 20000211 PARAMETER Experiment Name: At_0.001percent_MeJA__P Parameter: Treatment Value: 0.001percent MeJA vs. No Treatment
  misc_feature: MA Experiment ID: 20000224 Result: Up-regulated in Transcription
  misc_feature: MA Experiment ID: 20000234 Result: Down-regulated in Transcription
  misc_feature: MA Experiment 20000234 PARAMETER Experiment Name: At_Siliques_P Parameter: Age (day) Value: 21
  misc_feature: MA Experiment 20000234 PARAMETER Experiment Name: At_Siliques_P Parameter: Organism Value: A. thaliana
  misc_feature: MA Experiment 20000234 PARAMETER Experiment Name: At_Siliques_P Parameter: Plant Line Value: WS
  misc_feature: MA Experiment 20000234 PARAMETER Experiment Name: At_Siliques_P Parameter: Tissue Value: Less Than 5mm Siliques vs. Whole Plant
  misc_feature: MA Experiment ID: 20000235 Result: Down-regulated in Transcription
  misc_feature: MA Experiment 20000235 PARAMETER Experiment Name: At_Siliques_P Parameter: Age (day) Value: 21
  misc_feature: MA Experiment 20000235 PARAMETER Experiment Name: At_Siliques_P Parameter: Organism Value: A. thaliana
  misc_feature: MA Experiment 20000235 PARAMETER Experiment Name: At_Siliques_P Parameter: Plant Line Value: WS
  misc_feature: MA Experiment 20000235 PARAMETER Experiment Name: At_Siliques_P Parameter: Tissue Value: 5-10mm Siliques vs. Whole Plant
  misc_feature: MA Experiment ID: 20000265 Result: Down-regulated in Transcription
  misc_feature: MA Experiment 20000265 PARAMETER Experiment Name: At_Open_Flower_P Parameter: Age (day) Value: 21
  misc_feature: MA Experiment 20000265 PARAMETER Experiment Name: At_Open_Flower_P Parameter: Plant Line Value: WS
  misc_feature: MA Experiment 20000265 PARAMETER Experiment Name: At_Open_Flower_P Parameter: Tissue Value: Closed Flower vs. Whole Plant
  misc_feature: MA Experiment ID: 20000495 Result: Down-regulated in Transcription
  misc_feature: MA Experiment 20000495 PARAMETER Experiment Name: At_Guard_Cells_P Parameter: Harvest Date Value: 8/2/2002
  misc_feature: MA Experiment 20000495 PARAMETER Experiment Name: At_Guard_Cells_P Parameter: Organism Value: A. thaliana
  misc_feature: MA Experiment 20000495 PARAMETER Experiment Name: At_Guard_Cells_P Parameter: Tissue Value: Guard Cells vs. Leaves
  misc_feature: MA Experiment ID: 20000496 Result: Down-regulated in Transcription
  misc_feature: MA Experiment 20000496 PARAMETER Experiment Name: At_Guard_Cells_P Parameter: Harvest Date Value: 7/19/2002
  misc_feature: MA Experiment 20000496 PARAMETER Experiment Name: At_Guard_Cells_P Parameter: Organism Value: Canola
  misc_feature: MA Experiment 20000496 PARAMETER Experiment Name: At_Guard_Cells_P Parameter: Tissue Value: Guard Cells vs. Leaves
  misc_feature: MA Experiment ID: 20001761 Result: Down-regulated in Transcription
  misc_feature: MA Experiment 20001761 PARAMETER Experiment Name: At_50mM_NH4NO3_L-to-H_P Parameter: Timepoint (hr) Value: 4
  misc_feature: MA Experiment 20001761 PARAMETER Experiment Name: At_50mM_NH4NO3_L-to-H_P Parameter: Tissue Value: Siliques
  misc_feature: MA Experiment 20001761 PARAMETER Experiment Name: At_50mM_NH4NO3_L-to-H_P Parameter: Treatment Value: 50mM NH4NO3 vs 100mM Mannitol
acaaatcaaaacaacataattaacttacccaaacaagaaacccaagaatccaaaatggaaatgctcaacgcaataattctcatcctatttccaatcatagggtttgtattaatcttctcattcccaacaaaaaccctaaaagccaaaaccgcatcaccctctaatccgacatcgtaccaactcatcggctctattctctccttcaacaaaaaccgccaccgtcttctccaatggtacacagatctcctccgtctctctccgtctcaaaccatcaccgtcgatctcctcttcggtcgtcggactatcatcactgcaaaccctgaaaacgttgagcacattctcaaaacaaatttttataacttccctaaaggcaaacctttcaccgacctcctaggagatctactcggcggcggaatctttaattctgacggcgagttatggagctcacagcgtaaactcgcgagccacgagtttacaatgcgttctcttagggaattcactttcgaaatcctccgtgaagaagtccaaaaccgcctcattccggtgctttcctccgccgtggactgtggagagacggttgattttcaggaggttttgaagcgctttgctttcgatgttgtatgcaaagtgtcgttgggttgggatccggattgtttggatttgacccgacccgttccagaacttgttaaggcttttgatgtagcggcggagatcagcgctcgccgcgccacggagccggtttacgccgtgtggaaagtaaagcgtttcttgaacgtagggagcgagaagaggttgagagaagccatcaagaccgtacacttgtctgtgtctgagatcatccgggccaaaaagaaaagcctcgatatcggtggtgacgtgtcggacaagcaggacctgctgtcgaggtttctcgccgctggccacggggaagaagccgtgagggatagtgtaatcagctttattatggcgggaagggatacaacgtcggcagcgatgacgtggctgttttggttgttgagtcaaaatgatgacgtggagacgaagatactcgacgaattgagaaacaaagggtctttagggttagggtttgaggatttgagagagatgagttacacaaaagcttgtctgtgtgaagcaatgaggctttacccaccagtggcttgggactcaaagcatgcagcaaacgacgacattttgccagatggaacacctctcaaaaagggagacaaagtcacttatttcccttacggtatgggaaggatggagaaggtgtggggtaaagattgggacgagtttaaaccaaaccggtggtttgaggaagaaccgagttacggtacaaaaccggttttgaaaagtgtgagttcgttcaagtttccggttttccaagccggaccaagggtttgcataggtaaagaaatggcttttacacaaatgaaagacgtggttggttcagttttgagtcggtttaagattataccggtttgcaataaccggccggtctttgttcctcttctaaccgctcacatggctggtgggctaaaggtgaagatcaagaggagagagcaatgtgattcgatgtatatttaattaattgattaatcaagtcatgtccttgtagaatatccaactaatatgtaaaatgtgtggtttataaattaaatcaaataaatatattatat

SEQ ID NO: 38946 - protein, 528 aa, Arabidopsis thaliana
  peptide (1)..(528): Ceres Seq. ID no. 13489357
  misc_feature (19)..(520): Homolog of NCBI NO: 17366433 NR Description: Cytochrome P450 94A2 (P450-dependent fatty acid
  misc_feature (19)..(524): Homolog of NCBI NO: 18000068 NR Description: cytochrome P450-dependent fatty acid hydroxylase
  misc_feature (24)..(520): Homolog of NCBI NO: 18000066 NR Description: cytochrome P450-dependent fatty acid hydroxylase
  misc_feature (19)..(520): Homolog of NCBI NO: 18000072 NR Description: cytochrome P450-dependent fatty acid hydroxylase
  misc_feature (22)..(521): Homolog of NCBI NO: 17366212 NR Description: Cytochrome P450 94A1 (P450-dependent fatty acid
  misc_feature (54)..(521): Homolog of NCBI NO: 18395978 NR Description: cytochrome P450 family [Arabidopsis thaliana]
  misc_feature (27)..(520): Homolog of NCBI NO: 15228396 NR Description: cytochrome P450 family [Arabidopsis thaliana]
  misc_feature (21)..(528): Homolog of NCBI NO: 21536522 NR Description: cytochrome P450-like protein [Arabidopsis
  misc_feature (19)..(528): Homolog of NCBI NO: 15242759 NR Description: cytochrome P450, putative [Arabidopsis thaliana]
  misc_feature (19)..(528): Homolog of NCBI NO: 26452145 NR Description: putative cytochrome P450 [Arabidopsis thaliana]
TNQNNIINLPKQETQESKMEMLNAIILILFPIIGFVLIFSFPTKTLKAKTASPSNPTSYQLIGSILSFNKNRHRLLQWYTDLLRLSPSQTITVDLLFGRRTIITANPENVEHILKTNFYNFPKGKPFTDLLGDLLGGGIFNSDGELWSSQRKLASHEFTMRSLREFTFEILREEVQNRLIPVLSSAVDCGETVDFQEVLKRFAFDVVCKVSLGWDPDCLDLTRPVPELVKAFDVAAEISARRATEPVYAVWKVKRFLNVGSEKRLREAIKTVHLSVSEIIRAKKKSLDIGGDVSDKQDLLSRFLAAGHGEEAVRDSVISFIMAGRDTTSAAMTWLFWLLSQNDDVETKILDELRNKGSLGLGFEDLREMSYTKACLCEAMRLYPPVAWDSKHAANDDILPDGTPLKKGDKVTYFPYGMGRMEKVWGKDWDEFKPNRWFEEEPSYGTKPVLKSVSSFKFPVFQAGPRVCIGKEMAFTQMKDVVGSVLSRFKIIPVCNNRPVFVPLLTAHMAGGLKVKIKRREQCDSMYI

SEQ ID NO: 38947 - protein, 510 aa, Arabidopsis thaliana
  peptide (1)..(510): Ceres Seq. ID no. 13489358
  misc_feature (1)..(502): Homolog of NCBI NO: 17366433 NR Description: Cytochrome P450 94A2 (P450-dependent fatty acid
  misc_feature (1)..(506): Homolog of NCBI NO: 18000068 NR Description: cytochrome P450-dependent fatty acid hydroxylase
  misc_feature (6)..(502): Homolog of NCBI NO: 18000066 NR Description: cytochrome P450-dependent fatty acid hydroxylase
  misc_feature (1)..(502): Homolog of NCBI NO: 18000072 NR Description: cytochrome P450-dependent fatty acid hydroxylase
  misc_feature (4)..(503): Homolog of NCBI NO: 17366212 NR Description: Cytochrome P450 94A1 (P450-dependent fatty acid
  misc_feature (36)..(503): Homolog of NCBI NO: 18395978 NR Description: cytochrome P450 family [Arabidopsis thaliana]
  misc_feature (9)..(502): Homolog of NCBI NO: 15228396 NR Description: cytochrome P450 family [Arabidopsis thaliana]
  misc_feature (3)..(510): Homolog of NCBI NO: 21536522 NR Description: cytochrome P450-like protein [Arabidopsis
  misc_feature (1)..(510): Homolog of NCBI NO: 15242759 NR Description: cytochrome P450, putative [Arabidopsis thaliana]
  misc_feature (1)..(510): Homolog of NCBI NO: 26452145 NR Description: putative cytochrome P450 [Arabidopsis thaliana]
MEMLNAIILILFPIIGFVLIFSFPTKTLKAKTASPSNPTSYQLIGSILSFNKNRHRLLQWYTDLLRLSPSQTITVDLLFGRRTIITANPENVEHILKTNFYNFPKGKPFTDLLGDLLGGGIFNSDGELWSSQRKLASHEFTMRSLREFTFEILREEVQNRLIPVLSSAVDCGETVDFQEVLKRFAFDVVCKVSLGWDPDCLDLTRPVPELVKAFDVAAEISARRATEPVYAVWKVKRFLNVGSEKRLREAIKTVHLSVSEIIRAKKKSLDIGGDVSDKQDLLSRFLAAGHGEEAVRDSVISFIMAGRDTTSAAMTWLFWLLSQNDDVETKILDELRNKGSLGLGFEDLREMSYTKACLCEAMRLYPPVAWDSKHAANDDILPDGTPLKKGDKVTYFPYGMGRMEKVWGKDWDEFKPNRWFEEEPSYGTKPVLKSVSSFKFPVFQAGPRVCIGKEMAFTQMKDVVGSVLSRFKIIPVCNNRPVFVPLLTAHMAGGLKVKIKRREQCDSMYI

SEQ ID NO: 38948 - protein, 508 aa, Arabidopsis thaliana
  peptide (1)..(508): Ceres Seq. ID no. 13489359
  misc_feature (1)..(500): Homolog of NCBI NO: 17366433 NR Description: Cytochrome P450 94A2 (P450-dependent fatty acid
  misc_feature (1)..(504): Homolog of NCBI NO: 18000068 NR Description: cytochrome P450-dependent fatty acid hydroxylase
  misc_feature (4)..(500): Homolog of NCBI NO: 18000066 NR Description: cytochrome P450-dependent fatty acid hydroxylase
  misc_feature (1)..(500): Homolog of NCBI NO: 18000072 NR Description: cytochrome P450-dependent fatty acid hydroxylase
  misc_feature (2)..(501): Homolog of NCBI NO: 17366212 NR Description: Cytochrome P450 94A1 (P450-dependent fatty acid
  misc_feature (34)..(501): Homolog of NCBI NO: 18395978 NR Description: cytochrome P450 family [Arabidopsis thaliana]
  misc_feature (7)..(500): Homolog of NCBI NO: 15228396 NR Description: cytochrome P450 family [Arabidopsis thaliana]
  misc_feature (1)..(508): Homolog of NCBI NO: 21536522 NR Description: cytochrome P450-like protein [Arabidopsis
  misc_feature (1)..(508): Homolog of NCBI NO: 15242759 NR Description: cytochrome P450, putative [Arabidopsis thaliana]
  misc_feature (1)..(508): Homolog of NCBI NO: 26452145 NR Description: putative cytochrome P450 [Arabidopsis thaliana]
MLNAIILILFPIIGFVLIFSFPTKTLKAKTASPSNPTSYQLIGSILSFNKNRHRLLQWYTDLLRLSPSQTITVDLLFGRRTIITANPENVEHILKTNFYNFPKGKPFTDLLGDLLGGGIFNSDGELWSSQRKLASHEFTMRSLREFTFEILREEVQNRLIPVLSSAVDCGETVDFQEVLKRFAFDVVCKVSLGWDPDCLDLTRPVPELVKAFDVAAEISARRATEPVYAVWKVKRFLNVGSEKRLREAIKTVHLSVSEIIRAKKKSLDIGGDVSDKQDLLSRFLAAGHGEEAVRDSVISFIMAGRDTTSAAMTWLFWLLSQNDDVETKILDELRNKGSLGLGFEDLREMSYTKACLCEAMRLYPPVAWDSKHAANDDILPDGTPLKKGDKVTYFPYGMGRMEKVWGKDWDEFKPNRWFEEEPSYGTKPVLKSVSSFKFPVFQAGPRVCIGKEMAFTQMKDVVGSVLSRFKIIPVCNNRPVFVPLLTAHMAGGLKVKIKRREQCDSMYI

SEQ ID NO: 38949 - DNA, 925 bp, Arabidopsis thaliana
  misc_feature (1)..(925): Ceres Seq. ID no. 13575729
  misc_feature: MA Experiment ID: 20000213 Result: Up-regulated in Transcription
  misc_feature: MA Experiment 20000213 PARAMETER Experiment Name: At_4deg_Cold_P Parameter: Timepoint (hr) Value: 2
  misc_feature: MA Experiment ID: 20000437 Result: Up-regulated in Transcription
  misc_feature: MA Experiment 20000437 PARAMETER Experiment Name: At_Drought_P Parameter: Age (day) Value: 8
  misc_feature: MA Experiment 20000437 PARAMETER Experiment Name: At_Drought_P Parameter: Organism Value: A. thaliana
  misc_feature: MA Experiment 20000437 PARAMETER Experiment Name: At_Drought_P Parameter: Plant Line Value: WS
  misc_feature: MA Experiment 20000437 PARAMETER Experiment Name: At_Drought_P Parameter: Timepoint (hr) Value: 24
  misc_feature: MA Experiment 20000437 PARAMETER Experiment Name: At_Drought_P Parameter: Tissue Value: Whole Plant
  misc_feature: MA Experiment 20000437 PARAMETER Experiment Name: At_Drought_P Parameter: Treatment Value: Drought vs. No Drought
  misc_feature: MA Experiment ID: 20000438 Result: Down-regulated in Transcription
  misc_feature: MA Experiment 20000438 PARAMETER Experiment Name: At_Shoots__P Parameter: Age (day) Value: 14
  misc_feature: MA Experiment 20000438 PARAMETER Experiment Name: At_Shoots__P Parameter: Tissue Value: Shoots vs. Whole Plant
  misc_feature: MA Experiment ID: 20001451 Result: Up-regulated in Transcription
  misc_feature: MA Experiment 20001451 PARAMETER Experiment Name: At_Far-red-induction_P Parameter: Age (day) Value: 7
  misc_feature: MA Experiment 20001451 PARAMETER Experiment Name: At_Far-red-induction_P Parameter: Light Value: Far-red vs. White
  misc_feature: MA Experiment 20001451 PARAMETER Experiment Name: At_Far-red-induction_P Parameter: Organism Value: A. thaliana
  misc_feature: MA Experiment 20001451 PARAMETER Experiment Name: At_Far-red-induction_P Parameter: Plant Line Value: Columbia
  misc_feature: MA Experiment 20001451 PARAMETER Experiment Name: At_Far-red-induction_P Parameter: Timepoint (hr) Value: 24
  misc_feature: MA Experiment 20001451 PARAMETER Experiment Name: At_Far-red-induction_P Parameter: Tissue Value: Whole Plant
  misc_feature: MA Experiment ID: 20001557 Result: Up-regulated in Transcription
  misc_feature: MA Experiment 20001557 PARAMETER Experiment Name: At_Drought_Soil_Dry_P Parameter: Age (day) Value: 27
  misc_feature: MA Experiment 20001557 PARAMETER Experiment Name: At_Drought_Soil_Dry_P Parameter: Organism Value: A. thaliana
  misc_feature: MA Experiment 20001557 PARAMETER Experiment Name: At_Drought_Soil_Dry_P Parameter: Plant Line Value: WS
  misc_feature: MA Experiment 20001557 PARAMETER Experiment Name: At_Drought_Soil_Dry_P Parameter: Post Timepoint (hr) Value: 3
  misc_feature: MA Experiment 20001557 PARAMETER Experiment Name: At_Drought_Soil_Dry_P Parameter: Post-Treatment Value: Re-Water vs. No Drought
  misc_feature: MA Experiment 20001557 PARAMETER Experiment Name: At_Drought_Soil_Dry_P Parameter: Timepoint (day) Value: 13
  misc_feature: MA Experiment 20001557 PARAMETER Experiment Name: At_Drought_Soil_Dry_P Parameter: Treatment Value: Drought vs. No Drought
atctcactgctcactactctcactgtaatcccttagatcttcttttcaaatttcaatggcgtccggtgatgtagagtatcggtgcttcgttggaggtctagcatgggccactgatgacagagctcttgagactgccttcgctcaatacggcgacgttattgattccaaggtctgttacacgccgagatcggactccgagtgatatcgatgatctcatcctcgacggatctgttccgatcttgtgtttctctgttacttgattcgattactctgttactattctcgttctttgttactactactactactactgttacttgtattttcccaaatcgatcattaacgatcgtgagactggaagatcaaggggattcggattcgtcaccttcaaggatgagaaagccatgaaggatgcgattgagggaatgaacggacaagatctcgatggccgtagcatcactgttaacgaggctcagtcacgaggaagcggtggcggcggaggccaccgtggaggtggtggcggtggataccgcagcggcggtggtggagggtacttccggtggaggtggtagctacggaggtggcggcggtagacgcgagggtggaggaggatacagcggcggcggcggttactcctcaagaggtggtggtggcggaagctacggtggtggaagacgtgagggaggaggaggatacggtggtggtgaaggaggaggttacggaggaagcggtggtggtggaggatggtaattcctttaattaggtttgggattaccaatgaatgttctctctctcgcttgttatgcttctacttggttttgtgtgttctctattttgttctggttctgctttagatttgatgtaacagttcgtgattaggtattttggtatctggaaacgtaatgttaagtcacttgtcattctc

SEQ ID NO: 38950 - protein, 101 aa, Arabidopsis thaliana
  peptide (1)..(101): Ceres Seq. ID no. 13575730
  misc_feature (36)..(100): Pfam Name: Herpesvirus large structural phosphoprotein UL32 Pfam Description: Herpesvirus large structural phosphoprotein UL32
  misc_feature (36)..(101): Homolog of NCBI NO: 10799202 NR Description: glycine-rich RNA-binding protein [Sorghum bicolor]
  misc_feature (39)..(94): Homolog of NCBI NO: 7439998 NR Description: glycine-rich RNA-binding protein GRP1 -
  misc_feature (36)..(101): Homolog of NCBI NO: 544423 NR Description: Glycine-rich RNA-binding protein 2
  misc_feature (36)..(101): Homolog of NCBI NO: 544416 NR Description: Glycine-rich RNA-binding protein 10
  misc_feature (36)..(101): Homolog of NCBI NO: 34851124 NR Description: putative glycine-rich RNA-binding protein [Prunus
  misc_feature (38)..(101): Homolog of NCBI NO: 15235002 NR Description: glycine-rich RNA-binding protein 8 (GRP8) (CCR1)
  misc_feature (36)..(101): Homolog of NCBI NO: 1346181 NR Description: Glycine-rich RNA-binding protein GRP2A
  misc_feature (38)..(101): Homolog of NCBI NO: 1346180 NR Description: Glycine-rich RNA-binding protein GRP1A
  misc_feature (36)..(101): Homolog of NCBI NO: 15226605 NR Description: glycine-rich RNA-binding protein (AtGRP7)
  misc_feature (36)..(101): Homolog of NCBI NO: 21553354 NR Description: glycine-rich RNA binding protein 7 [Arabidopsis
MAVASLLTRLSHEEAVAAEATVEVVAVDTAAAVVEGTSGGGGSYGGGGGRREGGGGYSGGGGYSSRGGGGGSYGGGRREGGGGYGGGEGGGYGGSGGGGGW

SEQ ID NO: 38951 - protein, 66 aa, Arabidopsis thaliana
  peptide (1)..(66): Ceres Seq. ID no. 13575731
MISSSTDLFRSCVSLLLDSITLLLFSFFVTTTTTTVTCIFPNRSLTIVRLEDQGDSDSSPSRMRKP

SEQ ID NO: 38952 - protein, 55 aa, Arabidopsis thaliana
  peptide (1)..(55): Ceres Seq. ID no. 13575732
  misc_feature (1)..(49): Homolog of NCBI NO: 10799202 NR Description: glycine-rich RNA-binding protein [Sorghum bicolor]
  misc_feature (1)..(50): Homolog of NCBI NO: 7439998 NR Description: glycine-rich RNA-binding protein GRP1 -
  misc_feature (1)..(50): Homolog of NCBI NO: 544423 NR Description: Glycine-rich RNA-binding protein 2
  misc_feature (1)..(50): Homolog of NCBI NO: 544416 NR Description: Glycine-rich RNA-binding protein 10
  misc_feature (1)..(50): Homolog of NCBI NO: 34851124 NR Description: putative glycine-rich RNA-binding protein [Prunus
  misc_feature (1)..(50): Homolog of NCBI NO: 15235002 NR Description: glycine-rich RNA-binding protein 8 (GRP8) (CCR1)
  misc_feature (1)..(49): Homolog of NCBI NO: 1346181 NR Description: Glycine-rich RNA-binding protein GRP2A
  misc_feature (1)..(50): Homolog of NCBI NO: 1346180 NR Description: Glycine-rich RNA-binding protein GRP1A
  misc_feature (1)..(50): Homolog of NCBI NO: 15226605 NR Description: glycine-rich RNA-binding protein (AtGRP7)
  misc_feature (1)..(50): Homolog of NCBI NO: 21553354 NR Description: glycine-rich RNA binding protein 7 [Arabidopsis
MKDAIEGMNGQDLDGRSITVNEAQSRGSGGGGGHRGGGGGGYRSGGGGGYFRWRW

SEQ ID NO: 38953 - DNA, 1366 bp, Arabidopsis thaliana
  misc_feature (1)..(1366): Ceres Seq. ID no. 12325610
  misc_feature: MA Experiment ID: 108577 Result: Down-regulated in Transcription
  misc_feature: MA Experiment 108577 PARAMETER Experiment Name: At_42deg_Heat_cDNA_P Parameter: Temperature (deg C) Value: 42 vs. 22
  misc_feature: MA Experiment 108577 PARAMETER Experiment Name: At_42deg_Heat_cDNA_P Parameter: Timepoint (hr) Value: 6
  misc_feature: MA Experiment 108577 PARAMETER Experiment Name: At_42deg_Heat_cDNA_P Parameter: Tissue Value: Aerial
  misc_feature: MA Experiment ID: 20001807 Result: Up-regulated in Transcription
  misc_feature: MA Experiment 20001807 PARAMETER Experiment Name: At_50mM_NH4NO3_L-to-H_Sub_P Parameter: Timepoint (hr) Value: 6
  misc_feature: MA Experiment 20001807 PARAMETER Experiment Name: At_50mM_NH4NO3_L-to-H_Sub_P Parameter: Tissue Value: Leaf
  misc_feature: MA Experiment 20001807 PARAMETER Experiment Name: At_50mM_NH4NO3_L-to-H_Sub_P Parameter: Treatment Value: 50mM NH4NO3 vs 100mM Mannitol
atattgaaaagaaccattgctctctagattaaaagcttctctctctctctctctctctcttttggactttctcaatccatatccctctctctgttttttctaatttgagcctctaaagtctcctcgttttgttcatgttgttgttcaagtgaagaagctcaattatgtttacaacattgttgtaatttcaaaacttcataagaatttctctgaaaataaagaaaaagctggagtagaactattttaaagtgtcatcatgaagagactaagcagctcagattcaatgtgtggtctaatctccacttctacagatgaacagagtccaagagggtacggaagtaattaccaatctatgcttgaaggttacgatgaagatgctacactaatcgaggaatattccggcaaccaccaccacatgggtctatcggagaagaagagaagattaaaagttgaccaagtcaaagctcttgagaagaatttcgaacttgagaataaactcgaacctgagaggaaaactaaattagcacaagagcttggacttcaacctcgtcaagtagctgtttggtttcagaaccgtcgtgcacggtggaaaacaaaacagcttgaaaaagattacggtgttcttaagggtcaatacgattctctccgccacaatttcgattctctccgccgtgacaatgattcccttctccaagagattagtaaaatcaaagctaaggtaaacggtgaagaagataacaacaacaacaaagctattacggagggtgttaaggaagaggaagttcacaagacggattcgattccttcgtctcctctgcagtttctagaacattcctctggttttaactaccggcgaagcttcactgacctccgtgaccttctaccgaattccaccgttgtcgaggctggatcttccgatagttgcgattcaagcgccgttcttaacgacgaaacaagttctgataacggaagattgacgccgcctgtgacggttactggcgggagtttcttacagtttgtgaaaacagagcaaacagaggatcacgaggattttctaagcggtgaagaagcttgtggtttcttctccgatgaacagccgccgtcacttcattggtactctgcttcagatcattggacttgagaattgtttatcaaattggtgctctgtttagtctcaatgggaaaacagagaagagggcaaaggtggaataattgataaataaggattaaggatgaaggggattattaaattaaatccgcgggagaagttaattttgggtttaagattgtaatggctcttcatgtaattaacgatgtcgagaggggctttcacagaaataggaatcaatggggacactctgatatg

SEQ ID NO: 38954 - protein, 294 aa, Arabidopsis thaliana
  peptide (1)..(294): Ceres Seq. ID no. 12325611
  misc_feature (59)..(113): Pfam Name: Homeobox domain Pfam Description: Homeobox domain
  misc_feature (1)..(191): Homolog of NCBI NO: 11231065 NR Description: homeobox-leucine zipper protein [Zinnia elegans]
  misc_feature (52)..(294): Homolog of NCBI NO: 15148916 NR Description: homeodomain leucine zipper protein HDZ1
  misc_feature (1)..(293): Homolog of NCBI NO: 15238405 NR Description: homeobox-leucine zipper protein ATHB-5 (HD-zip
  misc_feature (1)..(273): Homolog of NCBI NO: 5305602 NR Description: homeobox protein ATHB6 [Arabidopsis thaliana]
  misc_feature (1)..(293): Homolog of NCBI NO: 8133126 NR Description: hb-6-like protein [Brassica rapa subsp.
  misc_feature (1)..(293): Homolog of NCBI NO: 25386231 NR Description: homeodomain transcription factor (ATHB-6)
  misc_feature (1)..(293): Homolog of NCBI NO: 18399966 NR Description: homeodomain transcription factor (ATHB-6)
  misc_feature (1)..(294): Homolog of NCBI NO: 7446295 NR Description: homeotic protein T5J17.230 - Arabidopsis thaliana
  misc_feature (1)..(294): Homolog of NCBI NO: 15450982 NR Description: homeodomain-like protein [Arabidopsis thaliana]
  misc_feature (1)..(294): Homolog of NCBI NO: 15236109 NR Description: homeodomain - like protein
MKRLSSSDSMCGLISTSTDEQSPRGYGSNYQSMLEGYDEDATLIEEYSGNHHHMGLSEKKRRLKVDQVKALEKNFELENKLEPERKTKLAQELGLQPRQVAVWFQNRRARWKTKQLEKDYGVLKGQYDSLRHNFDSLRRDNDSLLQEISKIKAKVNGEEDNNNNKAITEGVKEEEVHKTDSIPSSPLQFLEHSSGFNYRRSFTDLRDLLPNSTVVEAGSSDSCDSSAVLNDETSSDNGRLTPPVTVTGGSFLQFVKTEQTEDHEDFLSGEEACGFFSDEQPPSLHWYSASDHWT

SEQ ID NO: 38955 - protein, 285 aa, Arabidopsis thaliana
  peptide (1)..(285): Ceres Seq. ID no. 12325612
  misc_feature (50)..(104): Pfam Name: Homeobox domain Pfam Description: Homeobox domain
  misc_feature (1)..(182): Homolog of NCBI NO: 11231065 NR Description: homeobox-leucine zipper protein [Zinnia elegans]
  misc_feature (43)..(285): Homolog of NCBI NO: 15148916 NR Description: homeodomain leucine zipper protein HDZ1
  misc_feature (1)..(284): Homolog of NCBI NO: 15238405 NR Description: homeobox-leucine zipper protein ATHB-5 (HD-zip
  misc_feature (1)..(264): Homolog of NCBI NO: 5305602 NR Description: homeobox protein ATHB6 [Arabidopsis thaliana]
  misc_feature (1)..(284): Homolog of NCBI NO: 8133126 NR Description: hb-6-like protein [Brassica rapa subsp.
  misc_feature (1)..(284): Homolog of NCBI NO: 25386231 NR Description: homeodomain transcription factor (ATHB-6)
  misc_feature (1)..(284): Homolog of NCBI NO: 18399966 NR Description: homeodomain transcription factor (ATHB-6)
  misc_feature (1)..(285): Homolog of NCBI NO: 7446295 NR Description: homeotic protein T5J17.230 - Arabidopsis thaliana
  misc_feature (1)..(285): Homolog of NCBI NO: 15450982 NR Description: homeodomain-like protein [Arabidopsis thaliana]
  misc_feature (1)..(285): Homolog of NCBI NO: 15236109 NR Description: homeodomain - like protein
MCGLISTSTDEQSPRGYGSNYQSMLEGYDEDATLIEEYSGNHHHMGLSEKKRRLKVDQVKALEKNFELENKLEPERKTKLAQELGLQPRQVAVWFQNRRARWKTKQLEKDYGVLKGQYDSLRHNFDSLRRDNDSLLQEISKIKAKVNGEEDNNNNKAITEGVKEEEVHKTDSIPSSPLQFLEHSSGFNYRRSFTDLRDLLPNSTVVEAGSSDSCDSSAVLNDETSSDNGRLTPPVTVTGGSFLQFVKTEQTEDHEDFLSGEEACGFFSDEQPPSLHWYSASDHWT

SEQ ID NO: 38956 - protein, 262 aa, Arabidopsis thaliana
  peptide (1)..(262): Ceres Seq. ID no. 12325613
  misc_feature (27)..(81): Pfam Name: Homeobox domain Pfam Description: Homeobox domain
  misc_feature (1)..(159): Homolog of NCBI NO: 11231065 NR Description: homeobox-leucine zipper protein [Zinnia elegans]
  misc_feature (20)..(262): Homolog of NCBI NO: 15148916 NR Description: homeodomain leucine zipper protein HDZ1
  misc_feature (1)..(261): Homolog of NCBI NO: 15238405 NR Description: homeobox-leucine zipper protein ATHB-5 (HD-zip
  misc_feature (1)..(241): Homolog of NCBI NO: 5305602 NR Description: homeobox protein ATHB6 [Arabidopsis thaliana]
  misc_feature (1)..(261): Homolog of NCBI NO: 8133126 NR Description: hb-6-like protein [Brassica rapa subsp.
  misc_feature (1)..(261): Homolog of NCBI NO: 25386231 NR Description: homeodomain transcription factor (ATHB-6)
  misc_feature (1)..(261): Homolog of NCBI NO: 18399966 NR Description: homeodomain transcription factor (ATHB-6)
  misc_feature (1)..(262): Homolog of NCBI NO: 7446295 NR Description: homeotic protein T5J17.230 - Arabidopsis thaliana
  misc_feature (1)..(262): Homolog of NCBI NO: 15450982 NR Description: homeodomain-like protein [Arabidopsis thaliana]
  misc_feature (1)..(262): Homolog of NCBI NO: 15236109 NR Description: homeodomain - like protein
MLEGYDEDATLIEEYSGNHHHMGLSEKKRRLKVDQVKALEKNFELENKLEPERKTKLAQELGLQPRQVAVWFQNRRARWKTKQLEKDYGVLKGQYDSLRHNFDSLRRDNDSLLQEISKIKAKVNGEEDNNNNKAITEGVKEEEVHKTDSIPSSPLQFLEHSSGFNYRRSFTDLRDLLPNSTVVEAGSSDSCDSSAVLNDETSSDNGRLTPPVTVTGGSFLQFVKTEQTEDHEDFLSGEEACGFFSDEQPPSLHWYSASDHWT

SEQ ID NO: 38957 - DNA, 641 bp, Arabidopsis thaliana
  misc_feature (1)..(641): Ceres Seq. ID no. 12325617
  misc_feature: MA Experiment ID: 108434 Result: Down-regulated in Transcription
  misc_feature: MA Experiment 108434 PARAMETER Experiment Name: At_Root_Tips_cDNA_P Parameter: Tissue Value: Root Tips
  misc_feature: MA Experiment ID: 20000227 Result: Down-regulated in Transcription
  misc_feature: MA Experiment 20000227 PARAMETER Experiment Name: At_Root-Tips-vs-Tops_P Parameter: Tissue Value: Root Tips vs. Root Tops
  misc_feature: MA Experiment ID: 20000234 Result: Down-regulated in Transcription
  misc_feature: MA Experiment 20000234 PARAMETER Experiment Name: At_Siliques_P Parameter: Age (day) Value: 21
  misc_feature: MA Experiment 20000234 PARAMETER Experiment Name: At_Siliques_P Parameter: Organism Value: A. thaliana
  misc_feature: MA Experiment 20000234 PARAMETER Experiment Name: At_Siliques_P Parameter: Plant Line Value: WS
  misc_feature: MA Experiment 20000234 PARAMETER Experiment Name: At_Siliques_P Parameter: Tissue Value: Less Than 5mm Siliques vs. Whole Plant
  misc_feature: MA Experiment ID: 20000264 Result: Down-regulated in Transcription
  misc_feature: MA Experiment 20000264 PARAMETER Experiment Name: At_Open_Flower_P Parameter: Age (day) Value: 21
  misc_feature: MA Experiment 20000264 PARAMETER Experiment Name: At_Open_Flower_P Parameter: Plant Line Value: WS
  misc_feature: MA Experiment 20000264 PARAMETER Experiment Name: At_Open_Flower_P Parameter: Tissue Value: Open Flower vs. Whole Plant
  misc_feature: MA Experiment ID: 20000265 Result: Down-regulated in Transcription
  misc_feature: MA Experiment 20000265 PARAMETER Experiment Name: At_Open_Flower_P Parameter: Age (day) Value: 21
  misc_feature: MA Experiment 20000265 PARAMETER Experiment Name: At_Open_Flower_P Parameter: Plant Line Value: WS
  misc_feature: MA Experiment 20000265 PARAMETER Experiment Name: At_Open_Flower_P Parameter: Tissue Value: Closed Flower vs. Whole Plant
  misc_feature: MA Experiment ID: 20000286 Result: Down-regulated in Transcription
  misc_feature: MA Experiment 20000286 PARAMETER Experiment Name: At_Open_Flower_P Parameter: Age (day) Value: 21
  misc_feature: MA Experiment 20000286 PARAMETER Experiment Name: At_Open_Flower_P Parameter: Plant Line Value: WS
  misc_feature: MA Experiment 20000286 PARAMETER Experiment Name: At_Open_Flower_P Parameter: Tissue Value: Half Open vs. Whole Plant
  misc_feature: MA Experiment ID: 20000794 Result: Down-regulated in Transcription
  misc_feature: MA Experiment 20000794 PARAMETER Experiment Name: At_Petals_P Parameter: Age (day) Value: 23-25 days
  misc_feature: MA Experiment 20000794 PARAMETER Experiment Name: At_Petals_P Parameter: Plant Line Value: WS
  misc_feature: MA Experiment 20000794 PARAMETER Experiment Name: At_Petals_P Parameter: Tissue Value: Petals vs. Whole plant
  misc_feature: MA Experiment ID: 20001451 Result: Up-regulated in Transcription
  misc_feature: MA Experiment 20001451 PARAMETER Experiment Name: At_Far-red-induction_P Parameter: Age (day) Value: 7
  misc_feature: MA Experiment 20001451 PARAMETER Experiment Name: At_Far-red-induction_P Parameter: Light Value: Far-red vs. White
  misc_feature: MA Experiment 20001451 PARAMETER Experiment Name: At_Far-red-induction_P Parameter: Organism Value: A. thaliana
  misc_feature: MA Experiment 20001451 PARAMETER Experiment Name: At_Far-red-induction_P Parameter: Plant Line Value: Columbia
  misc_feature: MA Experiment 20001451 PARAMETER Experiment Name: At_Far-red-induction_P Parameter: Timepoint (hr) Value: 24
  misc_feature: MA Experiment 20001451 PARAMETER Experiment Name: At_Far-red-induction_P Parameter: Tissue Value: Whole Plant
  misc_feature: MA Experiment ID: 20001557 Result: Down-regulated in Transcription
  misc_feature: MA Experiment 20001557 PARAMETER Experiment Name: At_Drought_Soil_Dry_P Parameter: Age (day) Value: 27
  misc_feature: MA Experiment 20001557 PARAMETER Experiment Name: At_Drought_Soil_Dry_P Parameter: Organism Value: A. thaliana
  misc_feature: MA Experiment 20001557 PARAMETER Experiment Name: At_Drought_Soil_Dry_P Parameter: Plant Line Value: WS
  misc_feature: MA Experiment 20001557 PARAMETER Experiment Name: At_Drought_Soil_Dry_P Parameter: Post Timepoint (hr) Value: 3
  misc_feature: MA Experiment 20001557 PARAMETER Experiment Name: At_Drought_Soil_Dry_P Parameter: Post-Treatment Value: Re-Water vs. No Drought
  misc_feature: MA Experiment 20001557 PARAMETER Experiment Name: At_Drought_Soil_Dry_P Parameter: Timepoint (day) Value: 13
  misc_feature: MA Experiment 20001557 PARAMETER Experiment Name: At_Drought_Soil_Dry_P Parameter: Treatment Value: Drought vs. No Drought
  misc_feature: MA Experiment ID: 20001558 Result: Down-regulated in Transcription
  misc_feature: MA Experiment 20001558 PARAMETER Experiment Name: At_Drought_Soil_Dry_P Parameter: Age (day) Value: 27
  misc_feature: MA Experiment 20001558 PARAMETER Experiment Name: At_Drought_Soil_Dry_P Parameter: Organism Value: A. thaliana
  misc_feature: MA Experiment 20001558 PARAMETER Experiment Name: At_Drought_Soil_Dry_P Parameter: Plant Line Value: WS
  misc_feature: MA Experiment 20001558 PARAMETER Experiment Name: At_Drought_Soil_Dry_P Parameter: Post Timepoint (hr) Value: 6
  misc_feature: MA Experiment 20001558 PARAMETER Experiment Name: At_Drought_Soil_Dry_P Parameter: Post-Treatment Value: Re-Water vs. No Drought
  misc_feature: MA Experiment 20001558 PARAMETER Experiment Name: At_Drought_Soil_Dry_P Parameter: Timepoint (day) Value: 13
  misc_feature: MA Experiment 20001558 PARAMETER Experiment Name: At_Drought_Soil_Dry_P Parameter: Treatment Value: Drought vs. No Drought
aaatataataataagccattgaaaaaaatggcggaggagagcagagtcccatcatcggtgtcggtaacagtcgcccacgaccttcttctagccggccaccgctatctagacgtcaggactccagaagagttcagccagggacatgcctgtggggcgatcaacgtgccttacatgaatcgaggagcatcaggtatgtttttatttggttagttgataactgagtgatggatataattttgtgattgtgaaacagggatgtcaaagaaccccgacttcctggaacaagtctcctcccatttcggacaatccgataacatcattgttggctgccagagcggtggtagatctatcaaagccaccaccgatcttctccatgcaggtttcacgggagtcaaagatatcgtcggtggctatagtgcctgggccaagaatggccttcctacaaaggcttgatgactcaccattcaccaaacatctttccttatctcttcgtctccttcttcttcaataatgcatcctttccgcatgtaatcatcaataaatgaccctcctttctctttgctgtctgatgtgatagcttggagggaggggctcatcgcatctttttaaaatatataaaaatacgagtgtgtgttgattgc

SEQ ID NO: 38958 - protein, 69 aa, Arabidopsis thaliana
  peptide (1)..(69): Ceres Seq. ID no. 12325618
  misc_feature (19)..(64): Homolog of NCBI NO: 30725286 NR Description: At2g21045 [Arabidopsis thaliana]
  misc_feature (4)..(65): Homolog of NCBI NO: 7340289 NR Description: OP1 [Cucumis sativus]
  misc_feature (14)..(65): Homolog of NCBI NO: 118636 NR Description: Senescence-associated protein DIN1
  misc_feature (11)..(65): Homolog of NCBI NO: 21537402 NR Description: senescence-associated protein sen1 [Arabidopsis
  misc_feature (11)..(65): Homolog of NCBI NO: 15233328 NR Description: senescence-associated protein sen1
  misc_feature (11)..(65): Homolog of NCBI NO: 1046268 NR Description: senescence-associated protein [Arabidopsis
  misc_feature (11)..(65): Homolog of NCBI NO: 7488606 NR Description: senescence-associated protein din1,
  misc_feature (14)..(65): Homolog of NCBI NO: 7594903 NR Description: Ntdin [Nicotiana tabacum]
  misc_feature (10)..(65): Homolog of NCBI NO: 30698182 NR Description: senescence-associated protein [Arabidopsis
  misc_feature (10)..(65): Homolog of NCBI NO: 2129628 NR Description: ketoconazole resistance protein - Arabidopsis
KYNNKPLKKMAEESRVPSSVSVTVAHDLLLAGHRYLDVRTPEEFSQGHACGAINVPYMNRGASGMFLFG

SEQ ID NO: 38959 - protein, 65 aa, Arabidopsis thaliana
  peptide (1)..(65): Ceres Seq. ID no. 12325619
  misc_feature (1)..(59): Pfam Name: Rhodanese-like domain Pfam Description: Rhodanese-like domain
  misc_feature (1)..(65): Homolog of NCBI NO: 30698184 NR Description: senescence-associated protein [Arabidopsis
  misc_feature (1)..(62): Homolog of NCBI NO: 7340289 NR Description: OP1 [Cucumis sativus]
  misc_feature (1)..(64): Homolog of NCBI NO: 118636 NR Description: Senescence-associated protein DIN1
  misc_feature (1)..(64): Homolog of NCBI NO: 21537402 NR Description: senescence-associated protein sen1 [Arabidopsis
  misc_feature (1)..(64): Homolog of NCBI NO: 15233328 NR Description: senescence-associated protein sen1
  misc_feature (1)..(64): Homolog of NCBI NO: 1046268 NR Description: senescence-associated protein [Arabidopsis
  misc_feature (1)..(64): Homolog of NCBI NO: 7488606 NR Description: senescence-associated protein din1,
  misc_feature (1)..(63): Homolog of NCBI NO: 7594903 NR Description: Ntdin [Nicotiana tabacum]
  misc_feature (1)..(65): Homolog of NCBI NO: 30698182 NR Description: senescence-associated protein [Arabidopsis
  misc_feature (1)..(64): Homolog of NCBI NO: 2129628 NR Description: ketoconazole resistance protein - Arabidopsis
MSKNPDFLEQVSSHFGQSDNIIVGCQSGGRSIKATTDLLHAGFTGVKDIVGGYSAWAKNGLPTKA

SEQ ID NO: 38960 - protein, 60 aa, Arabidopsis thaliana
  peptide (1)..(60): Ceres Seq. ID no. 12325620
  misc_feature (10)..(55): Homolog of NCBI NO: 30725286 NR Description: At2g21045 [Arabidopsis thaliana]
  misc_feature (1)..(56): Homolog of NCBI NO: 7340289 NR Description: OP1 [Cucumis sativus]
  misc_feature (5)..(56): Homolog of NCBI NO: 118636 NR Description: Senescence-associated protein DIN1
  misc_feature (2)..(56): Homolog of NCBI NO: 21537402 NR Description: senescence-associated protein sen1 [Arabidopsis
  misc_feature (2)..(56): Homolog of NCBI NO: 15233328 NR Description: senescence-associated protein sen1
  misc_feature (2)..(56): Homolog of NCBI NO: 1046268 NR Description: senescence-associated protein [Arabidopsis
  misc_feature (2)..(56): Homolog of NCBI NO: 7488606 NR Description: senescence-associated protein din1,
  misc_feature (5)..(56): Homolog of NCBI NO: 7594903 NR Description: Ntdin [Nicotiana tabacum]
  misc_feature (1)..(56): Homolog of NCBI NO: 30698182 NR Description: senescence-associated protein [Arabidopsis
  misc_feature (1)..(56): Homolog of NCBI NO: 2129628 NR Description: ketoconazole resistance protein - Arabidopsis
MAEESRVPSSVSVTVAHDLLLAGHRYLDVRTPEEFSQGHACGAINVPYMNRGASGMFLFG

SEQ ID NO: 38961 - DNA, 1207 bp, Arabidopsis thaliana
  misc_feature (1)..(1207): Ceres Seq. ID no. 12329847
  misc_feature: MA Experiment ID: 108463 Result: Down-regulated in Transcription
  misc_feature: MA Experiment 108463 PARAMETER Experiment Name: At_Germinating_Seeds_cDNA_P Parameter: Age (day) Value: 3 vs. 0
  misc_feature: MA Experiment 108463 PARAMETER Experiment Name: At_Germinating_Seeds_cDNA_P Parameter: Tissue Value: Germinating Seeds
  misc_feature: MA Experiment ID: 108573 Result: Up-regulated in Transcription
  misc_feature: MA Experiment 108573 PARAMETER Experiment Name: At_Drought_cDNA_P Parameter: Timepoint (hr) Value: 6
  misc_feature: MA Experiment 108573 PARAMETER Experiment Name: At_Drought_cDNA_P Parameter: Tissue Value: Aerial
  misc_feature: MA Experiment 108573 PARAMETER Experiment Name: At_Drought_cDNA_P Parameter: Treatment Value: Drought vs. No Drought
  misc_feature: MA Experiment ID: 108585 Result: Up-regulated in Transcription
  misc_feature: MA Experiment 108585 PARAMETER Experiment Name: At_5mM_NaNP_cDNA_P Parameter: Timepoint (hr) Value: 6
  misc_feature: MA Experiment 108585 PARAMETER Experiment Name: At_5mM_NaNP_cDNA_P Parameter: Tissue Value: Aerial
  misc_feature: MA Experiment 108585 PARAMETER Experiment Name: At_5mM_NaNP_cDNA_P Parameter: Treatment Value: null
  misc_feature: MA Experiment ID: 108595 Result: Down-regulated in Transcription
  misc_feature: MA Experiment 108595 PARAMETER Experiment Name: At_Ler-pi_Ovule_cDNA_P Parameter: Plant Line Value: null
  misc_feature: MA Experiment ID: 20000794 Result: Up-regulated in Transcription
  misc_feature: MA Experiment 20000794 PARAMETER Experiment Name: At_Petals_P Parameter: Age (day) Value: 23-25 days
  misc_feature: MA Experiment 20000794 PARAMETER Experiment Name: At_Petals_P Parameter: Plant Line Value: WS
  misc_feature: MA Experiment 20000794 PARAMETER Experiment Name: At_Petals_P Parameter: Tissue Value: Petals vs. Whole plant
cgaaaaacgattgtgtgttcttgctttgagcgaaaccctagaatcggtcttaacccatttgagcagagatgctgcgagtagcaggaaggaggcttttttctgtttcgcagagatcatcgacggcgacctccttcgtcctttcccgtgaccataccctttccgatggaggcaactcctcttccgcttctagatctgtcccctctgcagatctctcatctttcaattcttaccaccggagcgttataagaggttttgcttctcaagtcattactcagggaaatgagataggttttggttcggaagtcccagccacagtcgaagctgtcaaaacacctaactcaaagattgtctatgacgaccataaccatgagcgttacccacctggtgaccctagcaagcgggcattcgcctattttgtcttgtcgggtggaaggtttgtttatgcctctgttctccgcctgcttgttctgaagcttattgtgagcatgtctgcaagtaaagatgtccttgcccttgcatccctcgaggttgacctagggagcatagaaccaggaactaccgtgacagtcaagtggcgtggaaagcccgtcttcatcaggcgaagaacagaagatgacatcaagctggccaatagtgtggatgttggatccctgagggacccacaagaagactcggttagagtcaagaatccagaatggttgatcgtggttggagtatgcactcatttggggtgcatccccttgcctaatgctggtgattatggtggttggttttgtccgtgtcacggatcacattacgatatatctggaagaattaggaaaggtcctgcaccatacaacctggaagtaccgacctacagcttcttggaagagaataaattactcattggttaatgaataaagcacaacagtccgagtgtcatggtctggatgatcttaaatctgtttttgtttttatattttccggcattttagcgtgcaagttcgctttcctcacactttgggctcagcaaaaattggcttgttttgctgaataatacaaacttgtcattgtatgacttagtatctgtctcatctggtgaaaatacattgttcatacttcatagtctctgtttattatttgaaaagagttttgaatagtatcatccctatttttcttatgtttgtaattttgtaacatatcgtttgtaagagagtttcctttcctt

SEQ ID NO: 38962 - protein, 274 aa, Arabidopsis thaliana
  peptide (1)..(274): Ceres Seq. ID no. 12329848
  misc_feature (174)..(270): Pfam Name: Rieske [2Fe-2S] domain Pfam Description: Rieske [2Fe-2S] domain
  misc_feature (1)..(274): Homolog of NCBI NO: 1717953 NR Description: Ubiquinol-cytochrome C reductase iron-sulfur
  misc_feature (1)..(274): Homolog of NCBI NO: 1717951 NR Description: Ubiquinol-cytochrome C reductase iron-sulfur
  misc_feature (1)..(274): Homolog of NCBI NO: 1717950 NR Description: Ubiquinol-cytochrome C reductase iron-sulfur
  misc_feature (1)..(274): Homolog of NCBI NO: 586145 NR Description: Ubiquinol-cytochrome C reductase iron-sulfur
  misc_feature (1)..(274): Homolog of NCBI NO: 1076675 NR Description: ubiquinol-cytochrome-c reductase (EC 1.10.2.2)
  misc_feature (74)..(274): Homolog of NCBI NO: 11248861 NR Description: ubiquinol-cytochrome-c reductase (EC 1.10.2.2)
  misc_feature (1)..(274): Homolog of NCBI NO: 18417067 NR Description: ubiquinol--cytochrome-c reductase - like protein
  misc_feature (1)..(274): Homolog of NCBI NO: 21553507 NR Description: ubiquinol--cytochrome-c reductase-like protein
  misc_feature (1)..(274): Homolog of NCBI NO: 21554278 NR Description: ubiquinol--cytochrome-c reductase-like protein
  misc_feature (1)..(274): Homolog of NCBI NO: 15240627 NR Description: ubiquinol--cytochrome-c reductase - like protein
MLRVAGRRLFSVSQRSSTATSFVLSRDHTLSDGGNSSSASRSVPSADLSSFNSYHRSVIRGFASQVITQGNEIGFGSEVPATVEAVKTPNSKIVYDDHNHERYPPGDPSKRAFAYFVLSGGRFVYASVLRLLVLKLIVSMSASKDVLALASLEVDLGSIEPGTTVTVKWRGKPVFIRRRTEDDIKLANSVDVGSLRDPQEDSVRVKNPEWLIVVGVCTHLGCIPLPNAGDYGGWFCPCHGSHYDISGRIRKGPAPYNLEVPTYSFLEENKLLIG

SEQ ID NO: 38963 - DNA, 1702 bp, Arabidopsis thaliana
  misc_feature (1)..(1702): Ceres Seq. ID no. 12422092
  misc_feature: MA Experiment ID: 20000179 Result: Up-regulated in Transcription
  misc_feature: MA Experiment 20000179 PARAMETER Experiment Name: At_Germinating_Seeds_P Parameter: Age (hr) Value: 6 vs. 0
  misc_feature: MA Experiment 20000179 PARAMETER Experiment Name: At_Germinating_Seeds_P Parameter: Tissue Value: Germinating Seeds
  misc_feature: MA Experiment ID: 20000180 Result: Up-regulated in Transcription
  misc_feature: MA Experiment 20000180 PARAMETER Experiment Name: At_Germinating_Seeds_P Parameter: Age (hr) Value: 24 vs. 0
  misc_feature: MA Experiment 20000180 PARAMETER Experiment Name: At_Germinating_Seeds_P Parameter: Tissue Value: Germinating Seeds
  misc_feature: MA Experiment ID: 20000182 Result: Down-regulated in Transcription
  misc_feature: MA Experiment 20000182 PARAMETER Experiment Name: At_2mM_SA_P Parameter: Age (day) Value: 14
  misc_feature: MA Experiment 20000182 PARAMETER Experiment Name: At_2mM_SA_P Parameter: Organism Value: A. thaliana
  misc_feature: MA Experiment 20000182 PARAMETER Experiment Name: At_2mM_SA_P Parameter: Plant Line Value: WS
  misc_feature: MA Experiment 20000182 PARAMETER Experiment Name: At_2mM_SA_P Parameter: Timepoint (hr) Value: 6
  misc_feature: MA Experiment 20000182 PARAMETER Experiment Name: At_2mM_SA_P Parameter: Tissue Value: Aerial
  misc_feature: MA Experiment 20000182 PARAMETER Experiment Name: At_2mM_SA_P Parameter: Treatment Value: 2mM SA vs. No Treatment
  misc_feature: MA Experiment ID: 20000184 Result: Up-regulated in Transcription
  misc_feature: MA Experiment 20000184 PARAMETER Experiment Name: At_Shoots__P Parameter: Age (day) Value: 7
  misc_feature: MA Experiment 20000184 PARAMETER Experiment Name: At_Shoots__P Parameter: Tissue Value: Shoots vs. Whole Plant
  misc_feature: MA Experiment ID: 20000265 Result: Up-regulated in Transcription
  misc_feature: MA Experiment 20000265 PARAMETER Experiment Name: At_Open_Flower_P Parameter: Age (day) Value: 21
  misc_feature: MA Experiment 20000265 PARAMETER Experiment Name: At_Open_Flower_P Parameter: Plant Line Value: WS
  misc_feature: MA Experiment 20000265 PARAMETER Experiment Name: At_Open_Flower_P Parameter: Tissue Value: Closed Flower vs. Whole Plant
  misc_feature: MA Experiment ID: 20000794 Result: Down-regulated in Transcription
  misc_feature: MA Experiment 20000794 PARAMETER Experiment Name: At_Petals_P Parameter: Age (day) Value: 23-25 days
  misc_feature: MA Experiment 20000794 PARAMETER Experiment Name: At_Petals_P Parameter: Plant Line Value: WS
  misc_feature: MA Experiment 20000794 PARAMETER Experiment Name: At_Petals_P Parameter: Tissue Value: Petals vs. Whole plant
  misc_feature: MA Experiment ID: 20001911 Result: Down-regulated in Transcription
  misc_feature: MA Experiment 20001911 PARAMETER Experiment Name: At_Drought_Reproduction_P Parameter: Age (day) Value: 40
  misc_feature: MA Experiment 20001911 PARAMETER Experiment Name: At_Drought_Reproduction_P Parameter: Organism Value: A. thaliana
  misc_feature: MA Experiment 20001911 PARAMETER Experiment Name: At_Drought_Reproduction_P Parameter: Plant Line Value: WS
  misc_feature: MA Experiment 20001911 PARAMETER Experiment Name: At_Drought_Reproduction_P Parameter: Timepoint (day) Value: 10
  misc_feature: MA Experiment 20001911 PARAMETER Experiment Name: At_Drought_Reproduction_P Parameter: Tissue Value: Flowers
  misc_feature: MA Experiment 20001911 PARAMETER Experiment Name: At_Drought_Reproduction_P Parameter: Treatment Value: Drought vs. No Drought
gcattgcgattaacgaaattcgaaaaatgtctcgtcttctccaaacacccttcttaccttcagtttccctccccacaaaaacacgatcttccgttacgggtttccgggtaaagcccagaatcatcccaatccaagcaaagatccgagaaatcttcatgcctgcactaagttctacaatgaccgaaggaaaaatcgtctcttgggttaaatcagaaggcgataaactcaacaaaggagagagtgttgttgttgttgaatccgataaagctgatatggatgttgagactttctatgatggttatctagctgcaatcatggttgaagaaggtggtgttgctcctgttggttctgctattgctttgttagctgaaactgaagatgagattgctgatgctaaggctaaagcttctggtggtggaggtgattctaaggctcctcctccggcttctcctcctacggctacagttgtagcacctgtggctgttgagaagaagattgcagctcctcctgtggcgattaaggcggtggcggcttctgcggtgcatccggcgtctgaaggagggaagaggattgtggcgtctccttatgctaagaagttagctaaggaattgaatgtggaattggctggtttagttggaagtggaccaatgggaaggattgtggctaaagatgttgaggcggttgcagctggaggaggagttcaagctgctgtagctgttaaggaggtagtggcagttcctggtgtggagttgggatcagtggttccgtttacgacaatgcagggggctgtgagtaggaatatggtggagagtcttgctgttcctacttttagagtcggttacacgattagtacggatgctcttgatgctctctacaagaagattaagtcgaaaggtgtgacaatgacggcactcctagcaaaggcaactgcacttgcactggcgaaacatccagttgtaaactcgtcctgtagagatggtaacagttttgtgtataacagtagcatcaacgttgctgttgctgttgctattgatggtggtctgataactcctgtgcttcagaacgctgataaggttgacatttattcgttatctagaaaatggaaagaattggttgataaggctcgagccaagcagctgcagcctcaggagtacaacactggtaccttcactctctctaacctaggaatgtttggcgttgatcggtttgatgctattctaccccctggaacaggagcgattatggctgtaggagcatctcaaccttcagtggttgcaactaaagacggccgcattggcatgaaaaaccagatgcaggtgaatgtgacggcagatcatcgtgtcatctatggtgctgatcttgcacagttcttgcaaacattggcaagcattatagaggacccaaaggaccttacattctaggccaaattactacttttcgcagcccagtcttctctgttcttgattccatgggagcttgtatttctgcggtaatcagtttctttgatagaatcgaacttttaagagtaatgttgaacataatcatttctttgtttgagatatatcttctgcaacattttctgcatggaaaggccgtcccacatgattttgctactgacttcatatatttccacttcatgtgatgaatcttatatgaactgataactttagcatgattaataacatgaatcttatatggactg

SEQ ID NO: 38964 - protein, 472 aa, Arabidopsis thaliana
  peptide (1)..(472): Ceres Seq. ID no. 12422093
  misc_feature (248)..(472): Pfam Name: 2-oxoacid dehydrogenases acyltransferase Pfam Description: 2-oxoacid dehydrogenases acyltransferase
  misc_feature (47)..(471): Homolog of NCBI NO: 37522138 NR Description: dihydrolipoamide S-acetyltransferase [Gloeobacter
  misc_feature (47)..(471): Homolog of NCBI NO: 17231098 NR Description: dihydrolipoamide S-acetyltransferase [Nostoc sp.
  misc_feature (47)..(471): Homolog of NCBI NO: 23123757 NR Description: hypothetical protein [Nostoc punctiforme]
  misc_feature (47)..(471): Homolog of NCBI NO: 22298842 NR Description: dihydrolipoamide S-acetyltransferase
  misc_feature (47)..(466): Homolog of NCBI NO: 16331208 NR Description: dihydrolipoamide acetyltransferase component (E2)
  misc_feature (43)..(471): Homolog of NCBI NO: 9279589 NR Description: dihydrolipoamide S-acetyltransferase [Arabidopsis
  misc_feature (20)..(471): Homolog of NCBI NO: 15230922 NR Description: dihydrolipoamide S-acetyltransferase
  misc_feature (9)..(472): Homolog of NCBI NO: 25286434 NR Description: protein F12K21.24 [imported] - Arabidopsis
  misc_feature (9)..(472): Homolog of NCBI NO: 15218630 NR Description: dihydrolipoamide S-acetyltransferase, putative
  misc_feature (9)..(472): Homolog of NCBI NO: 21536525 NR Description: dihydrolipoamide S-acetyltransferase, putative
IAINEIRKMSRLLQTPFLPSVSLPTKTRSSVTGFRVKPRIIPIQAKIREIFMPALSSTMTEGKIVSWVKSEGDKLNKGESVVVVESDKADMDVETFYDGYLAAIMVEEGGVAPVGSAIALLAETEDEIADAKAKASGGGGDSKAPPPASPPTATVVAPVAVEKKIAAPPVAIKAVAASAVHPASEGGKRIVASPYAKKLAKELNVELAGLVGSGPMGRIVAKDVEAVAAGGGVQAAVAVKEVVAVPGVELGSVVPFTTMQGAVSRNMVESLAVPTFRVGYTISTDALDALYKKIKSKGVTMTALLAKATALALAKHPVVNSSCRDGNSFVYNSSINVAVAVAIDGGLITPVLQNADKVDIYSLSRKWKELVDKARAKQLQPQEYNTGTFTLSNLGMFGVDRFDAILPPGTGAIMAVGASQPSVVATKDGRIGMKNQMQVNVTADHRVIYGADLAQFLQTLASIIEDPKDLTF

SEQ ID NO: 38965 - protein, 464 aa, Arabidopsis thaliana
  peptide (1)..(464): Ceres Seq. ID no. 12422094
  misc_feature (240)..(464): Pfam Name: 2-oxoacid dehydrogenases acyltransferase Pfam Description: 2-oxoacid dehydrogenases acyltransferase
  misc_feature (39)..(463): Homolog of NCBI NO: 37522138 NR Description: dihydrolipoamide S-acetyltransferase [Gloeobacter
  misc_feature (39)..(463): Homolog of NCBI NO: 17231098 NR Description: dihydrolipoamide S-acetyltransferase [Nostoc sp.
  misc_feature (39)..(463): Homolog of NCBI NO: 23123757 NR Description: hypothetical protein [Nostoc punctiforme]
  misc_feature (39)..(463): Homolog of NCBI NO: 22298842 NR Description: dihydrolipoamide S-acetyltransferase
  misc_feature (39)..(458): Homolog of NCBI NO: 16331208 NR Description: dihydrolipoamide acetyltransferase component (E2)
  misc_feature (35)..(463): Homolog of NCBI NO: 9279589 NR Description: dihydrolipoamide S-acetyltransferase [Arabidopsis
  misc_feature (12)..(463): Homolog of NCBI NO: 15230922 NR Description: dihydrolipoamide S-acetyltransferase
  misc_feature (1)..(464): Homolog of NCBI NO: 25286434 NR Description: protein F12K21.24 [imported] - Arabidopsis
  misc_feature (1)..(464): Homolog of NCBI NO: 15218630 NR Description: dihydrolipoamide S-acetyltransferase, putative
  misc_feature (1)..(464): Homolog of NCBI NO: 21536525 NR Description: dihydrolipoamide S-acetyltransferase, putative
MSRLLQTPFLPSVSLPTKTRSSVTGFRVKPRIIPIQAKIREIFMPALSSTMTEGKIVSWVKSEGDKLNKGESVVVVESDKADMDVETFYDGYLAAIMVEEGGVAPVGSAIALLAETEDEIADAKAKASGGGGDSKAPPPASPPTATVVAPVAVEKKIAAPPVAIKAVAASAVHPASEGGKRIVASPYAKKLAKELNVELAGLVGSGPMGRIVAKDVEAVAAGGGVQAAVAVKEVVAVPGVELGSVVPFTTMQGAVSRNMVESLAVPTFRVGYTISTDALDALYKKIKSKGVTMTALLAKATALALAKHPVVNSSCRDGNSFVYNSSINVAVAVAIDGGLITPVLQNADKVDIYSLSRKWKELVDKARAKQLQPQEYNTGTFTLSNLGMFGVDRFDAILPPGTGAIMAVGASQPSVVATKDGRIGMKNQMQVNVTADHRVIYGADLAQFLQTLASIIEDPKDLTF

SEQ ID NO: 38966 - protein, 421 aa, Arabidopsis thaliana
  peptide (1)..(421): Ceres Seq. ID no. 12422095
  misc_feature (197)..(421): Pfam Name: 2-oxoacid dehydrogenases acyltransferase Pfam Description: 2-oxoacid dehydrogenases acyltransferase
  misc_feature (1)..(420): Homolog of NCBI NO: 37522138 NR Description: dihydrolipoamide S-acetyltransferase [Gloeobacter
  misc_feature (1)..(420): Homolog of NCBI NO: 17231098 NR Description: dihydrolipoamide S-acetyltransferase [Nostoc sp.
  misc_feature (1)..(420): Homolog of NCBI NO: 23123757 NR Description: hypothetical protein [Nostoc punctiforme]
  misc_feature (1)..(420): Homolog of NCBI NO: 22298842 NR Description: dihydrolipoamide S-acetyltransferase
  misc_feature (1)..(415): Homolog of NCBI NO: 16331208 NR Description: dihydrolipoamide acetyltransferase component (E2)
  misc_feature (1)..(420): Homolog of NCBI NO: 9279589 NR Description: dihydrolipoamide S-acetyltransferase [Arabidopsis
  misc_feature (1)..(420): Homolog of NCBI NO: 15230922 NR Description: dihydrolipoamide S-acetyltransferase
  misc_feature (1)..(421): Homolog of NCBI NO: 25286434 NR Description: protein F12K21.24 [imported] - Arabidopsis
  misc_feature (1)..(421): Homolog of NCBI NO: 15218630 NR Description: dihydrolipoamide S-acetyltransferase, putative
  misc_feature (1)..(421): Homolog of NCBI NO: 21536525 NR Description: dihydrolipoamide S-acetyltransferase, putative
MPALSSTMTEGKIVSWVKSEGDKLNKGESVVVVESDKADMDVETFYDGYLAAIMVEEGGVAPVGSAIALLAETEDEIADAKAKASGGGGDSKAPPPASPPTATVVAPVAVEKKIAAPPVAIKAVAASAVHPASEGGKRIVASPYAKKLAKELNVELAGLVGSGPMGRIVAKDVEAVAAGGGVQAAVAVKEVVAVPGVELGSVVPFTTMQGAVSRNMVESLAVPTFRVGYTISTDALDALYKKIKSKGVTMTALLAKATALALAKHPVVNSSCRDGNSFVYNSSINVAVAVAIDGGLITPVLQNADKVDIYSLSRKWKELVDKARAKQLQPQEYNTGTFTLSNLGMFGVDRFDAILPPGTGAIMAVGASQPSVVATKDGRIGMKNQMQVNVTADHRVIYGADLAQFLQTLASIIEDPKDLTF

SEQ ID NO: 38967 - DNA, 1025 bp, Arabidopsis thaliana
  misc_feature (1)..(1025): Ceres Seq. ID no. 12325137
  misc_feature: MA Experiment ID: 108434 Result: Down-regulated in Transcription
  misc_feature: MA Experiment 108434 PARAMETER Experiment Name: At_Root_Tips_cDNA_P Parameter: Tissue Value: Root Tips
  misc_feature: MA Experiment ID: 108595 Result: Down-regulated in Transcription
  misc_feature: MA Experiment 108595 PARAMETER Experiment Name: At_Ler-pi_Ovule_cDNA_P Parameter: Plant Line Value: null
  misc_feature: MA Experiment ID: 20000069 Result: Up-regulated in Transcription
  misc_feature: MA Experiment 20000069 PARAMETER Experiment Name: At_100uM_ABA_Mutants_cDNA_P Parameter: Plant Line Value: CS23
  misc_feature: MA Experiment 20000069 PARAMETER Experiment Name: At_100uM_ABA_Mutants_cDNA_P Parameter: Timepoint (hr) Value: 6
  misc_feature: MA Experiment 20000069 PARAMETER Experiment Name: At_100uM_ABA_Mutants_cDNA_P Parameter: Tissue Value: Aerial
  misc_feature: MA Experiment 20000069 PARAMETER Experiment Name: At_100uM_ABA_Mutants_cDNA_P Parameter: Treatment Value: 100uM ABA vs. No Treatment
  misc_feature: MA Experiment ID: 20000071 Result: Up-regulated in Transcription
  misc_feature: MA Experiment 20000071 PARAMETER Experiment Name: At_100uM_ABA_Mutants_cDNA_P Parameter: Plant Line Value: CS8104
  misc_feature: MA Experiment 20000071 PARAMETER Experiment Name: At_100uM_ABA_Mutants_cDNA_P Parameter: Timepoint (hr) Value: 6
  misc_feature: MA Experiment 20000071 PARAMETER Experiment Name: At_100uM_ABA_Mutants_cDNA_P Parameter: Tissue Value: Aerial
  misc_feature: MA Experiment 20000071 PARAMETER Experiment Name: At_100uM_ABA_Mutants_cDNA_P Parameter: Treatment Value: 100uM ABA vs. No Treatment
  misc_feature: MA Experiment ID: 20000087 Result: Up-regulated in Transcription
  misc_feature: MA Experiment 20000087 PARAMETER Experiment Name: At_100uM_ABA_Mutants_cDNA_P Parameter: Plant Line Value: WS
  misc_feature: MA Experiment 20000087 PARAMETER Experiment Name: At_100uM_ABA_Mutants_cDNA_P Parameter: Timepoint (hr) Value: 6
  misc_feature: MA Experiment 20000087 PARAMETER Experiment Name: At_100uM_ABA_Mutants_cDNA_P Parameter: Tissue Value: Aerial
  misc_feature: MA Experiment 20000087 PARAMETER Experiment Name: At_100uM_ABA_Mutants_cDNA_P Parameter: Treatment Value: 100uM ABA vs. No Treatment
  misc_feature: MA Experiment ID: 20000112 Result: Up-regulated in Transcription
  misc_feature: MA Experiment 20000112 PARAMETER Experiment Name: At_42deg_Heat_cDNA_P Parameter: Temperature (deg C) Value: 42 vs. 22
  misc_feature: MA Experiment 20000112 PARAMETER Experiment Name: At_42deg_Heat_cDNA_P Parameter: Timepoint (hr) Value: 2
  misc_feature: MA Experiment 20000112 PARAMETER Experiment Name: At_42deg_Heat_cDNA_P Parameter: Tissue Value: Aerial
  misc_feature: MA Experiment ID: 20000117 Result: Up-regulated in Transcription
  misc_feature: MA Experiment 20000117 PARAMETER Experiment Name: At_100uM_ABA_Mutants_cDNA_P Parameter: Plant Line Value: Columbia
  misc_feature: MA Experiment 20000117 PARAMETER Experiment Name: At_100uM_ABA_Mutants_cDNA_P Parameter: Timepoint (hr) Value: 6
  misc_feature: MA Experiment 20000117 PARAMETER Experiment Name: At_100uM_ABA_Mutants_cDNA_P Parameter: Tissue Value: Aerial
  misc_feature: MA Experiment 20000117 PARAMETER Experiment Name: At_100uM_ABA_Mutants_cDNA_P Parameter: Treatment Value: 100uM ABA vs. No Treatment
  misc_feature: MA Experiment ID: 20000794 Result: Up-regulated in Transcription
  misc_feature: MA Experiment 20000794 PARAMETER Experiment Name: At_Petals_P Parameter: Age (day) Value: 23-25 days
  misc_feature: MA Experiment 20000794 PARAMETER Experiment Name: At_Petals_P Parameter: Plant Line Value: WS
  misc_feature: MA Experiment 20000794 PARAMETER Experiment Name: At_Petals_P Parameter: Tissue Value: Petals vs. Whole plant
aaaaataatagtcacaaaagaaattagaagacagatcaggaacagctagaagactcttcagggcacagagaaaacacccaccacaccgtcttcttcaacaaaatttaccaccagagatcgcagatatttcttcattctatctctctcttttagatccgattcgatgccgtcccgtagacgtaccctcctcaaggtcatcatcctcggtgatagcggggtgggaaaaacctctttgatgaatcagtatgttaataaaaagttcagcaaccagtacaaggcaaccattggagccgacttcttgaccaaggaagtacagtttgaagatcgacttttcactttacagatctgggatacagctggacaggaaaggtttcagagccttggtgtagccttttaccgtggtgctgattgctgtgttcttgtatatgatgtcaattccatgaaatcatttgaaaatctgaacaactggagggaagaatttctgatccaggcgagtccatcagatccagagaattttccatttgttcttatcggaaacaaggttgacgtggatgatggaaacagcagagtggtttcagagaaaaaggctaaagcttggtgtgcttcaaaggggaacattccttactttgagacctctgccaaggtaggtactaatgtggaggaagctttccaatgcattgccaaggacgcattgaagagcggagaagaagaagaactatacttgccagacacaatcgatgtagggacgagcaatcaacagaggtctacagggtgtgaatgctaaggagtatcaccagaaggaaacgaggcctctcctcccattatctcttttcgcaagttatgtctacattattactatgttgtaaattttttcttttgtgtggaaaagggatgagaacaaaaaaagaaggaaccctaaaaaaaaaagagatttgtttagtgttatttgtggggattttcatttatcatgctagctaaataaatactcactttcatcttaattttaagtgatgtttcttgtttgc

SEQ ID NO: 38968 - protein, 206 aa, Arabidopsis thaliana
  peptide (1)..(206): Ceres Seq. ID no. 12325138
  misc_feature (10)..(178): Pfam Name: Ras family Pfam Description: Ras family
  misc_feature (1)..(206): Homolog of NCBI NO: 3914550 NR Description: RAS-RELATED PROTEIN RAB7
  misc_feature (1)..(206): Homolog of NCBI NO: 1370188 NR Description: RAB7D [Lotus japonicus]
  misc_feature (1)..(204): Homolog of NCBI NO: 3914557 NR Description: RAS-RELATED PROTEIN RAB7 (POSSIBLE
  misc_feature (1)..(206): Homolog of NCBI NO: 7438408 NR Description: GTP-binding protein Rab7b - common tobacco
  misc_feature (1)..(206): Homolog of NCBI NO: 15222098 NR Description: small GTP-binding protein, putative
  misc_feature (1)..(206): Homolog of NCBI NO: 400923 NR Description: RAS-RELATED PROTEIN RAB7
  misc_feature (1)..(206): Homolog of NCBI NO: 34484308 NR Description: putative GTP-binding protein [Cucumis sativus]
  misc_feature (1)..(206): Homolog of NCBI NO: 1370186 NR Description: RAB7C [Lotus japonicus]
  misc_feature (1)..(206): Homolog of NCBI NO: 21536526 NR Description: GTP binding protein, putative [Arabidopsis
  misc_feature (1)..(206): Homolog of NCBI NO: 15230211 NR Description: GTP-binding protein, putative
MPSRRRTLLKVIILGDSGVGKTSLMNQYVNKKFSNQYKATIGADFLTKEVQFEDRLFTLQIWDTAGQERFQSLGVAFYRGADCCVLVYDVNSMKSFENLNNWREEFLIQASPSDPENFPFVLIGNKVDVDDGNSRVVSEKKAKAWCASKGNIPYFETSAKVGTNVEEAFQCIAKDALKSGEEEELYLPDTIDVGTSNQQRSTGCEC

SEQ ID NO: 38969 - protein, 182 aa, Arabidopsis thaliana
  peptide (1)..(182): Ceres Seq. ID no. 12325139
  misc_feature (1)..(154): Pfam Name: Ras family Pfam Description: Ras family
  misc_feature (1)..(182): Homolog of NCBI NO: 3914550 NR Description: RAS-RELATED PROTEIN RAB7
  misc_feature (1)..(182): Homolog of NCBI NO: 1370188 NR Description: RAB7D [Lotus japonicus]
  misc_feature (1)..(180): Homolog of NCBI NO: 3914557 NR Description: RAS-RELATED PROTEIN RAB7 (POSSIBLE
  misc_feature (1)..(182): Homolog of NCBI NO: 7438408 NR Description: GTP-binding protein Rab7b - common tobacco
  misc_feature (1)..(182): Homolog of NCBI NO: 15222098 NR Description: small GTP-binding protein, putative
  misc_feature (1)..(182): Homolog of NCBI NO: 400923 NR Description: RAS-RELATED PROTEIN RAB7
  misc_feature (1)..(182): Homolog of NCBI NO: 34484308 NR Description: putative GTP-binding protein [Cucumis sativus]
  misc_feature (1)..(182): Homolog of NCBI NO: 1370186 NR Description: RAB7C [Lotus japonicus]
  misc_feature (1)..(182): Homolog of NCBI NO: 21536526 NR Description: GTP binding protein, putative [Arabidopsis
  misc_feature (1)..(182): Homolog of NCBI NO: 15230211 NR Description: GTP-binding protein, putative
MNQYVNKKFSNQYKATIGADFLTKEVQFEDRLFTLQIWDTAGQERFQSLGVAFYRGADCCVLVYDVNSMKSFENLNNWREEFLIQASPSDPENFPFVLIGNKVDVDDGNSRVVSEKKAKAWCASKGNIPYFETSAKVGTNVEEAFQCIAKDALKSGEEEELYLPDTIDVGTSNQQRSTGCEC

SEQ ID NO: 38970 - protein, 114 aa, Arabidopsis thaliana
  peptide (1)..(114): Ceres Seq. ID no. 12325140
  misc_feature (1)..(86): Pfam Name: Ras family Pfam Description: Ras family
  misc_feature (1)..(114): Homolog of NCBI NO: 3914550 NR Description: RAS-RELATED PROTEIN RAB7
  misc_feature (1)..(114): Homolog of NCBI NO: 1370188 NR Description: RAB7D [Lotus japonicus]
  misc_feature (1)..(112): Homolog of NCBI NO: 3914557 NR Description: RAS-RELATED PROTEIN RAB7 (POSSIBLE
  misc_feature (1)..(114): Homolog of NCBI NO: 7438408 NR Description: GTP-binding protein Rab7b - common tobacco
  misc_feature (1)..(114): Homolog of NCBI NO: 15222098 NR Description: small GTP-binding protein, putative
  misc_feature (1)..(114): Homolog of NCBI NO: 400923 NR Description: RAS-RELATED PROTEIN RAB7
  misc_feature (1)..(114): Homolog of NCBI NO: 34484308 NR Description: putative GTP-binding protein [Cucumis sativus]
  misc_feature (1)..(114): Homolog of NCBI NO: 1370186 NR Description: RAB7C [Lotus japonicus]
  misc_feature (1)..(114): Homolog of NCBI NO: 21536526 NR Description: GTP binding protein, putative [Arabidopsis
  misc_feature (1)..(114): Homolog of NCBI NO: 15230211 NR Description: GTP-binding protein, putative
MKSFENLNNWREEFLIQASPSDPENFPFVLIGNKVDVDDGNSRVVSEKKAKAWCASKGNIPYFETSAKVGTNVEEAFQCIAKDALKSGEEEELYLPDTIDVGTSNQQRSTGCEC

SEQ ID NO: 38971 - DNA, 336 bp, Arabidopsis thaliana
  misc_feature (1)..(336): Ceres Seq. ID no. 13487990
  misc_feature: MA Experiment ID: 108434 Result: Down-regulated in Transcription
  misc_feature: MA Experiment 108434 PARAMETER Experiment Name: At_Root_Tips_cDNA_P Parameter: Tissue Value: Root Tips
  misc_feature: MA Experiment ID: 108462 Result: Down-regulated in Transcription
  misc_feature: MA Experiment 108462 PARAMETER Experiment Name: At_Germinating_Seeds_cDNA_P Parameter: Age (day) Value: 2 vs. 0
  misc_feature: MA Experiment 108462 PARAMETER Experiment Name: At_Germinating_Seeds_cDNA_P Parameter: Tissue Value: Germinating Seeds
  misc_feature: MA Experiment ID: 108501 Result: Down-regulated in Transcription
  misc_feature: MA Experiment 108501 PARAMETER Experiment Name: At_ap2_floral_buds_cDNA_P Parameter: Plant Line Value: ap2 (Ler.)
  misc_feature: MA Experiment 108501 PARAMETER Experiment Name: At_ap2_floral_buds_cDNA_P Parameter: Tissue Value: Closed Flower
  misc_feature: MA Experiment ID: 108572 Result: Up-regulated in Transcription
  misc_feature: MA Experiment 108572 PARAMETER Experiment Name: At_Drought_cDNA_P Parameter: Timepoint (hr) Value: 1
  misc_feature: MA Experiment 108572 PARAMETER Experiment Name: At_Drought_cDNA_P Parameter: Tissue Value: Aerial
  misc_feature: MA Experiment 108572 PARAMETER Experiment Name: At_Drought_cDNA_P Parameter: Treatment Value: Drought vs. No Drought
  misc_feature: MA Experiment ID: 108574 Result: Down-regulated in Transcription
  misc_feature: MA Experiment 108574 PARAMETER Experiment Name: At_Wounding__cDNA_P Parameter: Timepoint (hr) Value: 1
  misc_feature: MA Experiment 108574 PARAMETER Experiment Name: At_Wounding__cDNA_P Parameter: Tissue Value: Aerial
  misc_feature: MA Experiment 108574 PARAMETER Experiment Name: At_Wounding__cDNA_P Parameter: Treatment Value: Wounding vs. No Wounding
  misc_feature: MA Experiment ID: 108576 Result: Up-regulated in Transcription
  misc_feature: MA Experiment 108576 PARAMETER Experiment Name: At_42deg_Heat_cDNA_P Parameter: Temperature (deg C) Value: 42 vs. 22
  misc_feature: MA Experiment 108576 PARAMETER Experiment Name: At_42deg_Heat_cDNA_P Parameter: Timepoint (hr) Value: 1
  misc_feature: MA Experiment 108576 PARAMETER Experiment Name: At_42deg_Heat_cDNA_P Parameter: Tissue Value: Aerial
  misc_feature: MA Experiment ID: 108579 Result: Down-regulated in Transcription
  misc_feature: MA Experiment 108579 PARAMETER Experiment Name: At_4deg_Cold_cDNA_P Parameter: Temperature (deg C) Value: 4 vs. 22
  misc_feature: MA Experiment 108579 PARAMETER Experiment Name: At_4deg_Cold_cDNA_P Parameter: Timepoint (hr) Value: 6
  misc_feature: MA Experiment 108579 PARAMETER Experiment Name: At_4deg_Cold_cDNA_P Parameter: Tissue Value: Aerial
  misc_feature: MA Experiment ID: 20000087 Result: Down-regulated in Transcription
  misc_feature: MA Experiment 20000087 PARAMETER Experiment Name: At_100uM_ABA_Mutants_cDNA_P Parameter: Plant Line Value: WS
  misc_feature: MA Experiment 20000087 PARAMETER Experiment Name: At_100uM_ABA_Mutants_cDNA_P Parameter: Timepoint (hr) Value: 6
  misc_feature: MA Experiment 20000087 PARAMETER Experiment Name: At_100uM_ABA_Mutants_cDNA_P Parameter: Tissue Value: Aerial
  misc_feature: MA Experiment 20000087 PARAMETER Experiment Name: At_100uM_ABA_Mutants_cDNA_P Parameter: Treatment Value: 100uM ABA vs. No Treatment
  misc_feature: MA Experiment ID: 20000088 Result: Down-regulated in Transcription
  misc_feature: MA Experiment 20000088 PARAMETER Experiment Name: At_100uM_ABA_Mutants_cDNA_P Parameter: Plant Line Value: Landsberg
  misc_feature: MA Experiment 20000088 PARAMETER Experiment Name: At_100uM_ABA_Mutants_cDNA_P Parameter: Timepoint (hr) Value: 6
  misc_feature: MA Experiment 20000088 PARAMETER Experiment Name: At_100uM_ABA_Mutants_cDNA_P Parameter: Tissue Value: Aerial
  misc_feature: MA Experiment 20000088 PARAMETER Experiment Name: At_100uM_ABA_Mutants_cDNA_P Parameter: Treatment Value: 100uM ABA vs. No Treatment
  misc_feature: MA Experiment ID: 20000111 Result: Up-regulated in Transcription
  misc_feature: MA Experiment 20000111 PARAMETER Experiment Name: At_42deg_Heat_cDNA_P Parameter: Temperature (deg C) Value: 42 vs. 22
  misc_feature: MA Experiment 20000111 PARAMETER Experiment Name: At_42deg_Heat_cDNA_P Parameter: Timepoint (hr) Value: 6
  misc_feature: MA Experiment 20000111 PARAMETER Experiment Name: At_42deg_Heat_cDNA_P Parameter: Tissue Value: Aerial
  misc_feature: MA Experiment ID: 20000113 Result: Up-regulated in Transcription
  misc_feature: MA Experiment 20000113 PARAMETER Experiment Name: At_42deg_Heat_cDNA_P Parameter: Temperature (deg C) Value: 42 vs. 22
  misc_feature: MA Experiment 20000113 PARAMETER Experiment Name: At_42deg_Heat_cDNA_P Parameter: Timepoint (hr) Value: 8
  misc_feature: MA Experiment 20000113 PARAMETER Experiment Name: At_42deg_Heat_cDNA_P Parameter: Tissue Value: Aerial
  misc_feature: MA Experiment ID: 20000144 Result: Up-regulated in Transcription
  misc_feature: MA Experiment 20000144 PARAMETER Experiment Name: At_42deg_Heat_cDNA_P Parameter: Temperature (deg C) Value: 42 vs. 22
  misc_feature: MA Experiment 20000144 PARAMETER Experiment Name: At_42deg_Heat_cDNA_P Parameter: Timepoint (hr) Value: 1
  misc_feature: MA Experiment 20000144 PARAMETER Experiment Name: At_42deg_Heat_cDNA_P Parameter: Tissue Value: Aerial
  misc_feature: MA Experiment ID: 20000224 Result: Down-regulated in Transcription
aaagattcttattacagcgacacacaactcttttccatttagatttttgattttttttggttctctaaaggaggagagaaatgttggctatcttccacgaggcgtttgctcatccgccggaggaactcaacagtccggcatctgagaaatgctctaaacaaccaaaacttccagaagaaaccctaaatgatttcttattacgttaccctctcaacactttctccatgtctttcggacaagctgctgttcttgcttacgttcgtccctctgcttccttctccatccaccagaggttgttttgtggaagatagccaacatttctctcctcctttagag

SEQ ID NO: 38972 - protein, 76 aa, Arabidopsis thaliana
  peptide (1)..(76): Ceres Seq. ID no. 13487991
  misc_feature (1)..(75): Homolog of NCBI NO: 18416995 NR Description: expressed protein [Arabidopsis thaliana]
  misc_feature (1)..(75): Homolog of NCBI NO: 7486256 NR Description: hypothetical protein F27G19.50 - Arabidopsis
MLAIFHEAFAHPPEELNSPASEKCSKQPKLPEETLNDFLLRYPLNTFSMSFGQAAVLAYVRPSASFSIHQRLFCGR

SEQ ID NO: 38973 - protein, 50 aa, Arabidopsis thaliana
  peptide (1)..(50): Ceres Seq. ID no. 13487992
MISYYVTLSTLSPCLSDKLLFLLTFVPLLPSPSTRGCFVEDSQHFSPPLE

SEQ ID NO: 38974 - protein, 47 aa, Arabidopsis thaliana
  peptide (1)..(47): Ceres Seq. ID no. 13487993
KILITATHNSFPFRFLIFFGSLKEERNVGYLPRGVCSSAGGTQQSGI

SEQ ID NO: 38975 - DNA, 2001 bp, Arabidopsis thaliana
  misc_feature (1)..(2001): Ceres Seq. ID no. 13591393
  misc_feature: MA Experiment ID: 20000439 Result: Down-regulated in Transcription
  misc_feature: MA Experiment 20000439 PARAMETER Experiment Name: At_Roots__P Parameter: Age (day) Value: 14 vs. 21
  misc_feature: MA Experiment 20000439 PARAMETER Experiment Name: At_Roots__P Parameter: Organism Value: A. thaliana
  misc_feature: MA Experiment 20000439 PARAMETER Experiment Name: At_Roots__P Parameter: Tissue Value: Roots vs. Whole Plant
  misc_feature: MA Experiment ID: 20000709 Result: Up-regulated in Transcription
  misc_feature: MA Experiment 20000709 PARAMETER Experiment Name: At_15mM_NH4NO3_L-to-H_P Parameter: Age (hr) Value: 14
  misc_feature: MA Experiment 20000709 PARAMETER Experiment Name: At_15mM_NH4NO3_L-to-H_P Parameter: Organism Value: A. thaliana
  misc_feature: MA Experiment 20000709 PARAMETER Experiment Name: At_15mM_NH4NO3_L-to-H_P Parameter: Plant Line Value: WS
  misc_feature: MA Experiment 20000709 PARAMETER Experiment Name: At_15mM_NH4NO3_L-to-H_P Parameter: Timepoint (hr) Value: 4
  misc_feature: MA Experiment 20000709 PARAMETER Experiment Name: At_15mM_NH4NO3_L-to-H_P Parameter: Tissue Value: Aerial
  misc_feature: MA Experiment 20000709 PARAMETER Experiment Name: At_15mM_NH4NO3_L-to-H_P Parameter: Treatment Value: 15mM NH4NO3 vs. 30mM Mannitol
  misc_feature: MA Experiment ID: 20001557 Result: Up-regulated in Transcription
  misc_feature: MA Experiment 20001557 PARAMETER Experiment Name: At_Drought_Soil_Dry_P Parameter: Age (day) Value: 27
  misc_feature: MA Experiment 20001557 PARAMETER Experiment Name: At_Drought_Soil_Dry_P Parameter: Organism Value: A. thaliana
  misc_feature: MA Experiment 20001557 PARAMETER Experiment Name: At_Drought_Soil_Dry_P Parameter: Plant Line Value: WS
  misc_feature: MA Experiment 20001557 PARAMETER Experiment Name: At_Drought_Soil_Dry_P Parameter: Post Timepoint (hr) Value: 3
  misc_feature: MA Experiment 20001557 PARAMETER Experiment Name: At_Drought_Soil_Dry_P Parameter: Post-Treatment Value: Re-Water vs. No Drought
  misc_feature: MA Experiment 20001557 PARAMETER Experiment Name: At_Drought_Soil_Dry_P Parameter: Timepoint (day) Value: 13
  misc_feature: MA Experiment 20001557 PARAMETER Experiment Name: At_Drought_Soil_Dry_P Parameter: Treatment Value: Drought vs. No Drought
atgtcttccatcaatttatcctcatcatctccttccaccatctctctttcccgctcaagactaagccaaagctctactacattactccatggactacatcgtgttactttaccatctaaccatccattgtcaaccttttccattaaaaccaatactggaaaagttaaggctgcagtgatctctagagaagatgatctgctctcattcaccaacggaaacactcctctctcaaatgggtctctcattgatgatcggaccgaagagccattagaggctgattcggtttcacttggaacacttgctgctgattctgctcctgcaccagccaatggttttgttgctgaagatgatgactttgagttggatttaccaactcctggtttctcttctatccctgaggccattgaagatatacgccaaggaaagcttgtggtggttgtggatgatgaagatagggaaaatgaaggggatttggtgatggctgctcagttagcaacacctgaagctatggcttttattgtgagacatggaactgggatagtttgtgtgagcatgaaagaagatgatctcgagaggttgcaccttcctctaatggtgaatcagaaggaaaacgaagaaaagctctctactgcatttacagtgactgtggatgcaaaacatggtacaacaacgggagtatcagctcgtgacagggcaacaaccatattgtctcttgcatcaagagattcaaagcctgaggatttcaatcgtccaggtcatatcttcccactgaagtatcgggaaggtggggttctgaaaagggctggacacactgaagcatctgttgatctcactgttttagctggactggatcctgttggagtactttgtgaaattgttgatgatgatggttccatggctagattaccaaaacttcgtgaatttgccgccgagaacaacctgaaagttgtttccatcgcagatttgatcaggtatagaagaaagagagataaattagtggaacgtgcttctgcggctcggatcccaacaatgtggggacctttcactgcttactgctataggtccatattagacggaatagagcacatagcaatggttaagggtgagattggtgacggtcaagacattctcgtgagggttcattctgaatgtctaacaggggacatatttgggtctgcaaggtgtgattgcgggaaccagctagcactctcgatgcagcagatcgaggctactggtcgcggtgtgctggtttacctacgtggacatgaaggaagagggatcggtttaggacacaagcttcgagcttacaatctgcaagatgctggtcgagacacggttgaagctaatgaggaattaggacttcctgttgattctagagagtatggaattggtgcacagataataagggatttaggtgttaggacaatgaagctgatgacaaataatcccgcaaagtatgttggtttgaagggatatggattagccattgttgggagagtccctctattgagtcttatcacgaaggagaataagagatatctggagacaaagcggaccaagatgggtcacatgtatggcttgaagttcaaaggggatgttgtggagaagattgagtctgaatctgagtcctaagcttaaaaaccaggacgaaccgaatggaatcaagaactatagatataatacttcacaaaaaacaaggaaagaaattgacacagaagaagaggaaaaagacatttgatctgtctgagaaacttgattagattggtttatgttctaatctaatctgatttgatttttttttattttgtctacgattcttgagttacgaaatgttcatcatttgttacttcttgttgtcgggattgagtagttgcatttttttagttgtggagctgtgacaaagaggccagctagtgtgtggaatgtggatcatcatcctttggttgattccttgtagaatcctttttgtaaacatttaaactataataaagtgttatgatt

SEQ ID NO: 38976 - protein, 543 aa, Arabidopsis thaliana
  peptide (1)..(543): Ceres Seq. ID no. 13591394
  misc_feature (128)..(525): Homolog of NCBI NO: 15605862 NR Description: GTP cyclohydrolase II [Aquifex aeolicus]
  misc_feature (124)..(523): Homolog of NCBI NO: 23018011 NR Description: hypothetical protein [Thermobifida fusca]
  misc_feature (299)..(543): Homolog of NCBI NO: 1084339 NR Description: GTP cyclohydrolase II (EC 3.5.4.25) - Arabidopsis
  misc_feature (93)..(525): Homolog of NCBI NO: 18424277 NR Description: GTP cyclohydrolase II /
  misc_feature (96)..(536): Homolog of NCBI NO: 29367375 NR Description: GTP cyclohydrolase
  misc_feature (59)..(504): Homolog of NCBI NO: 25290324 NR Description: probable GTP cyclohydrolase [imported] -
  misc_feature (55)..(504): Homolog of NCBI NO: 30681714 NR Description: GTP cyclohydrolase -related [Arabidopsis thaliana]
  misc_feature (1)..(527): Homolog of NCBI NO: 7436011 NR Description: GTP cyclohydrolase II (EC 3.5.4.25) / 3,
  misc_feature (160)..(543): Homolog of NCBI NO: 30697989 NR Description: GTP cyclohydrolase II
  misc_feature (1)..(543): Homolog of NCBI NO: 27735197 NR Description: Riboflavin biosynthesis protein ribA
  misc_feature (128)..(525): Homolog of NCBI NO: 15605862 NR Description: GTP cyclohydrolase II [Aquifex aeolicus]
  misc_feature (124)..(523): Homolog of NCBI NO: 23018011 NR Description: hypothetical protein [Thermobifida fusca]
  misc_feature (299)..(543): Homolog of NCBI NO: 1084339 NR Description: GTP cyclohydrolase II (EC 3.5.4.25) - Arabidopsis
  misc_feature (93)..(525): Homolog of NCBI NO: 18424277 NR Description: GTP cyclohydrolase II /
  misc_feature (96)..(536): Homolog of NCBI NO: 29367375 NR Description: GTP cyclohydrolase
  misc_feature (59)..(504): Homolog of NCBI NO: 25290324 NR Description: probable GTP cyclohydrolase [imported] -
  misc_feature (55)..(504): Homolog of NCBI NO: 30681714 NR Description: GTP cyclohydrolase -related [Arabidopsis thaliana]
  misc_feature (1)..(527): Homolog of NCBI NO: 7436011 NR Description: GTP cyclohydrolase II (EC 3.5.4.25) / 3,
  misc_feature (160)..(543): Homolog of NCBI NO: 30697989 NR Description: GTP cyclohydrolase II
  misc_feature (1)..(543): Homolog of NCBI NO: 27735197 NR Description: Riboflavin biosynthesis protein ribA
MSSINLSSSSPSTISLSRSRLSQSSTTLLHGLHRVTLPSNHPLSTFSIKTNTGKVKAAVISREDDLLSFTNGNTPLSNGSLIDDRTEEPLEADSVSLGTLAADSAPAPANGFVAEDDDFELDLPTPGFSSIPEAIEDIRQGKLVVVVDDEDRENEGDLVMAAQLATPEAMAFIVRHGTGIVCVSMKEDDLERLHLPLMVNQKENEEKLSTAFTVTVDAKHGTTTGVSARDRATTILSLASRDSKPEDFNRPGHIFPLKYREGGVLKRAGHTEASVDLTVLAGLDPVGVLCEIVDDDGSMARLPKLREFAAENNLKVVSIADLIRYRRKRDKLVERASAARIPTMWGPFTAYCYRSILDGIEHIAMVKGEIGDGQDILVRVHSECLTGDIFGSARCDCGNQLALSMQQIEATGRGVLVYLRGHEGRGIGLGHKLRAYNLQDAGRDTVEANEELGLPVDSREYGIGAQIIRDLGVRTMKLMTNNPAKYVGLKGYGLAIVGRVPLLSLITKENKRYLETKRTKMGHMYGLKFKGDVVEKIESESES

SEQ ID NO: 38977 - protein, 384 aa, Arabidopsis thaliana
  peptide (1)..(384): Ceres Seq. ID no. 13591395
  misc_feature (1)..(366): Homolog of NCBI NO: 15605862 NR Description: GTP cyclohydrolase II [Aquifex aeolicus]
  misc_feature (1)..(364): Homolog of NCBI NO: 23018011 NR Description: hypothetical protein [Thermobifida fusca]
  misc_feature (140)..(384): Homolog of NCBI NO: 1084339 NR Description: GTP cyclohydrolase II (EC 3.5.4.25) - Arabidopsis
  misc_feature (1)..(366): Homolog of NCBI NO: 18424277 NR Description: GTP cyclohydrolase II /
  misc_feature (1)..(377): Homolog of NCBI NO: 29367375 NR Description: GTP cyclohydrolase
  misc_feature (1)..(345): Homolog of NCBI NO: 25290324 NR Description: probable GTP cyclohydrolase [imported] -
  misc_feature (1)..(345): Homolog of NCBI NO: 30681714 NR Description: GTP cyclohydrolase -related [Arabidopsis thaliana]
  misc_feature (1)..(368): Homolog of NCBI NO: 7436011 NR Description: GTP cyclohydrolase II (EC 3.5.4.25) / 3,
  misc_feature (1)..(384): Homolog of NCBI NO: 30697989 NR Description: GTP cyclohydrolase II
  misc_feature (1)..(384): Homolog of NCBI NO: 27735197 NR Description: Riboflavin biosynthesis protein ribA
  misc_feature (1)..(366): Homolog of NCBI NO: 15605862 NR Description: GTP cyclohydrolase II [Aquifex aeolicus]
  misc_feature (1)..(364): Homolog of NCBI NO: 23018011 NR Description: hypothetical protein [Thermobifida fusca]
  misc_feature (140)..(384): Homolog of NCBI NO: 1084339 NR Description: GTP cyclohydrolase II (EC 3.5.4.25) - Arabidopsis
  misc_feature (1)..(366): Homolog of NCBI NO: 18424277 NR Description: GTP cyclohydrolase II /
  misc_feature (1)..(377): Homolog of NCBI NO: 29367375 NR Description: GTP cyclohydrolase
  misc_feature (1)..(345): Homolog of NCBI NO: 25290324 NR Description: probable GTP cyclohydrolase [imported] -
  misc_feature (1)..(345): Homolog of NCBI NO: 30681714 NR Description: GTP cyclohydrolase -related [Arabidopsis thaliana]
  misc_feature (1)..(368): Homolog of NCBI NO: 7436011 NR Description: GTP cyclohydrolase II (EC 3.5.4.25) / 3,
  misc_feature (1)..(384): Homolog of NCBI NO: 30697989 NR Description: GTP cyclohydrolase II
  misc_feature (1)..(384): Homolog of NCBI NO: 27735197 NR Description: Riboflavin biosynthesis protein ribA
MAAQLATPEAMAFIVRHGTGIVCVSMKEDDLERLHLPLMVNQKENEEKLSTAFTVTVDAKHGTTTGVSARDRATTILSLASRDSKPEDFNRPGHIFPLKYREGGVLKRAGHTEASVDLTVLAGLDPVGVLCEIVDDDGSMARLPKLREFAAENNLKVVSIADLIRYRRKRDKLVERASAARIPTMWGPFTAYCYRSILDGIEHIAMVKGEIGDGQDILVRVHSECLTGDIFGSARCDCGNQLALSMQQIEATGRGVLVYLRGHEGRGIGLGHKLRAYNLQDAGRDTVEANEELGLPVDSREYGIGAQIIRDLGVRTMKLMTNNPAKYVGLKGYGLAIVGRVPLLSLITKENKRYLETKRTKMGHMYGLKFKGDVVEKIESESES

SEQ ID NO: 38978 - protein, 374 aa, Arabidopsis thaliana
  peptide (1)..(374): Ceres Seq. ID no. 13591396
  misc_feature (1)..(356): Homolog of NCBI NO: 15605862 NR Description: GTP cyclohydrolase II [Aquifex aeolicus]
  misc_feature (1)..(354): Homolog of NCBI NO: 23018011 NR Description: hypothetical protein [Thermobifida fusca]
  misc_feature (130)..(374): Homolog of NCBI NO: 1084339 NR Description: GTP cyclohydrolase II (EC 3.5.4.25) - Arabidopsis
  misc_feature (1)..(356): Homolog of NCBI NO: 18424277 NR Description: GTP cyclohydrolase II /
  misc_feature (1)..(367): Homolog of NCBI NO: 29367375 NR Description: GTP cyclohydrolase
  misc_feature (1)..(335): Homolog of NCBI NO: 25290324 NR Description: probable GTP cyclohydrolase [imported] -
  misc_feature (1)..(335): Homolog of NCBI NO: 30681714 NR Description: GTP cyclohydrolase -related [Arabidopsis thaliana]
  misc_feature (1)..(358): Homolog of NCBI NO: 7436011 NR Description: GTP cyclohydrolase II (EC 3.5.4.25) / 3,
  misc_feature (1)..(374): Homolog of NCBI NO: 30697989 NR Description: GTP cyclohydrolase II
  misc_feature (1)..(374): Homolog of NCBI NO: 27735197 NR Description: Riboflavin biosynthesis protein ribA
  misc_feature (1)..(356): Homolog of NCBI NO: 15605862 NR Description: GTP cyclohydrolase II [Aquifex aeolicus]
  misc_feature (1)..(354): Homolog of NCBI NO: 23018011 NR Description: hypothetical protein [Thermobifida fusca]
  misc_feature (130)..(374): Homolog of NCBI NO: 1084339 NR Description: GTP cyclohydrolase II (EC 3.5.4.25) - Arabidopsis
  misc_feature (1)..(356): Homolog of NCBI NO: 18424277 NR Description: GTP cyclohydrolase II /
  misc_feature (1)..(367): Homolog of NCBI NO: 29367375 NR Description: GTP cyclohydrolase
  misc_feature (1)..(335): Homolog of NCBI NO: 25290324 NR Description: probable GTP cyclohydrolase [imported] -
  misc_feature (1)..(335): Homolog of NCBI NO: 30681714 NR Description: GTP cyclohydrolase -related [Arabidopsis thaliana]
  misc_feature (1)..(358): Homolog of NCBI NO: 7436011 NR Description: GTP cyclohydrolase II (EC 3.5.4.25) / 3,
  misc_feature (1)..(374): Homolog of NCBI NO: 30697989 NR Description: GTP cyclohydrolase II
  misc_feature (1)..(374): Homolog of NCBI NO: 27735197 NR Description: Riboflavin biosynthesis protein ribA
MAFIVRHGTGIVCVSMKEDDLERLHLPLMVNQKENEEKLSTAFTVTVDAKHGTTTGVSARDRATTILSLASRDSKPEDFNRPGHIFPLKYREGGVLKRAGHTEASVDLTVLAGLDPVGVLCEIVDDDGSMARLPKLREFAAENNLKVVSIADLIRYRRKRDKLVERASAARIPTMWGPFTAYCYRSILDGIEHIAMVKGEIGDGQDILVRVHSECLTGDIFGSARCDCGNQLALSMQQIEATGRGVLVYLRGHEGRGIGLGHKLRAYNLQDAGRDTVEANEELGLPVDSREYGIGAQIIRDLGVRTMKLMTNNPAKYVGLKGYGLAIVGRVPLLSLITKENKRYLETKRTKMGHMYGLKFKGDVVEKIESESES

SEQ ID NO: 38979 - DNA, 1527 bp, Arabidopsis thaliana
  misc_feature (1)..(1527): Ceres Seq. ID no. 12482552
  misc_feature: MA Experiment ID: 20000265 Result: Up-regulated in Transcription
  misc_feature: MA Experiment 20000265 PARAMETER Experiment Name: At_Open_Flower_P Parameter: Age (day) Value: 21
  misc_feature: MA Experiment 20000265 PARAMETER Experiment Name: At_Open_Flower_P Parameter: Plant Line Value: WS
  misc_feature: MA Experiment 20000265 PARAMETER Experiment Name: At_Open_Flower_P Parameter: Tissue Value: Closed Flower vs. Whole Plant
  misc_feature: MA Experiment ID: 20000286 Result: Up-regulated in Transcription
  misc_feature: MA Experiment 20000286 PARAMETER Experiment Name: At_Open_Flower_P Parameter: Age (day) Value: 21
  misc_feature: MA Experiment 20000286 PARAMETER Experiment Name: At_Open_Flower_P Parameter: Plant Line Value: WS
  misc_feature: MA Experiment 20000286 PARAMETER Experiment Name: At_Open_Flower_P Parameter: Tissue Value: Half Open vs. Whole Plant
  misc_feature: MA Experiment ID: 20000437 Result: Up-regulated in Transcription
  misc_feature: MA Experiment 20000437 PARAMETER Experiment Name: At_Drought_P Parameter: Age (day) Value: 8
  misc_feature: MA Experiment 20000437 PARAMETER Experiment Name: At_Drought_P Parameter: Organism Value: A. thaliana
  misc_feature: MA Experiment 20000437 PARAMETER Experiment Name: At_Drought_P Parameter: Plant Line Value: WS
  misc_feature: MA Experiment 20000437 PARAMETER Experiment Name: At_Drought_P Parameter: Timepoint (hr) Value: 24
  misc_feature: MA Experiment 20000437 PARAMETER Experiment Name: At_Drought_P Parameter: Tissue Value: Whole Plant
  misc_feature: MA Experiment 20000437 PARAMETER Experiment Name: At_Drought_P Parameter: Treatment Value: Drought vs. No Drought
  misc_feature: MA Experiment ID: 20000451 Result: Up-regulated in Transcription
  misc_feature: MA Experiment 20000451 PARAMETER Experiment Name: At_CS6879_Shoots-Roots_P Parameter: Age (day) Value: 14
  misc_feature: MA Experiment 20000451 PARAMETER Experiment Name: At_CS6879_Shoots-Roots_P Parameter: Organism Value: A. thaliana
  misc_feature: MA Experiment 20000451 PARAMETER Experiment Name: At_CS6879_Shoots-Roots_P Parameter: Plant Line Value: CS6879 vs. WS
  misc_feature: MA Experiment 20000451 PARAMETER Experiment Name: At_CS6879_Shoots-Roots_P Parameter: Tissue Value: Roots
  misc_feature: MA Experiment ID: 20000495 Result: Up-regulated in Transcription
  misc_feature: MA Experiment 20000495 PARAMETER Experiment Name: At_Guard_Cells_P Parameter: Harvest Date Value: 8/2/2002
  misc_feature: MA Experiment 20000495 PARAMETER Experiment Name: At_Guard_Cells_P Parameter: Organism Value: A. thaliana
  misc_feature: MA Experiment 20000495 PARAMETER Experiment Name: At_Guard_Cells_P Parameter: Tissue Value: Guard Cells vs. Leaves
  misc_feature: MA Experiment ID: 20000527 Result: Down-regulated in Transcription
  misc_feature: MA Experiment 20000527 PARAMETER Experiment Name: At_10percent_PEG_P Parameter: Age (day) Value: 20
  misc_feature: MA Experiment 20000527 PARAMETER Experiment Name: At_10percent_PEG_P Parameter: Organism Value: A. thaliana
  misc_feature: MA Experiment 20000527 PARAMETER Experiment Name: At_10percent_PEG_P Parameter: Plant Line Value: WS
  misc_feature: MA Experiment 20000527 PARAMETER Experiment Name: At_10percent_PEG_P Parameter: Timepoint (day) Value: 20
  misc_feature: MA Experiment 20000527 PARAMETER Experiment Name: At_10percent_PEG_P Parameter: Tissue Value: Whole Plant
  misc_feature: MA Experiment 20000527 PARAMETER Experiment Name: At_10percent_PEG_P Parameter: Treatment Value: 10percent PEG vs. No Treatment
atggttcatgctgatggtcataattttcccggttcggatccaaaccctcatatgaacaagttcgctttcgggtgtgccattgttgcttccatcatttctatcatctttggatatgatacgggagttatgagcggagctcagatatttataagagatgatctaaaaataaacgacactcagattgaagttttggccggaatcttgaatctttgtgcactcgtcggatcactaacggcggggaaaacgtctgacgtcatcggccgacgttacaccatagctctctccgccgtgatattcttagtgggctcagttcttatgggttacggcccaaactatcctgttttgatggtcggacgatgtattgccggagttggtgtagggtttgctctcatgatagctccggtttactctgccgagatatcctctgcgtcacatagaggctttctcacttctctacctgagctttgtattagtcttgggattttactaggctatgtctcgaattactgttttgggaaactgacgttgaaacttggatggagattgatgcttggaatcgcagcgttcccgtctttgatattggcttttgggattacaagaatgcccgagtcgccgaggtggcttgtgatgcaaggtaggttagaagaagccaagaaaataatggttttggtatccaatacggaagaagaagctgaagaacggttcagagacatcttaaccgctgcggaagtagatgtgacagagataaaagaagttggtggcggcgttaagaagaagaatcacggtaaaagtgtttggagggagttggtgataaaaccgcgacctgcggtgcgtttgatcttgatagcggccgttgggatacactttttcgagcatgcgacggggattgaggccgtcgtgttgtacagcccgagaattttcaagaaagccggagttgtttcgaaagacaagctcttactagccacggtcggtgtaggtttaactaaggcctttttcataataatagccactttcttgctcgacaaggtaggtcgtagaaagctcctgttgaccagtacgggtgggatggtcttcgcattgaccagtttagcggttagtctcacgatggttcagcgatttgggcggttagcgtgggcattgagtttaagcatcgtctctacgtatgcatttgtagcttttttctccatagggcttggacctatcacatgggtgtacagctccgagatattcccgttgagacttagggctcagggagcgagtataggtgttgcggttaataggatcatgaacgcgacggtctcaatgagttttctgtcgatgacgaaggcgatcacgacagggggcgtgttcttcgtattcgccggaatagcggtggcggcatggtggttcttcttctttatgttgccggagacgaaaggattgccattggaggagatggagaagctttttggtggtgggggtcctcgtggtgatcgtgacggacttgagattcaaactaaaaccatctctattgggggtttctcataa

SEQ ID NO: 38980 - protein, 508 aa, Arabidopsis thaliana
  peptide (1)..(508): Ceres Seq. ID no. 12482553
  misc_feature (25)..(483): Pfam Name: Sugar (and other) transporter Pfam Description: Sugar (and other) transporter
  misc_feature (33)..(484): Homolog of NCBI NO: 29691878 NR Description: sorbitol transporter [Malus x domestica]
  misc_feature (20)..(493): Homolog of NCBI NO: 34393630 NR Description: putative sorbitol transporter
  misc_feature (20)..(493): Homolog of NCBI NO: 16118827 NR Description: putative sugar transporter [Oryza sativa]
  misc_feature (14)..(484): Homolog of NCBI NO: 15226682 NR Description: putative sugar transporter; protein id:
  misc_feature (16)..(485): Homolog of NCBI NO: 15230212 NR Description: sugar transport, putative; protein id:
  misc_feature (14)..(484): Homolog of NCBI NO: 15226696 NR Description: putative sugar transporter; protein id:
  misc_feature (19)..(486): Homolog of NCBI NO: 13129489 NR Description: Putative sugar transporter [Oryza sativa]
  misc_feature (8)..(484): Homolog of NCBI NO: 30025133 NR Description: putative sorbitol transporter [Prunus cerasus]
  misc_feature (18)..(489): Homolog of NCBI NO: 15234491 NR Description: sugar transporter like protein; protein id:
  misc_feature (1)..(508): Homolog of NCBI NO: 15224183 NR Description: putative sugar transporter; protein id:
MVHADGHNFPGSDPNPHMNKFAFGCAIVASIISIIFGYDTGVMSGAQIFIRDDLKINDTQIEVLAGILNLCALVGSLTAGKTSDVIGRRYTIALSAVIFLVGSVLMGYGPNYPVLMVGRCIAGVGVGFALMIAPVYSAEISSASHRGFLTSLPELCISLGILLGYVSNYCFGKLTLKLGWRLMLGIAAFPSLILAFGITRMPESPRWLVMQGRLEEAKKIMVLVSNTEEEAEERFRDILTAAEVDVTEIKEVGGGVKKKNHGKSVWRELVIKPRPAVRLILIAAVGIHFFEHATGIEAVVLYSPRIFKKAGVVSKDKLLLATVGVGLTKAFFIIIATFLLDKVGRRKLLLTSTGGMVFALTSLAVSLTMVQRFGRLAWALSLSIVSTYAFVAFFSIGLGPITWVYSSEIFPLRLRAQGASIGVAVNRIMNATVSMSFLSMTKAITTGGVFFVFAGIAVAAWWFFFFMLPETKGLPLEEMEKLFGGGGPRGDRDGLEIQTKTISIGGFS

SEQ ID NO: 38981 - protein, 491 aa, Arabidopsis thaliana
  peptide (1)..(491): Ceres Seq. ID no. 12482554
  misc_feature (8)..(466): Pfam Name: Sugar (and other) transporter Pfam Description: Sugar (and other) transporter
  misc_feature (16)..(467): Homolog of NCBI NO: 29691878 NR Description: sorbitol transporter [Malus x domestica]
  misc_feature (3)..(476): Homolog of NCBI NO: 34393630 NR Description: putative sorbitol transporter
  misc_feature (3)..(476): Homolog of NCBI NO: 16118827 NR Description: putative sugar transporter [Oryza sativa]
  misc_feature (1)..(467): Homolog of NCBI NO: 15226682 NR Description: putative sugar transporter; protein id:
  misc_feature (1)..(468): Homolog of NCBI NO: 15230212 NR Description: sugar transport, putative; protein id:
  misc_feature (1)..(467): Homolog of NCBI NO: 15226696 NR Description: putative sugar transporter; protein id:
  misc_feature (2)..(469): Homolog of NCBI NO: 13129489 NR Description: Putative sugar transporter [Oryza sativa]
  misc_feature (1)..(467): Homolog of NCBI NO: 30025133 NR Description: putative sorbitol transporter [Prunus cerasus]
  misc_feature (1)..(472): Homolog of NCBI NO: 15234491 NR Description: sugar transporter like protein; protein id:
  misc_feature (1)..(491): Homolog of NCBI NO: 15224183 NR Description: putative sugar transporter; protein id:
MNKFAFGCAIVASIISIIFGYDTGVMSGAQIFIRDDLKINDTQIEVLAGILNLCALVGSLTAGKTSDVIGRRYTIALSAVIFLVGSVLMGYGPNYPVLMVGRCIAGVGVGFALMIAPVYSAEISSASHRGFLTSLPELCISLGILLGYVSNYCFGKLTLKLGWRLMLGIAAFPSLILAFGITRMPESPRWLVMQGRLEEAKKIMVLVSNTEEEAEERFRDILTAAEVDVTEIKEVGGGVKKKNHGKSVWRELVIKPRPAVRLILIAAVGIHFFEHATGIEAVVLYSPRIFKKAGVVSKDKLLLATVGVGLTKAFFIIIATFLLDKVGRRKLLLTSTGGMVFALTSLAVSLTMVQRFGRLAWALSLSIVSTYAFVAFFSIGLGPITWVYSSEIFPLRLRAQGASIGVAVNRIMNATVSMSFLSMTKAITTGGVFFVFAGIAVAAWWFFFFMLPETKGLPLEEMEKLFGGGGPRGDRDGLEIQTKTISIGGFS

SEQ ID NO: 38982 - protein, 466 aa, Arabidopsis thaliana
  peptide (1)..(466): Ceres Seq. ID no. 12482555
  misc_feature (1)..(441): Pfam Name: Sugar (and other) transporter Pfam Description: Sugar (and other) transporter
  misc_feature (1)..(442): Homolog of NCBI NO: 29691878 NR Description: sorbitol transporter [Malus x domestica]
  misc_feature (1)..(451): Homolog of NCBI NO: 34393630 NR Description: putative sorbitol transporter
  misc_feature (1)..(451): Homolog of NCBI NO: 16118827 NR Description: putative sugar transporter [Oryza sativa]
  misc_feature (1)..(442): Homolog of NCBI NO: 15226682 NR Description: putative sugar transporter; protein id:
  misc_feature (1)..(443): Homolog of NCBI NO: 15230212 NR Description: sugar transport, putative; protein id:
  misc_feature (1)..(442): Homolog of NCBI NO: 15226696 NR Description: putative sugar transporter; protein id:
  misc_feature (1)..(444): Homolog of NCBI NO: 13129489 NR Description: Putative sugar transporter [Oryza sativa]
  misc_feature (1)..(442): Homolog of NCBI NO: 30025133 NR Description: putative sorbitol transporter [Prunus cerasus]
  misc_feature (1)..(447): Homolog of NCBI NO: 15234491 NR Description: sugar transporter like protein; protein id:
  misc_feature (1)..(466): Homolog of NCBI NO: 15224183 NR Description: putative sugar transporter; protein id:
MSGAQIFIRDDLKINDTQIEVLAGILNLCALVGSLTAGKTSDVIGRRYTIALSAVIFLVGSVLMGYGPNYPVLMVGRCIAGVGVGFALMIAPVYSAEISSASHRGFLTSLPELCISLGILLGYVSNYCFGKLTLKLGWRLMLGIAAFPSLILAFGITRMPESPRWLVMQGRLEEAKKIMVLVSNTEEEAEERFRDILTAAEVDVTEIKEVGGGVKKKNHGKSVWRELVIKPRPAVRLILIAAVGIHFFEHATGIEAVVLYSPRIFKKAGVVSKDKLLLATVGVGLTKAFFIIIATFLLDKVGRRKLLLTSTGGMVFALTSLAVSLTMVQRFGRLAWALSLSIVSTYAFVAFFSIGLGPITWVYSSEIFPLRLRAQGASIGVAVNRIMNATVSMSFLSMTKAITTGGVFFVFAGIAVAAWWFFFFMLPETKGLPLEEMEKLFGGGGPRGDRDGLEIQTKTISIGGFS

SEQ ID NO: 38983 - DNA, 1337 bp, Arabidopsis thaliana; identical to SEQ ID NO: 35207
  misc_feature (1)..(1337): Ceres Seq. ID no. 12562139
  misc_feature: MA Experiment ID: 108433 Result: Up-regulated in Transcription
  misc_feature: MA Experiment 108433 PARAMETER Experiment Name: At_rhl_Mutant2_cDNA_P Parameter: Age (day) Value: 7
  misc_feature: MA Experiment 108433 PARAMETER Experiment Name: At_rhl_Mutant2_cDNA_P Parameter: Organism Value: A. thaliana
  misc_feature: MA Experiment 108433 PARAMETER Experiment Name: At_rhl_Mutant2_cDNA_P Parameter: Plant Line Value: rhl Mutant vs. wt landsburg
  misc_feature: MA Experiment 108433 PARAMETER Experiment Name: At_rhl_Mutant2_cDNA_P Parameter: Tissue Value: Roots
  misc_feature: MA Experiment ID: 108434 Result: Down-regulated in Transcription
  misc_feature: MA Experiment 108434 PARAMETER Experiment Name: At_Root_Tips_cDNA_P Parameter: Tissue Value: Root Tips
  misc_feature: MA Experiment ID: 108462 Result: Up-regulated in Transcription
  misc_feature: MA Experiment 108462 PARAMETER Experiment Name: At_Germinating_Seeds_cDNA_P Parameter: Age (day) Value: 2 vs. 0
  misc_feature: MA Experiment 108462 PARAMETER Experiment Name: At_Germinating_Seeds_cDNA_P Parameter: Tissue Value: Germinating Seeds
  misc_feature: MA Experiment ID: 108463 Result: Up-regulated in Transcription
  misc_feature: MA Experiment 108463 PARAMETER Experiment Name: At_Germinating_Seeds_cDNA_P Parameter: Age (day) Value: 3 vs. 0
  misc_feature: MA Experiment 108463 PARAMETER Experiment Name: At_Germinating_Seeds_cDNA_P Parameter: Tissue Value: Germinating Seeds
  misc_feature: MA Experiment ID: 108464 Result: Up-regulated in Transcription
  misc_feature: MA Experiment 108464 PARAMETER Experiment Name: At_Germinating_Seeds_cDNA_P Parameter: Age (day) Value: 4 vs. 0
  misc_feature: MA Experiment 108464 PARAMETER Experiment Name: At_Germinating_Seeds_cDNA_P Parameter: Tissue Value: Germinating Seeds
  misc_feature: MA Experiment ID: 108569 Result: Up-regulated in Transcription
  misc_feature: MA Experiment 108569 PARAMETER Experiment Name: At_0.001%_MeJA__cDNA_P Parameter: Timepoint (hr) Value: 6
  misc_feature: MA Experiment 108569 PARAMETER Experiment Name: At_0.001%_MeJA__cDNA_P Parameter: Tissue Value: Aerial
  misc_feature: MA Experiment 108569 PARAMETER Experiment Name: At_0.001%_MeJA__cDNA_P Parameter: Treatment Value: 0.001% MeJA vs. No Treatment
  misc_feature: MA Experiment ID: 108573 Result: Up-regulated in Transcription
  misc_feature: MA Experiment 108573 PARAMETER Experiment Name: At_Drought_cDNA_P Parameter: Timepoint (hr) Value: 6
  misc_feature: MA Experiment 108573 PARAMETER Experiment Name: At_Drought_cDNA_P Parameter: Tissue Value: Aerial
  misc_feature: MA Experiment 108573 PARAMETER Experiment Name: At_Drought_cDNA_P Parameter: Treatment Value: Drought vs. No Drought
  misc_feature: MA Experiment ID: 108577 Result: Down-regulated in Transcription
  misc_feature: MA Experiment 108577 PARAMETER Experiment Name: At_42deg_Heat_cDNA_P Parameter: Temperature (deg C) Value: 42 vs. 22
  misc_feature: MA Experiment 108577 PARAMETER Experiment Name: At_42deg_Heat_cDNA_P Parameter: Timepoint (hr) Value: 6
  misc_feature: MA Experiment 108577 PARAMETER Experiment Name: At_42deg_Heat_cDNA_P Parameter: Tissue Value: Aerial
  misc_feature: MA Experiment ID: 108585 Result: Up-regulated in Transcription
  misc_feature: MA Experiment 108585 PARAMETER Experiment Name: At_5mM_NaNP_cDNA_P Parameter: Timepoint (hr) Value: 6
  misc_feature: MA Experiment 108585 PARAMETER Experiment Name: At_5mM_NaNP_cDNA_P Parameter: Tissue Value: Aerial
  misc_feature: MA Experiment 108585 PARAMETER Experiment Name: At_5mM_NaNP_cDNA_P Parameter: Treatment Value: null
  misc_feature: MA Experiment ID: 108595 Result: Down-regulated in Transcription
  misc_feature: MA Experiment 108595 PARAMETER Experiment Name: At_Ler-pi_Ovule_cDNA_P Parameter: Plant Line Value: null
  misc_feature: MA Experiment ID: 20000224 Result: Down-regulated in Transcription
  misc_feature: MA Experiment ID: 20000227 Result: Down-regulated in Transcription
  misc_feature: MA Experiment 20000227 PARAMETER Experiment Name: At_Root-Tips-vs-Tops_P Parameter: Tissue Value: Root Tips vs. Root Tops
  misc_feature: MA Experiment ID: 20000234 Result: Down-regulated in Transcription
  misc_feature: MA Experiment 20000234 PARAMETER Experiment Name: At_Siliques_P Parameter: Age (day) Value: 21
  misc_feature: MA Experiment 20000234 PARAMETER Experiment Name: At_Siliques_P Parameter: Organism Value: A. thaliana
  misc_feature: MA Experiment 20000234 PARAMETER Experiment Name: At_Siliques_P Parameter: Plant Line Value: WS
  misc_feature: MA Experiment 20000234 PARAMETER Experiment Name: At_Siliques_P Parameter: Tissue Value: Less Than 5mm Siliques vs. Whole Plant
  misc_feature: MA Experiment ID: 20001557 Result: Down-regulated in Transcription
  misc_feature: MA Experiment 20001557 PARAMETER Experiment Name: At_Drought_Soil_Dry_P Parameter: Age (day) Value: 27
  misc_feature: MA Experiment 20001557 PARAMETER Experiment Name: At_Drought_Soil_Dry_P Parameter: Organism Value: A. thaliana
  misc_feature: MA Experiment 20001557 PARAMETER Experiment Name: At_Drought_Soil_Dry_P Parameter: Plant Line Value: WS
  misc_feature: MA Experiment 20001557 PARAMETER Experiment Name: At_Drought_Soil_Dry_P Parameter: Post Timepoint (hr) Value: 3
  misc_feature: MA Experiment 20001557 PARAMETER Experiment Name: At_Drought_Soil_Dry_P Parameter: Post-Treatment Value: Re-Water vs. No Drought
  misc_feature: MA Experiment 20001557 PARAMETER Experiment Name: At_Drought_Soil_Dry_P Parameter: Timepoint (day) Value: 13
  misc_feature: MA Experiment 20001557 PARAMETER Experiment Name: At_Drought_Soil_Dry_P Parameter: Treatment Value: Drought vs. No Drought
  misc_feature: MA Experiment ID: 20001558 Result: Down-regulated in Transcription
  misc_feature: MA Experiment 20001558 PARAMETER Experiment Name: At_Drought_Soil_Dry_P Parameter: Age (day) Value: 27
  misc_feature: MA Experiment 20001558 PARAMETER Experiment Name: At_Drought_Soil_Dry_P Parameter: Organism Value: A. thaliana
  misc_feature: MA Experiment 20001558 PARAMETER Experiment Name: At_Drought_Soil_Dry_P Parameter: Plant Line Value: WS
  misc_feature: MA Experiment 20001558 PARAMETER Experiment Name: At_Drought_Soil_Dry_P Parameter: Post Timepoint (hr) Value: 6
  misc_feature: MA Experiment 20001558 PARAMETER Experiment Name: At_Drought_Soil_Dry_P Parameter: Post-Treatment Value: Re-Water vs. No Drought
  misc_feature: MA Experiment 20001558 PARAMETER Experiment Name: At_Drought_Soil_Dry_P Parameter: Timepoint (day) Value: 13
  misc_feature: MA Experiment 20001558 PARAMETER Experiment Name: At_Drought_Soil_Dry_P Parameter: Treatment Value: Drought vs. No Drought
  misc_feature: MA Experiment ID: 20001560 Result: Down-regulated in Transcription
  misc_feature: MA Experiment 20001560 PARAMETER Experiment Name: At_Drought_Soil_Dry_P Parameter: Age (day) Value: 28
  misc_feature: MA Experiment 20001560 PARAMETER Experiment Name: At_Drought_Soil_Dry_P Parameter: Organism Value: A. thaliana
  misc_feature: MA Experiment 20001560 PARAMETER Experiment Name: At_Drought_Soil_Dry_P Parameter: Plant Line Value: WS
  misc_feature: MA Experiment 20001560 PARAMETER Experiment Name: At_Drought_Soil_Dry_P Parameter: Post Timepoint (hr) Value: None
  misc_feature: MA Experiment 20001560 PARAMETER Experiment Name: At_Drought_Soil_Dry_P Parameter: Post-Treatment Value: None
  misc_feature: MA Experiment 20001560 PARAMETER Experiment Name: At_Drought_Soil_Dry_P Parameter: Timepoint (day) Value: 14
  misc_feature: MA Experiment 20001560 PARAMETER Experiment Name: At_Drought_Soil_Dry_P Parameter: Treatment Value: Drought vs. No Drought

SEQ ID NO: 38984 - protein, 314 aa, Arabidopsis thaliana; identical to SEQ ID NO: 35208
  peptide (1)..(314): Ceres Seq. ID no. 12562140
  misc_feature (7)..(188): Homolog of NCBI NO: 24461850 NR Description: CTV.3 [Poncirus trifoliata]
  misc_feature (1)..(304): Homolog of NCBI NO: 25408697 NR Description: hypothetical protein At2g40420 [imported] -
  misc_feature (7)..(310): Homolog of NCBI NO: 18412864 NR Description: expressed protein
  misc_feature (1)..(304): Homolog of NCBI NO: 30688270 NR Description: amino acid transporter family [Arabidopsis
  misc_feature (1)..(270): Homolog of NCBI NO: 34907894 NR Description: P0439E11.11 [Oryza sativa (japonica
  misc_feature (1)..(306): Homolog of NCBI NO: 15228851 NR Description: putative protein
  misc_feature (1)..(312): Homolog of NCBI NO: 34898706 NR Description: hypothetical protein [Oryza sativa (japonica
  misc_feature (1)..(310): Homolog of NCBI NO: 15241555 NR Description: transporter -like protein; protein id:
  misc_feature (1)..(310): Homolog of NCBI NO: 9758059 NR Description: amino acid transporter-like protein [Arabidopsis
  misc_feature (1)..(314): Homolog of NCBI NO: 18406463 NR Description: expressed protein
  misc_feature (7)..(188): Homolog of NCBI NO: 24461850 NR Description: CTV.3 [Poncirus trifoliata]
  misc_feature (1)..(304): Homolog of NCBI NO: 25408697 NR Description: hypothetical protein At2g40420 [imported] -
  misc_feature (7)..(310): Homolog of NCBI NO: 18412864 NR Description: expressed protein
  misc_feature (1)..(304): Homolog of NCBI NO: 30688270 NR Description: amino acid transporter family [Arabidopsis
  misc_feature (1)..(270): Homolog of NCBI NO: 34907894 NR Description: P0439E11.11 [Oryza sativa (japonica
  misc_feature (1)..(306): Homolog of NCBI NO: 15228851 NR Description: putative protein
  misc_feature (1)..(312): Homolog of NCBI NO: 34898706 NR Description: hypothetical protein [Oryza sativa (japonica
  misc_feature (1)..(310): Homolog of NCBI NO: 15241555 NR Description: transporter -like protein; protein id:
  misc_feature (1)..(310): Homolog of NCBI NO: 9758059 NR Description: amino acid transporter-like protein [Arabidopsis
  misc_feature (1)..(314): Homolog of NCBI NO: 18406463 NR Description: expressed protein
  misc_feature (37)..(37): Xaa is any aa, unknown or other

SEQ ID NO: 38985 - protein, 242 aa, Arabidopsis thaliana; identical to SEQ ID NO: 35209
  peptide (1)..(242): Ceres Seq. ID no. 12562141
  misc_feature (1)..(116): Homolog of NCBI NO: 24461850 NR Description: CTV.3 [Poncirus trifoliata]
  misc_feature (1)..(232): Homolog of NCBI NO: 25408697 NR Description: hypothetical protein At2g40420 [imported] -
  misc_feature (1)..(238): Homolog of NCBI NO: 18412864 NR Description: expressed protein
  misc_feature (1)..(232): Homolog of NCBI NO: 30688270 NR Description: amino acid transporter family [Arabidopsis
  misc_feature (1)..(198): Homolog of NCBI NO: 34907894 NR Description: P0439E11.11 [Oryza sativa (japonica
  misc_feature (1)..(234): Homolog of NCBI NO: 15228851 NR Description: putative protein
  misc_feature (1)..(240): Homolog of NCBI NO: 34898706 NR Description: hypothetical protein [Oryza sativa (japonica
  misc_feature (1)..(238): Homolog of NCBI NO: 15241555 NR Description: transporter -like protein; protein id:
  misc_feature (1)..(238): Homolog of NCBI NO: 9758059 NR Description: amino acid transporter-like protein [Arabidopsis
  misc_feature (1)..(242): Homolog of NCBI NO: 18406463 NR Description: expressed protein
  misc_feature (1)..(116): Homolog of NCBI NO: 24461850 NR Description: CTV.3 [Poncirus trifoliata]
  misc_feature (1)..(232): Homolog of NCBI NO: 25408697 NR Description: hypothetical protein At2g40420 [imported] -
  misc_feature (1)..(238): Homolog of NCBI NO: 18412864 NR Description: expressed protein
  misc_feature (1)..(232): Homolog of NCBI NO: 30688270 NR Description: amino acid transporter family [Arabidopsis
  misc_feature (1)..(198): Homolog of NCBI NO: 34907894 NR Description: P0439E11.11 [Oryza sativa (japonica
  misc_feature (1)..(234): Homolog of NCBI NO: 15228851 NR Description: putative protein
  misc_feature (1)..(240): Homolog of NCBI NO: 34898706 NR Description: hypothetical protein [Oryza sativa (japonica
  misc_feature (1)..(238): Homolog of NCBI NO: 15241555 NR Description: transporter -like protein; protein id:
  misc_feature (1)..(238): Homolog of NCBI NO: 9758059 NR Description: amino acid transporter-like protein [Arabidopsis
  misc_feature (1)..(242): Homolog of NCBI NO: 18406463 NR Description: expressed protein

SEQ ID NO: 38986 - protein, 233 aa, Arabidopsis thaliana; identical to SEQ ID NO: 35210
  peptide (1)..(233): Ceres Seq. ID no. 12562142
  misc_feature (1)..(107): Homolog of NCBI NO: 24461850 NR Description: CTV.3 [Poncirus trifoliata]
  misc_feature (1)..(223): Homolog of NCBI NO: 25408697 NR Description: hypothetical protein At2g40420 [imported] -
  misc_feature (1)..(229): Homolog of NCBI NO: 18412864 NR Description: expressed protein
  misc_feature (1)..(223): Homolog of NCBI NO: 30688270 NR Description: amino acid transporter family [Arabidopsis
  misc_feature (1)..(189): Homolog of NCBI NO: 34907894 NR Description: P0439E11.11 [Oryza sativa (japonica
  misc_feature (1)..(225): Homolog of NCBI NO: 15228851 NR Description: putative protein
  misc_feature (1)..(231): Homolog of NCBI NO: 34898706 NR Description: hypothetical protein [Oryza sativa (japonica
  misc_feature (1)..(229): Homolog of NCBI NO: 15241555 NR Description: transporter -like protein; protein id:
  misc_feature (1)..(229): Homolog of NCBI NO: 9758059 NR Description: amino acid transporter-like protein [Arabidopsis
  misc_feature (1)..(233): Homolog of NCBI NO: 18406463 NR Description: expressed protein
  misc_feature (1)..(107): Homolog of NCBI NO: 24461850 NR Description: CTV.3 [Poncirus trifoliata]
  misc_feature (1)..(223): Homolog of NCBI NO: 25408697 NR Description: hypothetical protein At2g40420 [imported] -
  misc_feature (1)..(229): Homolog of NCBI NO: 18412864 NR Description: expressed protein
  misc_feature (1)..(223): Homolog of NCBI NO: 30688270 NR Description: amino acid transporter family [Arabidopsis
  misc_feature (1)..(189): Homolog of NCBI NO: 34907894 NR Description: P0439E11.11 [Oryza sativa (japonica
  misc_feature (1)..(225): Homolog of NCBI NO: 15228851 NR Description: putative protein
  misc_feature (1)..(231): Homolog of NCBI NO: 34898706 NR Description: hypothetical protein [Oryza sativa (japonica
  misc_feature (1)..(229): Homolog of NCBI NO: 15241555 NR Description: transporter -like protein; protein id:
  misc_feature (1)..(229): Homolog of NCBI NO: 9758059 NR Description: amino acid transporter-like protein [Arabidopsis
  misc_feature (1)..(233): Homolog of NCBI NO: 18406463 NR Description: expressed protein

SEQ ID NO: 38987 - DNA, 1074 bp, Arabidopsis thaliana
  misc_feature (1)..(1074): Ceres Seq. ID no. 12343425
  misc_feature: MA Experiment ID: 108434 Result: Up-regulated in Transcription
  misc_feature: MA Experiment 108434 PARAMETER Experiment Name: At_Root_Tips_cDNA_P Parameter: Tissue Value: Root Tips
  misc_feature: MA Experiment ID: 108461 Result: Down-regulated in Transcription
  misc_feature: MA Experiment 108461 PARAMETER Experiment Name: At_Germinating_Seeds_cDNA_P Parameter: Age (day) Value: 1 vs. 0
  misc_feature: MA Experiment 108461 PARAMETER Experiment Name: At_Germinating_Seeds_cDNA_P Parameter: Tissue Value: Germinating Seeds
  misc_feature: MA Experiment ID: 108462 Result: Down-regulated in Transcription
  misc_feature: MA Experiment 108462 PARAMETER Experiment Name: At_Germinating_Seeds_cDNA_P Parameter: Age (day) Value: 2 vs. 0
  misc_feature: MA Experiment 108462 PARAMETER Experiment Name: At_Germinating_Seeds_cDNA_P Parameter: Tissue Value: Germinating Seeds
  misc_feature: MA Experiment ID: 108463 Result: Down-regulated in Transcription
  misc_feature: MA Experiment 108463 PARAMETER Experiment Name: At_Germinating_Seeds_cDNA_P Parameter: Age (day) Value: 3 vs. 0
  misc_feature: MA Experiment 108463 PARAMETER Experiment Name: At_Germinating_Seeds_cDNA_P Parameter: Tissue Value: Germinating Seeds
  misc_feature: MA Experiment ID: 108464 Result: Down-regulated in Transcription
  misc_feature: MA Experiment 108464 PARAMETER Experiment Name: At_Germinating_Seeds_cDNA_P Parameter: Age (day) Value: 4 vs. 0
  misc_feature: MA Experiment 108464 PARAMETER Experiment Name: At_Germinating_Seeds_cDNA_P Parameter: Tissue Value: Germinating Seeds
  misc_feature: MA Experiment ID: 108569 Result: Up-regulated in Transcription
  misc_feature: MA Experiment 108569 PARAMETER Experiment Name: At_0.001%_MeJA__cDNA_P Parameter: Timepoint (hr) Value: 6
  misc_feature: MA Experiment 108569 PARAMETER Experiment Name: At_0.001%_MeJA__cDNA_P Parameter: Tissue Value: Aerial
  misc_feature: MA Experiment 108569 PARAMETER Experiment Name: At_0.001%_MeJA__cDNA_P Parameter: Treatment Value: 0.001% MeJA vs. No Treatment
  misc_feature: MA Experiment ID: 108573 Result: Up-regulated in Transcription
  misc_feature: MA Experiment 108573 PARAMETER Experiment Name: At_Drought_cDNA_P Parameter: Timepoint (hr) Value: 6
  misc_feature: MA Experiment 108573 PARAMETER Experiment Name: At_Drought_cDNA_P Parameter: Tissue Value: Aerial
  misc_feature: MA Experiment 108573 PARAMETER Experiment Name: At_Drought_cDNA_P Parameter: Treatment Value: Drought vs. No Drought
  misc_feature: MA Experiment ID: 108585 Result: Up-regulated in Transcription
  misc_feature: MA Experiment 108585 PARAMETER Experiment Name: At_5mM_NaNP_cDNA_P Parameter: Timepoint (hr) Value: 6
  misc_feature: MA Experiment 108585 PARAMETER Experiment Name: At_5mM_NaNP_cDNA_P Parameter: Tissue Value: Aerial
  misc_feature: MA Experiment 108585 PARAMETER Experiment Name: At_5mM_NaNP_cDNA_P Parameter: Treatment Value: null
  misc_feature: MA Experiment ID: 20000179 Result: Down-regulated in Transcription
  misc_feature: MA Experiment 20000179 PARAMETER Experiment Name: At_Germinating_Seeds_P Parameter: Age (hr) Value: 6 vs. 0
  misc_feature: MA Experiment 20000179 PARAMETER Experiment Name: At_Germinating_Seeds_P Parameter: Tissue Value: Germinating Seeds
  misc_feature: MA Experiment ID: 20000180 Result: Down-regulated in Transcription
  misc_feature: MA Experiment 20000180 PARAMETER Experiment Name: At_Germinating_Seeds_P Parameter: Age (hr) Value: 24 vs. 0
  misc_feature: MA Experiment 20000180 PARAMETER Experiment Name: At_Germinating_Seeds_P Parameter: Tissue Value: Germinating Seeds
  misc_feature: MA Experiment ID: 20000224 Result: Down-regulated in Transcription
  misc_feature: MA Experiment ID: 20000227 Result: Up-regulated in Transcription
  misc_feature: MA Experiment 20000227 PARAMETER Experiment Name: At_Root-Tips-vs-Tops_P Parameter: Tissue Value: Root Tips vs. Root Tops
  misc_feature: MA Experiment ID: 20000265 Result: Up-regulated in Transcription
  misc_feature: MA Experiment 20000265 PARAMETER Experiment Name: At_Open_Flower_P Parameter: Age (day) Value: 21
  misc_feature: MA Experiment 20000265 PARAMETER Experiment Name: At_Open_Flower_P Parameter: Plant Line Value: WS
  misc_feature: MA Experiment 20000265 PARAMETER Experiment Name: At_Open_Flower_P Parameter: Tissue Value: Closed Flower vs. Whole Plant
  misc_feature: MA Experiment ID: 20001451 Result: Down-regulated in Transcription
  misc_feature: MA Experiment 20001451 PARAMETER Experiment Name: At_Far-red-induction_P Parameter: Age (day) Value: 7
  misc_feature: MA Experiment 20001451 PARAMETER Experiment Name: At_Far-red-induction_P Parameter: Light Value: Far-red vs. White
  misc_feature: MA Experiment 20001451 PARAMETER Experiment Name: At_Far-red-induction_P Parameter: Organism Value: A. thaliana
  misc_feature: MA Experiment 20001451 PARAMETER Experiment Name: At_Far-red-induction_P Parameter: Plant Line Value: Columbia
  misc_feature: MA Experiment 20001451 PARAMETER Experiment Name: At_Far-red-induction_P Parameter: Timepoint (hr) Value: 24
  misc_feature: MA Experiment 20001451 PARAMETER Experiment Name: At_Far-red-induction_P Parameter: Tissue Value: Whole Plant
taatcgaaaaaattctcacacattcttctgcttcgttaattttctactcgatttcgctcttcagaaatttgacaatgaagcttgacactagtggattggagacaactatgcctgtgattggctttggatcaaacagtgagatgcttgatgggttttcgtctgcaccttcgtttgatcttcctcgtaccactgattttgatgggtttcagaaaaaagctgtggagatggtgaagcctgcaaagggtacaactacacttgcgtttatctttaaggaaggtgttatggtagctgctgattctcgagctagcatgggaggatatatctcgtcgcaatctgtgaagaagattattgaaattaatccttatatgcttggtacaatggctggtggtgctgctgattgtcaattctggcacagaaatctgggaattaagtgccgtctacatgagctggcaaacaaaaggagaatctctgtttcaggagcttcaaagcttcttgctaacatgctctattcatatcgtggaatgggactttctgttggcacaatgattgctggatgggatgaaacaggccctggattgtactatgttgacaacgaaggaggacggcttaagggagacagattctctgtcggttcaggttcaccatacgcttatggtgttctggacagcggatacaaattcgatatgtcggttgaagaagcctcagagttagcaaggagatccatctaccatgctacattccgtgatggagctagtggtggagttgctagcgtgtaccacgttgggccgcaaggatggacgaaactctctggagacgacgttggcgagctacattaccattattaccccgtggctccaatcaccgcggaacatgtgatggaagaggctgccgaataagtactgtgattcttgtctatcttactaagagttttattacatcacttatgttttgttcatcaatgaacagaatcatagattcaagtttcttttgtattgcgaatgatgtagacgttagtttggccacaatgatcacgttgcataatagataacataatagataacctgtttctttctt

SEQ ID NO: 38988 - protein, 297 aa, Arabidopsis thaliana
  peptide (1)..(297): Ceres Seq. ID no. 12343426
  misc_feature (78)..(260): Pfam Name: Proteasome A-type and B-type Pfam Description: Proteasome A-type and B-type
  misc_feature (30)..(284): Homolog of NCBI NO: 6755204 NR Description: proteasome (prosome, macropain) subunit, beta
  misc_feature (101)..(274): Homolog of NCBI NO: 14594931 NR Description: putative beta5 proteasome subunit [Nicotiana
  misc_feature (98)..(296): Homolog of NCBI NO: 16588840 NR Description: putative 20S proteasome beta subunit 5 [Prunus
  misc_feature (25)..(98): Homolog of NCBI NO: 3980264 NR Description: 20S proteasome beta subunit [Cicer arietinum]
  misc_feature (130)..(295): Homolog of NCBI NO: 3980264 NR Description: 20S proteasome beta subunit [Cicer arietinum]
  misc_feature (25)..(295): Homolog of NCBI NO: 8671510 NR Description: beta 5 subunit of 20S proteasome
  misc_feature (25)..(294): Homolog of NCBI NO: 3914430 NR Description: Proteasome subunit beta type 5 precursor (20S
  misc_feature (25)..(295): Homolog of NCBI NO: 15292875 NR Description: putative proteasome epsilon chain precursor
  misc_feature (25)..(295): Homolog of NCBI NO: 15222152 NR Description: 20S proteasome beta subunit E1 (PBE1)
  misc_feature (25)..(297): Homolog of NCBI NO: 15231544 NR Description: 26S proteasome beta subunit, putative
IEKILTHSSASLIFYSISLFRNLTMKLDTSGLETTMPVIGFGSNSEMLDGFSSAPSFDLPRTTDFDGFQKKAVEMVKPAKGTTTLAFIFKEGVMVAADSRASMGGYISSQSVKKIIEINPYMLGTMAGGAADCQFWHRNLGIKCRLHELANKRRISVSGASKLLANMLYSYRGMGLSVGTMIAGWDETGPGLYYVDNEGGRLKGDRFSVGSGSPYAYGVLDSGYKFDMSVEEASELARRSIYHATFRDGASGGVASVYHVGPQGWTKLSGDDVGELHYHYYPVAPITAEHVMEEAAE

SEQ ID NO: 38989 - protein, 273 aa, Arabidopsis thaliana; identical to SEQ ID NO: 30157
  peptide (1)..(273): Ceres Seq. ID no. 12343427
  misc_feature (54)..(236): Pfam Name: Proteasome A-type and B-type Pfam Description: Proteasome A-type and B-type
  misc_feature (6)..(260): Homolog of NCBI NO: 6755204 NR Description: proteasome (prosome, macropain) subunit, beta
  misc_feature (77)..(250): Homolog of NCBI NO: 14594931 NR Description: putative beta5 proteasome subunit [Nicotiana
  misc_feature (74)..(272): Homolog of NCBI NO: 16588840 NR Description: putative 20S proteasome beta subunit 5 [Prunus
  misc_feature (1)..(74): Homolog of NCBI NO: 3980264 NR Description: 20S proteasome beta subunit [Cicer arietinum]
  misc_feature (106)..(271): Homolog of NCBI NO: 3980264 NR Description: 20S proteasome beta subunit [Cicer arietinum]
  misc_feature (1)..(271): Homolog of NCBI NO: 8671510 NR Description: beta 5 subunit of 20S proteasome
  misc_feature (1)..(270): Homolog of NCBI NO: 3914430 NR Description: Proteasome subunit beta type 5 precursor (20S
  misc_feature (1)..(271): Homolog of NCBI NO: 15292875 NR Description: putative proteasome epsilon chain precursor
  misc_feature (1)..(271): Homolog of NCBI NO: 15222152 NR Description: 20S proteasome beta subunit E1 (PBE1)
  misc_feature (1)..(273): Homolog of NCBI NO: 15231544 NR Description: 26S proteasome beta subunit, putative

SEQ ID NO: 38990 - protein, 262 aa, Arabidopsis thaliana; identical to SEQ ID NO: 30158
  peptide (1)..(262): Ceres Seq. ID no. 12343428
  misc_feature (43)..(225): Pfam Name: Proteasome A-type and B-type Pfam Description: Proteasome A-type and B-type
  misc_feature (1)..(249): Homolog of NCBI NO: 6755204 NR Description: proteasome (prosome, macropain) subunit, beta
  misc_feature (66)..(239): Homolog of NCBI NO: 14594931 NR Description: putative beta5 proteasome subunit [Nicotiana
  misc_feature (63)..(261): Homolog of NCBI NO: 16588840 NR Description: putative 20S proteasome beta subunit 5 [Prunus
  misc_feature (1)..(63): Homolog of NCBI NO: 3980264 NR Description: 20S proteasome beta subunit [Cicer arietinum]
  misc_feature (95)..(260): Homolog of NCBI NO: 3980264 NR Description: 20S proteasome beta subunit [Cicer arietinum]
  misc_feature (1)..(260): Homolog of NCBI NO: 8671510 NR Description: beta 5 subunit of 20S proteasome
  misc_feature (1)..(259): Homolog of NCBI NO: 3914430 NR Description: Proteasome subunit beta type 5 precursor (20S
  misc_feature (1)..(260): Homolog of NCBI NO: 15292875 NR Description: putative proteasome epsilon chain precursor
  misc_feature (1)..(260): Homolog of NCBI NO: 15222152 NR Description: 20S proteasome beta subunit E1 (PBE1)
  misc_feature (1)..(262): Homolog of NCBI NO: 15231544 NR Description: 26S proteasome beta subunit, putative

SEQ ID NO: 38991 - DNA, 1134 bp, Arabidopsis thaliana
  misc_feature (1)..(1134): Ceres Seq. ID no. 12579539
  misc_feature: MA Experiment ID: 108435 Result: Down-regulated in Transcription
  misc_feature: MA Experiment 108435 PARAMETER Experiment Name: At_stm_Mutants_cDNA_P Parameter: Plant Line Value: wt Landsburg vs stm
  misc_feature: MA Experiment 108435 PARAMETER Experiment Name: At_stm_Mutants_cDNA_P Parameter: Tissue Value: Shoot Apical Meristem Region
  misc_feature: MA Experiment ID: 108585 Result: Down-regulated in Transcription
  misc_feature: MA Experiment 108585 PARAMETER Experiment Name: At_5mM_NaNP_cDNA_P Parameter: Timepoint (hr) Value: 6
  misc_feature: MA Experiment 108585 PARAMETER Experiment Name: At_5mM_NaNP_cDNA_P Parameter: Tissue Value: Aerial
  misc_feature: MA Experiment 108585 PARAMETER Experiment Name: At_5mM_NaNP_cDNA_P Parameter: Treatment Value: null
  misc_feature: MA Experiment ID: 108595 Result: Down-regulated in Transcription
  misc_feature: MA Experiment 108595 PARAMETER Experiment Name: At_Ler-pi_Ovule_cDNA_P Parameter: Plant Line Value: null
  misc_feature: MA Experiment ID: 108668 Result: Down-regulated in Transcription
  misc_feature: MA Experiment 108668 PARAMETER Experiment Name: At_2mM_SA_cDNA_P Parameter: Plant Line Value: WS
  misc_feature: MA Experiment 108668 PARAMETER Experiment Name: At_2mM_SA_cDNA_P Parameter: Timepoint (hr) Value: 6
  misc_feature: MA Experiment 108668 PARAMETER Experiment Name: At_2mM_SA_cDNA_P Parameter: Treatment Value: 2mM SA vs. No Treatment
  misc_feature: MA Experiment ID: 20000069 Result: Down-regulated in Transcription
  misc_feature: MA Experiment 20000069 PARAMETER Experiment Name: At_100uM_ABA_Mutants_cDNA_P Parameter: Plant Line Value: CS23
  misc_feature: MA Experiment 20000069 PARAMETER Experiment Name: At_100uM_ABA_Mutants_cDNA_P Parameter: Timepoint (hr) Value: 6
  misc_feature: MA Experiment 20000069 PARAMETER Experiment Name: At_100uM_ABA_Mutants_cDNA_P Parameter: Tissue Value: Aerial
  misc_feature: MA Experiment 20000069 PARAMETER Experiment Name: At_100uM_ABA_Mutants_cDNA_P Parameter: Treatment Value: 100uM ABA vs. No Treatment
  misc_feature: MA Experiment ID: 20000071 Result: Down-regulated in Transcription
  misc_feature: MA Experiment 20000071 PARAMETER Experiment Name: At_100uM_ABA_Mutants_cDNA_P Parameter: Plant Line Value: CS8104
  misc_feature: MA Experiment 20000071 PARAMETER Experiment Name: At_100uM_ABA_Mutants_cDNA_P Parameter: Timepoint (hr) Value: 6
  misc_feature: MA Experiment 20000071 PARAMETER Experiment Name: At_100uM_ABA_Mutants_cDNA_P Parameter: Tissue Value: Aerial
  misc_feature: MA Experiment 20000071 PARAMETER Experiment Name: At_100uM_ABA_Mutants_cDNA_P Parameter: Treatment Value: 100uM ABA vs. No Treatment
  misc_feature: MA Experiment ID: 20000072 Result: Down-regulated in Transcription
  misc_feature: MA Experiment 20000072 PARAMETER Experiment Name: At_100uM_ABA_Mutants_cDNA_P Parameter: Plant Line Value: CS8105
  misc_feature: MA Experiment 20000072 PARAMETER Experiment Name: At_100uM_ABA_Mutants_cDNA_P Parameter: Timepoint (hr) Value: 6
  misc_feature: MA Experiment 20000072 PARAMETER Experiment Name: At_100uM_ABA_Mutants_cDNA_P Parameter: Tissue Value: Aerial
  misc_feature: MA Experiment 20000072 PARAMETER Experiment Name: At_100uM_ABA_Mutants_cDNA_P Parameter: Treatment Value: 100uM ABA vs. No Treatment
  misc_feature: MA Experiment ID: 20000086 Result: Down-regulated in Transcription
  misc_feature: MA Experiment 20000086 PARAMETER Experiment Name: At_100uM_ABA_Mutants_cDNA_P Parameter: Plant Line Value: CS22
  misc_feature: MA Experiment 20000086 PARAMETER Experiment Name: At_100uM_ABA_Mutants_cDNA_P Parameter: Timepoint (hr) Value: 6
  misc_feature: MA Experiment 20000086 PARAMETER Experiment Name: At_100uM_ABA_Mutants_cDNA_P Parameter: Tissue Value: Aerial
  misc_feature: MA Experiment 20000086 PARAMETER Experiment Name: At_100uM_ABA_Mutants_cDNA_P Parameter: Treatment Value: 100uM ABA vs. No Treatment
  misc_feature: MA Experiment ID: 20000087 Result: Down-regulated in Transcription
  misc_feature: MA Experiment 20000087 PARAMETER Experiment Name: At_100uM_ABA_Mutants_cDNA_P Parameter: Plant Line Value: WS
  misc_feature: MA Experiment 20000087 PARAMETER Experiment Name: At_100uM_ABA_Mutants_cDNA_P Parameter: Timepoint (hr) Value: 6
  misc_feature: MA Experiment 20000087 PARAMETER Experiment Name: At_100uM_ABA_Mutants_cDNA_P Parameter: Tissue Value: Aerial
  misc_feature: MA Experiment 20000087 PARAMETER Experiment Name: At_100uM_ABA_Mutants_cDNA_P Parameter: Treatment Value: 100uM ABA vs. No Treatment
  misc_feature: MA Experiment ID: 20000090 Result: Down-regulated in Transcription
  misc_feature: MA Experiment ID: 20000113 Result: Up-regulated in Transcription
  misc_feature: MA Experiment 20000113 PARAMETER Experiment Name: At_42deg_Heat_cDNA_P Parameter: Temperature (deg C) Value: 42 vs. 22
  misc_feature: MA Experiment 20000113 PARAMETER Experiment Name: At_42deg_Heat_cDNA_P Parameter: Timepoint (hr) Value: 8
  misc_feature: MA Experiment 20000113 PARAMETER Experiment Name: At_42deg_Heat_cDNA_P Parameter: Tissue Value: Aerial
  misc_feature: MA Experiment ID: 20000117 Result: Down-regulated in Transcription
  misc_feature: MA Experiment 20000117 PARAMETER Experiment Name: At_100uM_ABA_Mutants_cDNA_P Parameter: Plant Line Value: Columbia
  misc_feature: MA Experiment 20000117 PARAMETER Experiment Name: At_100uM_ABA_Mutants_cDNA_P Parameter: Timepoint (hr) Value: 6
  misc_feature: MA Experiment 20000117 PARAMETER Experiment Name: At_100uM_ABA_Mutants_cDNA_P Parameter: Tissue Value: Aerial
  misc_feature: MA Experiment 20000117 PARAMETER Experiment Name: At_100uM_ABA_Mutants_cDNA_P Parameter: Treatment Value: 100uM ABA vs. No Treatment
  misc_feature: MA Experiment ID: 20000173 Result: Up-regulated in Transcription
  misc_feature: MA Experiment 20000173 PARAMETER Experiment Name: At_42deg_Heat_P Parameter: Age (day) Value: 14
  misc_feature: MA Experiment 20000173 PARAMETER Experiment Name: At_42deg_Heat_P Parameter: Organism Value: A. thaliana
  misc_feature: MA Experiment 20000173 PARAMETER Experiment Name: At_42deg_Heat_P Parameter: Plant Line Value: WS
  misc_feature: MA Experiment 20000173 PARAMETER Experiment Name: At_42deg_Heat_P Parameter: Temperature (deg C) Value: 42 vs. 22
  misc_feature: MA Experiment 20000173 PARAMETER Experiment Name: At_42deg_Heat_P Parameter: Timepoint (hr) Value: 6
  misc_feature: MA Experiment 20000173 PARAMETER Experiment Name: At_42deg_Heat_P Parameter: Tissue Value: Aerial
  misc_feature: MA Experiment ID: 20000182 Result: Down-regulated in Transcription
  misc_feature: MA Experiment 20000182 PARAMETER Experiment Name: At_2mM_SA_P Parameter: Age (day) Value: 14
  misc_feature: MA Experiment 20000182 PARAMETER Experiment Name: At_2mM_SA_P Parameter: Organism Value: A. thaliana
  misc_feature: MA Experiment 20000182 PARAMETER Experiment Name: At_2mM_SA_P Parameter: Plant Line Value: WS
  misc_feature: MA Experiment 20000182 PARAMETER Experiment Name: At_2mM_SA_P Parameter: Timepoint (hr) Value: 6
  misc_feature: MA Experiment 20000182 PARAMETER Experiment Name: At_2mM_SA_P Parameter: Tissue Value: Aerial
  misc_feature: MA Experiment 20000182 PARAMETER Experiment Name: At_2mM_SA_P Parameter: Treatment Value: 2mM SA vs. No Treatment
  misc_feature: MA Experiment ID: 20000185 Result: Down-regulated in Transcription
  misc_feature: MA Experiment 20000185 PARAMETER Experiment Name: At_Roots__P Parameter: Age (day) Value: 7 vs. 21
  misc_feature: MA Experiment 20000185 PARAMETER Experiment Name: At_Roots__P Parameter: Organism Value: A. thaliana
  misc_feature: MA Experiment 20000185 PARAMETER Experiment Name: At_Roots__P Parameter: Tissue Value: Roots vs. Whole Plant
  misc_feature: MA Experiment ID: 20000264 Result: Down-regulated in Transcription
  misc_feature: MA Experiment 20000264 PARAMETER Experiment Name: At_Open_Flower_P Parameter: Age (day) Value: 21
  misc_feature: MA Experiment 20000264 PARAMETER Experiment Name: At_Open_Flower_P Parameter: Plant Line Value: WS
  misc_feature: MA Experiment 20000264 PARAMETER Experiment Name: At_Open_Flower_P Parameter: Tissue Value: Open Flower vs. Whole Plant
  misc_feature: MA Experiment ID: 20000286 Result: Down-regulated in Transcription
  misc_feature: MA Experiment 20000286 PARAMETER Experiment Name: At_Open_Flower_P Parameter: Age (day) Value: 21
  misc_feature: MA Experiment 20000286 PARAMETER Experiment Name: At_Open_Flower_P Parameter: Plant Line Value: WS
  misc_feature: MA Experiment 20000286 PARAMETER Experiment Name: At_Open_Flower_P Parameter: Tissue Value: Half Open vs. Whole Plant
  misc_feature: MA Experiment ID: 20000439 Result: Down-regulated in Transcription
  misc_feature: MA Experiment 20000439 PARAMETER Experiment Name: At_Roots__P Parameter: Age (day) Value: 14 vs. 21
  misc_feature: MA Experiment 20000439 PARAMETER Experiment Name: At_Roots__P Parameter: Organism Value: A. thaliana
  misc_feature: MA Experiment 20000439 PARAMETER Experiment Name: At_Roots__P Parameter: Tissue Value: Roots vs. Whole Plant
  misc_feature: MA Experiment ID: 20000794 Result: Down-regulated in Transcription
  misc_feature: MA Experiment 20000794 PARAMETER Experiment Name: At_Petals_P Parameter: Age (day) Value: 23-25 days
  misc_feature: MA Experiment 20000794 PARAMETER Experiment Name: At_Petals_P Parameter: Plant Line Value: WS
  misc_feature: MA Experiment 20000794 PARAMETER Experiment Name: At_Petals_P Parameter: Tissue Value: Petals vs. Whole plant
  misc_feature: MA Experiment ID: 20001450 Result: Down-regulated in Transcription
  misc_feature: MA Experiment 20001450 PARAMETER Experiment Name: At_Far-red-induction_P Parameter: Age (day) Value: 7
  misc_feature: MA Experiment 20001450 PARAMETER Experiment Name: At_Far-red-induction_P Parameter: Light Value: Far-red vs. White
  misc_feature: MA Experiment 20001450 PARAMETER Experiment Name: At_Far-red-induction_P Parameter: Organism Value: A. thaliana
  misc_feature: MA Experiment 20001450 PARAMETER Experiment Name: At_Far-red-induction_P Parameter: Plant Line Value: Columbia
  misc_feature: MA Experiment 20001450 PARAMETER Experiment Name: At_Far-red-induction_P Parameter: Timepoint (hr) Value: 8
  misc_feature: MA Experiment 20001450 PARAMETER Experiment Name: At_Far-red-induction_P Parameter: Tissue Value: Whole Plant
  misc_feature: MA Experiment ID: 20001451 Result: Down-regulated in Transcription
  misc_feature: MA Experiment 20001451 PARAMETER Experiment Name: At_Far-red-induction_P Parameter: Age (day) Value: 7
  misc_feature: MA Experiment 20001451 PARAMETER Experiment Name: At_Far-red-induction_P Parameter: Light Value: Far-red vs. White
  misc_feature: MA Experiment 20001451 PARAMETER Experiment Name: At_Far-red-induction_P Parameter: Organism Value: A. thaliana
  misc_feature: MA Experiment 20001451 PARAMETER Experiment Name: At_Far-red-induction_P Parameter: Plant Line Value: Columbia
  misc_feature: MA Experiment 20001451 PARAMETER Experiment Name: At_Far-red-induction_P Parameter: Timepoint (hr) Value: 24
  misc_feature: MA Experiment 20001451 PARAMETER Experiment Name: At_Far-red-induction_P Parameter: Tissue Value: Whole Plant
  misc_feature: MA Experiment ID: 20001911 Result: Up-regulated in Transcription
  misc_feature: MA Experiment 20001911 PARAMETER Experiment Name: At_Drought_Reproduction_P Parameter: Age (day) Value: 40
  misc_feature: MA Experiment 20001911 PARAMETER Experiment Name: At_Drought_Reproduction_P Parameter: Organism Value: A. thaliana
  misc_feature: MA Experiment 20001911 PARAMETER Experiment Name: At_Drought_Reproduction_P Parameter: Plant Line Value: WS
  misc_feature: MA Experiment 20001911 PARAMETER Experiment Name: At_Drought_Reproduction_P Parameter: Timepoint (day) Value: 10
  misc_feature: MA Experiment 20001911 PARAMETER Experiment Name: At_Drought_Reproduction_P Parameter: Tissue Value: Flowers
  misc_feature: MA Experiment 20001911 PARAMETER Experiment Name: At_Drought_Reproduction_P Parameter: Treatment Value: Drought vs. No Drought
acgaataccattaccttagaacattcttaatcgaaaaaacgagggcgagagatatcttcttatccatggcggctattgctagtctgcaagcagttaatctcacatttaggcgacgtagcactcgatgtggaattgctgagccgagcggagagccagctccgatggggctgaagactagatacgaggatgggctggtggagagagtgttcatgggtctcttcgcgaggaagatggacaagttcgggtcgaagaagaagaaggacacgaaggagaagggtttttgggagtacgattacgagagcttcgtggaggtgtcaaagagagtgatgcagggacggtccagagtgcagcagcaagaggccgtgagggaggttcttctctctatgctgcctcctggtgctcctgaacagtttaggaaattgttcccaccaacgaaatgggctgcagagttcaatgccgctcttacagtgcctttctttcactggttggttggtccatctcaggtcatagaagtggaagtgaatggtgtgaaacagaagtggagttcttatcaagaaatgcaggtatctggagaacagtgggtgtgtaggaatgtgtgtgaatatgtgcaagattccaacccaagatttcttcaccaatgagtttggcctcccactcaccatgaacccaaattatgaagacatgagctgcgagatgatatacgggcaagcacctccggcctttgaggaggatgtagccaccaagcaaccttgtctagcagatatatgttctatgtcgaatccaagctccccaatctgccctaaactagaggcatgagtggagtggatcagcagccacttctttgacgggatgtgcaatttccaagcgatatacatactttttttcttttccaaacacatacattacatataaaagacagttgtgaagacgagttagtgttctttgttactattctggttgggttgtgtaaagtatacgataatacacttgagcttactcatcttctttatgttttaagtttgaactcgccatgttggttataacttggatctcaagtgttacttgcagtttgtattgtaatataaaaccaaaaactgagattagcttagctttaaagtaaccctctctgcttat

SEQ ID NO: 38992 - protein, 212 aa, Arabidopsis thaliana
  peptide (1)..(212): Ceres Seq. ID no. 12579540
  misc_feature (97)..(212): Homolog of NCBI NO: 18379048 NR Description: Expressed protein
  misc_feature (96)..(199): Homolog of NCBI NO: 22299485 NR Description: ORF_ID:tll1942~hypothetical protein
  misc_feature (22)..(204): Homolog of NCBI NO: 18408106 NR Description: expressed protein
EYHYLRTFLIEKTRARDIFLSMAAIASLQAVNLTFRRRSTRCGIAEPSGEPAPMGLKTRYEDGLVERVFMGLFARKMDKFGSKKKKDTKEKGFWEYDYESFVEVSKRVMQGRSRVQQQEAVREVLLSMLPPGAPEQFRKLFPPTKWAAEFNAALTVPFFHWLVGPSQVIEVEVNGVKQKWSSYQEMQVSGEQWVCRNVCEYVQDSNPRFLHQ

SEQ ID NO: 38993 - protein, 191 aa, Arabidopsis thaliana
  peptide (1)..(191): Ceres Seq. ID no. 12579541
  misc_feature (76)..(191): Homolog of NCBI NO: 18379048 NR Description: Expressed protein
  misc_feature (75)..(178): Homolog of NCBI NO: 22299485 NR Description: ORF_ID:tll1942~hypothetical protein
  misc_feature (1)..(183): Homolog of NCBI NO: 18408106 NR Description: expressed protein
MAAIASLQAVNLTFRRRSTRCGIAEPSGEPAPMGLKTRYEDGLVERVFMGLFARKMDKFGSKKKKDTKEKGFWEYDYESFVEVSKRVMQGRSRVQQQEAVREVLLSMLPPGAPEQFRKLFPPTKWAAEFNAALTVPFFHWLVGPSQVIEVEVNGVKQKWSSYQEMQVSGEQWVCRNVCEYVQDSNPRFLHQ

SEQ ID NO: 38994 - protein, 159 aa, Arabidopsis thaliana
  peptide (1)..(159): Ceres Seq. ID no. 12579542
  misc_feature (44)..(159): Homolog of NCBI NO: 18379048 NR Description: Expressed protein
  misc_feature (43)..(146): Homolog of NCBI NO: 22299485 NR Description: ORF_ID:tll1942~hypothetical protein
  misc_feature (1)..(151): Homolog of NCBI NO: 18408106 NR Description: expressed protein
MGLKTRYEDGLVERVFMGLFARKMDKFGSKKKKDTKEKGFWEYDYESFVEVSKRVMQGRSRVQQQEAVREVLLSMLPPGAPEQFRKLFPPTKWAAEFNAALTVPFFHWLVGPSQVIEVEVNGVKQKWSSYQEMQVSGEQWVCRNVCEYVQDSNPRFLHQ

SEQ ID NO: 38995 - DNA, 1488 bp, Arabidopsis thaliana
  misc_feature (1)..(1488): Ceres Seq. ID no. 13509260
  misc_feature: MA Experiment ID: 108434 Result: Up-regulated in Transcription
  misc_feature: MA Experiment 108434 PARAMETER Experiment Name: At_Root_Tips_cDNA_P Parameter: Tissue Value: Root Tips
  misc_feature: MA Experiment ID: 20000069 Result: Down-regulated in Transcription
  misc_feature: MA Experiment 20000069 PARAMETER Experiment Name: At_100uM_ABA_Mutants_cDNA_P Parameter: Plant Line Value: CS23
  misc_feature: MA Experiment 20000069 PARAMETER Experiment Name: At_100uM_ABA_Mutants_cDNA_P Parameter: Timepoint (hr) Value: 6
  misc_feature: MA Experiment 20000069 PARAMETER Experiment Name: At_100uM_ABA_Mutants_cDNA_P Parameter: Tissue Value: Aerial
  misc_feature: MA Experiment 20000069 PARAMETER Experiment Name: At_100uM_ABA_Mutants_cDNA_P Parameter: Treatment Value: 100uM ABA vs. No Treatment
  misc_feature: MA Experiment ID: 20000070 Result: Down-regulated in Transcription
  misc_feature: MA Experiment 20000070 PARAMETER Experiment Name: At_100uM_ABA_Mutants_cDNA_P Parameter: Plant Line Value: CS24
  misc_feature: MA Experiment 20000070 PARAMETER Experiment Name: At_100uM_ABA_Mutants_cDNA_P Parameter: Timepoint (hr) Value: 6
  misc_feature: MA Experiment 20000070 PARAMETER Experiment Name: At_100uM_ABA_Mutants_cDNA_P Parameter: Tissue Value: Aerial
  misc_feature: MA Experiment 20000070 PARAMETER Experiment Name: At_100uM_ABA_Mutants_cDNA_P Parameter: Treatment Value: 100uM ABA vs. No Treatment
  misc_feature: MA Experiment ID: 20000072 Result: Down-regulated in Transcription
  misc_feature: MA Experiment 20000072 PARAMETER Experiment Name: At_100uM_ABA_Mutants_cDNA_P Parameter: Plant Line Value: CS8105
  misc_feature: MA Experiment 20000072 PARAMETER Experiment Name: At_100uM_ABA_Mutants_cDNA_P Parameter: Timepoint (hr) Value: 6
  misc_feature: MA Experiment 20000072 PARAMETER Experiment Name: At_100uM_ABA_Mutants_cDNA_P Parameter: Tissue Value: Aerial
  misc_feature: MA Experiment 20000072 PARAMETER Experiment Name: At_100uM_ABA_Mutants_cDNA_P Parameter: Treatment Value: 100uM ABA vs. No Treatment
  misc_feature: MA Experiment ID: 20000089 Result: Down-regulated in Transcription
  misc_feature: MA Experiment ID: 20000117 Result: Down-regulated in Transcription
  misc_feature: MA Experiment 20000117 PARAMETER Experiment Name: At_100uM_ABA_Mutants_cDNA_P Parameter: Plant Line Value: Columbia
  misc_feature: MA Experiment 20000117 PARAMETER Experiment Name: At_100uM_ABA_Mutants_cDNA_P Parameter: Timepoint (hr) Value: 6
  misc_feature: MA Experiment 20000117 PARAMETER Experiment Name: At_100uM_ABA_Mutants_cDNA_P Parameter: Tissue Value: Aerial
  misc_feature: MA Experiment 20000117 PARAMETER Experiment Name: At_100uM_ABA_Mutants_cDNA_P Parameter: Treatment Value: 100uM ABA vs. No Treatment
  misc_feature: MA Experiment ID: 20000179 Result: Up-regulated in Transcription
  misc_feature: MA Experiment 20000179 PARAMETER Experiment Name: At_Germinating_Seeds_P Parameter: Age (hr) Value: 6 vs. 0
  misc_feature: MA Experiment 20000179 PARAMETER Experiment Name: At_Germinating_Seeds_P Parameter: Tissue Value: Germinating Seeds
  misc_feature: MA Experiment ID: 20000185 Result: Up-regulated in Transcription
  misc_feature: MA Experiment 20000185 PARAMETER Experiment Name: At_Roots__P Parameter: Age (day) Value: 7 vs. 21
  misc_feature: MA Experiment 20000185 PARAMETER Experiment Name: At_Roots__P Parameter: Organism Value: A. thaliana
  misc_feature: MA Experiment 20000185 PARAMETER Experiment Name: At_Roots__P Parameter: Tissue Value: Roots vs. Whole Plant
  misc_feature: MA Experiment ID: 20000437 Result: Down-regulated in Transcription
  misc_feature: MA Experiment 20000437 PARAMETER Experiment Name: At_Drought_P Parameter: Age (day) Value: 8
  misc_feature: MA Experiment 20000437 PARAMETER Experiment Name: At_Drought_P Parameter: Organism Value: A. thaliana
  misc_feature: MA Experiment 20000437 PARAMETER Experiment Name: At_Drought_P Parameter: Plant Line Value: WS
  misc_feature: MA Experiment 20000437 PARAMETER Experiment Name: At_Drought_P Parameter: Timepoint (hr) Value: 24
  misc_feature: MA Experiment 20000437 PARAMETER Experiment Name: At_Drought_P Parameter: Tissue Value: Whole Plant
  misc_feature: MA Experiment 20000437 PARAMETER Experiment Name: At_Drought_P Parameter: Treatment Value: Drought vs. No Drought
  misc_feature: MA Experiment ID: 20000794 Result: Down-regulated in Transcription
  misc_feature: MA Experiment 20000794 PARAMETER Experiment Name: At_Petals_P Parameter: Age (day) Value: 23-25 days
  misc_feature: MA Experiment 20000794 PARAMETER Experiment Name: At_Petals_P Parameter: Plant Line Value: WS
  misc_feature: MA Experiment 20000794 PARAMETER Experiment Name: At_Petals_P Parameter: Tissue Value: Petals vs. Whole plant
  misc_feature: MA Experiment ID: 20001459 Result: Up-regulated in Transcription
  misc_feature: MA Experiment 20001459 PARAMETER Experiment Name: At_50mM_NH4NO3_L-to-H_P Parameter: Age (day) Value: Undefined
  misc_feature: MA Experiment 20001459 PARAMETER Experiment Name: At_50mM_NH4NO3_L-to-H_P Parameter: Organism Value: Undefined
  misc_feature: MA Experiment 20001459 PARAMETER Experiment Name: At_50mM_NH4NO3_L-to-H_P Parameter: Plant Line Value: Undefined
  misc_feature: MA Experiment 20001459 PARAMETER Experiment Name: At_50mM_NH4NO3_L-to-H_P Parameter: Timepoint (hr) Value: 4
  misc_feature: MA Experiment 20001459 PARAMETER Experiment Name: At_50mM_NH4NO3_L-to-H_P Parameter: Tissue Value: Siliques
  misc_feature: MA Experiment 20001459 PARAMETER Experiment Name: At_50mM_NH4NO3_L-to-H_P Parameter: Treatment Value: 50mM NH4NO3 vs. 100mM Manitol
  misc_feature: MA Experiment ID: 20001905 Result: Down-regulated in Transcription
  misc_feature: MA Experiment 20001905 PARAMETER Experiment Name: At_Drought_Reproduction_P Parameter: Age (day) Value: 40
  misc_feature: MA Experiment 20001905 PARAMETER Experiment Name: At_Drought_Reproduction_P Parameter: Organism Value: A. thaliana
  misc_feature: MA Experiment 20001905 PARAMETER Experiment Name: At_Drought_Reproduction_P Parameter: Plant Line Value: WS
  misc_feature: MA Experiment 20001905 PARAMETER Experiment Name: At_Drought_Reproduction_P Parameter: Timepoint (day) Value: 10
  misc_feature: MA Experiment 20001905 PARAMETER Experiment Name: At_Drought_Reproduction_P Parameter: Tissue Value: Rosettes
  misc_feature: MA Experiment 20001905 PARAMETER Experiment Name: At_Drought_Reproduction_P Parameter: Treatment Value: Drought vs. No Drought
aagaaaccctagaaaattccgattcatcaactgagagagaagaagaattgagaaatgatgaagcgtctgatcccaacgttcaaccgcatcttggtgcagagagtcatccagcccgctaaaaccgaaagcggcattctcctacctgagaaatcctccaagctgcggttgaacgttgggatcagacgcttcatcattttcacattctcttctctctcgatatcatctaaatctctctcgatctcaatttcgcaaaatggctgacaagaagatcagaatcggaatcaacggtttcggaagaatcggtcgtttggttgctagagttgttcttcagagggatgatgttgagctcgtcgctgttaacgatcctttcatcaccaccgagtacatgacatacatgtttaagtatgacagtgttcacggtcagtggaagcaccatgagcttaaggtgaaggatgacaaaactcttctcttcggtgagaagccagtcactgttttcggcatcaggaaccctgaggacatcccatggggtgaggctggagctgactttgttgttgagtctactggtgtcttcactgacaaagacaaggctgctgctcacttgaagggtggtgctaaaaaggttgtcatctctgccccaagcaaagatgcgcccatgttcgttgttggtgtcaacgagcacgagtacaagtctgaccttgacattgtttccaacgctagttgcaccactaactgccttgctcctcttgccaaggttattaatgacaggtttggcattgttgagggactcatgaccactgtccactctatcactgctactcagaagacagttgatggtccatcaatgaaggactggagaggtggaagagctgcttccttcaacattattcctagcagcactggtgccgccaaggctgttgggaaagtgttgccatccctcaatggaaaattgaccggaatgtctttccgtgttccaaccgttgatgtctcagttgttgatctcaccgttagacttgagaaagctgcaacatacgacgaaatcaagaaggccatcaaggaggaatctgaaggcaaaatgaagggaattttgggatacactgaggatgatgttgtgtctaccgactttgttggtgacaacaggtcaagcattttcgatgccaaggctgggattgcattgagcgacaagtttgtgaagttggtgtcatggtacgacaacgaatggggttacagttctcgtgtcgttgaccttatcgttcacatgtcaaaggcctaagcttacaccggcgagagtttgtgtgtggttgagttcgtactgttctgaataaaaaaaaggagaaaagaaaactcgagttgttatgttttttcactgattccatgcgcagtcatgagagtttgtagcttttgtctttttgctttctcttaatgtttccctgctttatttactgaaaccattggtttggttttttatgttaattaagtttttagttcatt

SEQ ID NO: 38996 - protein, 338 aa, Arabidopsis thaliana; identical to SEQ ID NO: 22717
  peptide (1)..(338): Ceres Seq. ID no. 13509261
  misc_feature (157)..(318): Pfam Name: Glyceraldehyde 3-phosphate dehydrogenase, Pfam Description: Glyceraldehyde 3-phosphate dehydrogenase,
  misc_feature (157)..(318): Pfam Name: Glyceraldehyde 3-phosphate dehydrogenase, Pfam Description: Glyceraldehyde 3-phosphate dehydrogenase,
  misc_feature (5)..(336): Homolog of NCBI NO: 4539543 NR Description: glyceraldehyde-3-phosphate dehydrogenase
  misc_feature (6)..(337): Homolog of NCBI NO: 462137 NR Description: GLYCERALDEHYDE 3-PHOSPHATE DEHYDROGENASE,
  misc_feature (5)..(337): Homolog of NCBI NO: 462141 NR Description: Glyceraldehyde 3-phosphate dehydrogenase (GAPDH)
  misc_feature (1)..(336): Homolog of NCBI NO: 120669 NR Description: Glyceraldehyde 3-phosphate dehydrogenase,
  misc_feature (1)..(338): Homolog of NCBI NO: 22094840 NR Description: glyceraldehyde 3-phosphate dehydrogenase [Solanum
  misc_feature (5)..(336): Homolog of NCBI NO: 4539543 NR Description: glyceraldehyde-3-phosphate dehydrogenase
  misc_feature (5)..(337): Homolog of NCBI NO: 462141 NR Description: Glyceraldehyde 3-phosphate dehydrogenase (GAPDH)
  misc_feature (1)..(338): Homolog of NCBI NO: 22094840 NR Description: glyceraldehyde 3-phosphate dehydrogenase [Solanum
  misc_feature (1)..(338): Homolog of NCBI NO: 15222848 NR Description: glyceraldehyde-3-phosphate dehydrogenase -related
  misc_feature (1)..(338): Homolog of NCBI NO: 15229231 NR Description: glyceraldehyde-3-phosphate dehydrogenase C
  misc_feature (1)..(338): Homolog of NCBI NO: 21593240 NR Description: glyceraldehyde-3-phosphate dehydrogenase C
  misc_feature (1)..(338): Homolog of NCBI NO: 81622 NR Description: glyceraldehyde-3-phosphate dehydrogenase
  misc_feature (1)..(338): Homolog of NCBI NO: 120675 NR Description: Glyceraldehyde 3-phosphate dehydrogenase,
  misc_feature (1)..(336): Homolog of NCBI NO: 120669 NR Description: Glyceraldehyde 3-phosphate dehydrogenase,
  misc_feature (6)..(337): Homolog of NCBI NO: 462137 NR Description: GLYCERALDEHYDE 3-PHOSPHATE DEHYDROGENASE,
  misc_feature (1)..(338): Homolog of NCBI NO: 120675 NR Description: Glyceraldehyde 3-phosphate dehydrogenase,
  misc_feature (1)..(338): Homolog of NCBI NO: 81622 NR Description: glyceraldehyde-3-phosphate dehydrogenase
  misc_feature (1)..(338): Homolog of NCBI NO: 21593240 NR Description: glyceraldehyde-3-phosphate dehydrogenase C
  misc_feature (1)..(338): Homolog of NCBI NO: 15229231 NR Description: glyceraldehyde-3-phosphate dehydrogenase C
  misc_feature (1)..(338): Homolog of NCBI NO: 15222848 NR Description: glyceraldehyde-3-phosphate dehydrogenase -related

SEQ ID NO: 38997 - protein, 294 aa, Arabidopsis thaliana; identical to SEQ ID NO: 22718
  peptide (1)..(294): Ceres Seq. ID no. 13509262
  misc_feature (113)..(274): Pfam Name: Glyceraldehyde 3-phosphate dehydrogenase, Pfam Description: Glyceraldehyde 3-phosphate dehydrogenase,
  misc_feature (113)..(274): Pfam Name: Glyceraldehyde 3-phosphate dehydrogenase, Pfam Description: Glyceraldehyde 3-phosphate dehydrogenase,
  misc_feature (1)..(292): Homolog of NCBI NO: 4539543 NR Description: glyceraldehyde-3-phosphate dehydrogenase
  misc_feature (1)..(293): Homolog of NCBI NO: 462137 NR Description: GLYCERALDEHYDE 3-PHOSPHATE DEHYDROGENASE,
  misc_feature (1)..(293): Homolog of NCBI NO: 462141 NR Description: Glyceraldehyde 3-phosphate dehydrogenase (GAPDH)
  misc_feature (1)..(292): Homolog of NCBI NO: 120669 NR Description: Glyceraldehyde 3-phosphate dehydrogenase,
  misc_feature (1)..(294): Homolog of NCBI NO: 22094840 NR Description: glyceraldehyde 3-phosphate dehydrogenase [Solanum
  misc_feature (1)..(292): Homolog of NCBI NO: 4539543 NR Description: glyceraldehyde-3-phosphate dehydrogenase
  misc_feature (1)..(293): Homolog of NCBI NO: 462141 NR Description: Glyceraldehyde 3-phosphate dehydrogenase (GAPDH)
  misc_feature (1)..(294): Homolog of NCBI NO: 22094840 NR Description: glyceraldehyde 3-phosphate dehydrogenase [Solanum
  misc_feature (1)..(294): Homolog of NCBI NO: 15222848 NR Description: glyceraldehyde-3-phosphate dehydrogenase -related
  misc_feature (1)..(294): Homolog of NCBI NO: 15229231 NR Description: glyceraldehyde-3-phosphate dehydrogenase C
  misc_feature (1)..(294): Homolog of NCBI NO: 21593240 NR Description: glyceraldehyde-3-phosphate dehydrogenase C
  misc_feature (1)..(294): Homolog of NCBI NO: 81622 NR Description: glyceraldehyde-3-phosphate dehydrogenase
  misc_feature (1)..(294): Homolog of NCBI NO: 120675 NR Description: Glyceraldehyde 3-phosphate dehydrogenase,
  misc_feature (1)..(292): Homolog of NCBI NO: 120669 NR Description: Glyceraldehyde 3-phosphate dehydrogenase,
  misc_feature (1)..(293): Homolog of NCBI NO: 462137 NR Description: GLYCERALDEHYDE 3-PHOSPHATE DEHYDROGENASE,
  misc_feature (1)..(294): Homolog of NCBI NO: 120675 NR Description: Glyceraldehyde 3-phosphate dehydrogenase,
  misc_feature (1)..(294): Homolog of NCBI NO: 81622 NR Description: glyceraldehyde-3-phosphate dehydrogenase
  misc_feature (1)..(294): Homolog of NCBI NO: 21593240 NR Description: glyceraldehyde-3-phosphate dehydrogenase C
  misc_feature (1)..(294): Homolog of NCBI NO: 15229231 NR Description: glyceraldehyde-3-phosphate dehydrogenase C
  misc_feature (1)..(294): Homolog of NCBI NO: 15222848 NR Description: glyceraldehyde-3-phosphate dehydrogenase -related

SEQ ID NO: 38998 - protein, 291 aa, Arabidopsis thaliana; identical to SEQ ID NO: 22719
  peptide (1)..(291): Ceres Seq. ID no. 13509263
  misc_feature (110)..(271): Pfam Name: Glyceraldehyde 3-phosphate dehydrogenase, Pfam Description: Glyceraldehyde 3-phosphate dehydrogenase,
  misc_feature (110)..(271): Pfam Name: Glyceraldehyde 3-phosphate dehydrogenase, Pfam Description: Glyceraldehyde 3-phosphate dehydrogenase,
  misc_feature (1)..(289): Homolog of NCBI NO: 4539543 NR Description: glyceraldehyde-3-phosphate dehydrogenase
  misc_feature (1)..(290): Homolog of NCBI NO: 462137 NR Description: GLYCERALDEHYDE 3-PHOSPHATE DEHYDROGENASE,
  misc_feature (1)..(290): Homolog of NCBI NO: 462141 NR Description: Glyceraldehyde 3-phosphate dehydrogenase (GAPDH)
  misc_feature (1)..(289): Homolog of NCBI NO: 120669 NR Description: Glyceraldehyde 3-phosphate dehydrogenase,
  misc_feature (1)..(291): Homolog of NCBI NO: 22094840 NR Description: glyceraldehyde 3-phosphate dehydrogenase [Solanum
  misc_feature (1)..(289): Homolog of NCBI NO: 4539543 NR Description: glyceraldehyde-3-phosphate dehydrogenase
  misc_feature (1)..(290): Homolog of NCBI NO: 462141 NR Description: Glyceraldehyde 3-phosphate dehydrogenase (GAPDH)
  misc_feature (1)..(291): Homolog of NCBI NO: 22094840 NR Description: glyceraldehyde 3-phosphate dehydrogenase [Solanum
  misc_feature (1)..(291): Homolog of NCBI NO: 15222848 NR Description: glyceraldehyde-3-phosphate dehydrogenase -related
  misc_feature (1)..(291): Homolog of NCBI NO: 15229231 NR Description: glyceraldehyde-3-phosphate dehydrogenase C
  misc_feature (1)..(291): Homolog of NCBI NO: 21593240 NR Description: glyceraldehyde-3-phosphate dehydrogenase C
  misc_feature (1)..(291): Homolog of NCBI NO: 81622 NR Description: glyceraldehyde-3-phosphate dehydrogenase
  misc_feature (1)..(291): Homolog of NCBI NO: 120675 NR Description: Glyceraldehyde 3-phosphate dehydrogenase,
  misc_feature (1)..(289): Homolog of NCBI NO: 120669 NR Description: Glyceraldehyde 3-phosphate dehydrogenase,
  misc_feature (1)..(290): Homolog of NCBI NO: 462137 NR Description: GLYCERALDEHYDE 3-PHOSPHATE DEHYDROGENASE,
  misc_feature (1)..(291): Homolog of NCBI NO: 120675 NR Description: Glyceraldehyde 3-phosphate dehydrogenase,
  misc_feature (1)..(291): Homolog of NCBI NO: 81622 NR Description: glyceraldehyde-3-phosphate dehydrogenase
  misc_feature (1)..(291): Homolog of NCBI NO: 21593240 NR Description: glyceraldehyde-3-phosphate dehydrogenase C
  misc_feature (1)..(291): Homolog of NCBI NO: 15229231 NR Description: glyceraldehyde-3-phosphate dehydrogenase C
  misc_feature (1)..(291): Homolog of NCBI NO: 15222848 NR Description: glyceraldehyde-3-phosphate dehydrogenase -related

SEQ ID NO: 38999 - DNA, 1649 bp, Arabidopsis thaliana; identical to SEQ ID NO: 28343
  misc_feature (1)..(1649): Ceres Seq. ID no. 13645741
  misc_feature: MA Experiment ID: 108434 Result: Up-regulated in Transcription
  misc_feature: MA Experiment 108434 PARAMETER Experiment Name: At_Root_Tips_cDNA_P Parameter: Tissue Value: Root Tips
  misc_feature: MA Experiment ID: 108461 Result: Down-regulated in Transcription
  misc_feature: MA Experiment 108461 PARAMETER Experiment Name: At_Germinating_Seeds_cDNA_P Parameter: Age (day) Value: 1 vs. 0
  misc_feature: MA Experiment 108461 PARAMETER Experiment Name: At_Germinating_Seeds_cDNA_P Parameter: Tissue Value: Germinating Seeds
  misc_feature: MA Experiment ID: 108462 Result: Down-regulated in Transcription
  misc_feature: MA Experiment 108462 PARAMETER Experiment Name: At_Germinating_Seeds_cDNA_P Parameter: Age (day) Value: 2 vs. 0
  misc_feature: MA Experiment 108462 PARAMETER Experiment Name: At_Germinating_Seeds_cDNA_P Parameter: Tissue Value: Germinating Seeds
  misc_feature: MA Experiment ID: 108463 Result: Down-regulated in Transcription
  misc_feature: MA Experiment 108463 PARAMETER Experiment Name: At_Germinating_Seeds_cDNA_P Parameter: Age (day) Value: 3 vs. 0
  misc_feature: MA Experiment 108463 PARAMETER Experiment Name: At_Germinating_Seeds_cDNA_P Parameter: Tissue Value: Germinating Seeds
  misc_feature: MA Experiment ID: 108464 Result: Down-regulated in Transcription
  misc_feature: MA Experiment 108464 PARAMETER Experiment Name: At_Germinating_Seeds_cDNA_P Parameter: Age (day) Value: 4 vs. 0
  misc_feature: MA Experiment 108464 PARAMETER Experiment Name: At_Germinating_Seeds_cDNA_P Parameter: Tissue Value: Germinating Seeds
  misc_feature: MA Experiment ID: 108488 Result: Up-regulated in Transcription
  misc_feature: MA Experiment ID: 108489 Result: Up-regulated in Transcription
  misc_feature: MA Experiment ID: 108572 Result: Down-regulated in Transcription
  misc_feature: MA Experiment 108572 PARAMETER Experiment Name: At_Drought_cDNA_P Parameter: Timepoint (hr) Value: 1
  misc_feature: MA Experiment 108572 PARAMETER Experiment Name: At_Drought_cDNA_P Parameter: Tissue Value: Aerial
  misc_feature: MA Experiment 108572 PARAMETER Experiment Name: At_Drought_cDNA_P Parameter: Treatment Value: Drought vs. No Drought
  misc_feature: MA Experiment ID: 108573 Result: Down-regulated in Transcription
  misc_feature: MA Experiment 108573 PARAMETER Experiment Name: At_Drought_cDNA_P Parameter: Timepoint (hr) Value: 6
  misc_feature: MA Experiment 108573 PARAMETER Experiment Name: At_Drought_cDNA_P Parameter: Tissue Value: Aerial
  misc_feature: MA Experiment 108573 PARAMETER Experiment Name: At_Drought_cDNA_P Parameter: Treatment Value: Drought vs. No Drought
  misc_feature: MA Experiment ID: 108595 Result: Down-regulated in Transcription
  misc_feature: MA Experiment 108595 PARAMETER Experiment Name: At_Ler-pi_Ovule_cDNA_P Parameter: Plant Line Value: null
  misc_feature: MA Experiment ID: 20000179 Result: Down-regulated in Transcription
  misc_feature: MA Experiment 20000179 PARAMETER Experiment Name: At_Germinating_Seeds_P Parameter: Age (hr) Value: 6 vs. 0
  misc_feature: MA Experiment 20000179 PARAMETER Experiment Name: At_Germinating_Seeds_P Parameter: Tissue Value: Germinating Seeds
  misc_feature: MA Experiment ID: 20000180 Result: Down-regulated in Transcription
  misc_feature: MA Experiment 20000180 PARAMETER Experiment Name: At_Germinating_Seeds_P Parameter: Age (hr) Value: 24 vs. 0
  misc_feature: MA Experiment 20000180 PARAMETER Experiment Name: At_Germinating_Seeds_P Parameter: Tissue Value: Germinating Seeds
  misc_feature: MA Experiment ID: 20000227 Result: Up-regulated in Transcription
  misc_feature: MA Experiment 20000227 PARAMETER Experiment Name: At_Root-Tips-vs-Tops_P Parameter: Tissue Value: Root Tips vs. Root Tops
  misc_feature: MA Experiment ID: 20001451 Result: Down-regulated in Transcription
  misc_feature: MA Experiment 20001451 PARAMETER Experiment Name: At_Far-red-induction_P Parameter: Age (day) Value: 7
  misc_feature: MA Experiment 20001451 PARAMETER Experiment Name: At_Far-red-induction_P Parameter: Light Value: Far-red vs. White
  misc_feature: MA Experiment 20001451 PARAMETER Experiment Name: At_Far-red-induction_P Parameter: Organism Value: A. thaliana
  misc_feature: MA Experiment 20001451 PARAMETER Experiment Name: At_Far-red-induction_P Parameter: Plant Line Value: Columbia
  misc_feature: MA Experiment 20001451 PARAMETER Experiment Name: At_Far-red-induction_P Parameter: Timepoint (hr) Value: 24
  misc_feature: MA Experiment 20001451 PARAMETER Experiment Name: At_Far-red-induction_P Parameter: Tissue Value: Whole Plant
  misc_feature: MA Experiment ID: 20001458 Result: Up-regulated in Transcription
  misc_feature: MA Experiment 20001458 PARAMETER Experiment Name: At_50mM_NH4NO3_L-to-H_P Parameter: Age (day) Value: Undefined
  misc_feature: MA Experiment 20001458 PARAMETER Experiment Name: At_50mM_NH4NO3_L-to-H_P Parameter: Organism Value: Undefined
  misc_feature: MA Experiment 20001458 PARAMETER Experiment Name: At_50mM_NH4NO3_L-to-H_P Parameter: Plant Line Value: Undefined
  misc_feature: MA Experiment 20001458 PARAMETER Experiment Name: At_50mM_NH4NO3_L-to-H_P Parameter: Timepoint (hr) Value: 2
  misc_feature: MA Experiment 20001458 PARAMETER Experiment Name: At_50mM_NH4NO3_L-to-H_P Parameter: Tissue Value: Siliques
  misc_feature: MA Experiment 20001458 PARAMETER Experiment Name: At_50mM_NH4NO3_L-to-H_P Parameter: Treatment Value: 50mM NH4NO3 vs. 100mM Manitol
  misc_feature: MA Experiment ID: 20001556 Result: Up-regulated in Transcription
  misc_feature: MA Experiment 20001556 PARAMETER Experiment Name: At_Drought_Soil_Dry_P Parameter: Age (day) Value: 26
  misc_feature: MA Experiment 20001556 PARAMETER Experiment Name: At_Drought_Soil_Dry_P Parameter: Organism Value: A. thaliana
  misc_feature: MA Experiment 20001556 PARAMETER Experiment Name: At_Drought_Soil_Dry_P Parameter: Plant Line Value: WS
  misc_feature: MA Experiment 20001556 PARAMETER Experiment Name: At_Drought_Soil_Dry_P Parameter: Post Timepoint (hr) Value: None
  misc_feature: MA Experiment 20001556 PARAMETER Experiment Name: At_Drought_Soil_Dry_P Parameter: Post-Treatment Value: None
  misc_feature: MA Experiment 20001556 PARAMETER Experiment Name: At_Drought_Soil_Dry_P Parameter: Timepoint (day) Value: 12
  misc_feature: MA Experiment 20001556 PARAMETER Experiment Name: At_Drought_Soil_Dry_P Parameter: Treatment Value: Drought vs. No Drought
  misc_feature: MA Experiment ID: 20001557 Result: Up-regulated in Transcription
  misc_feature: MA Experiment 20001557 PARAMETER Experiment Name: At_Drought_Soil_Dry_P Parameter: Age (day) Value: 27
  misc_feature: MA Experiment 20001557 PARAMETER Experiment Name: At_Drought_Soil_Dry_P Parameter: Organism Value: A. thaliana
  misc_feature: MA Experiment 20001557 PARAMETER Experiment Name: At_Drought_Soil_Dry_P Parameter: Plant Line Value: WS
  misc_feature: MA Experiment 20001557 PARAMETER Experiment Name: At_Drought_Soil_Dry_P Parameter: Post Timepoint (hr) Value: 3
  misc_feature: MA Experiment 20001557 PARAMETER Experiment Name: At_Drought_Soil_Dry_P Parameter: Post-Treatment Value: Re-Water vs. No Drought
  misc_feature: MA Experiment 20001557 PARAMETER Experiment Name: At_Drought_Soil_Dry_P Parameter: Timepoint (day) Value: 13
  misc_feature: MA Experiment 20001557 PARAMETER Experiment Name: At_Drought_Soil_Dry_P Parameter: Treatment Value: Drought vs. No Drought
  misc_feature: MA Experiment ID: 20001558 Result: Up-regulated in Transcription
  misc_feature: MA Experiment 20001558 PARAMETER Experiment Name: At_Drought_Soil_Dry_P Parameter: Age (day) Value: 27
  misc_feature: MA Experiment 20001558 PARAMETER Experiment Name: At_Drought_Soil_Dry_P Parameter: Organism Value: A. thaliana
  misc_feature: MA Experiment 20001558 PARAMETER Experiment Name: At_Drought_Soil_Dry_P Parameter: Plant Line Value: WS
  misc_feature: MA Experiment 20001558 PARAMETER Experiment Name: At_Drought_Soil_Dry_P Parameter: Post Timepoint (hr) Value: 6
  misc_feature: MA Experiment 20001558 PARAMETER Experiment Name: At_Drought_Soil_Dry_P Parameter: Post-Treatment Value: Re-Water vs. No Drought
  misc_feature: MA Experiment 20001558 PARAMETER Experiment Name: At_Drought_Soil_Dry_P Parameter: Timepoint (day) Value: 13
  misc_feature: MA Experiment 20001558 PARAMETER Experiment Name: At_Drought_Soil_Dry_P Parameter: Treatment Value: Drought vs. No Drought
  misc_feature: MA Experiment ID: 20001560 Result: Up-regulated in Transcription
  misc_feature: MA Experiment 20001560 PARAMETER Experiment Name: At_Drought_Soil_Dry_P Parameter: Age (day) Value: 28
  misc_feature: MA Experiment 20001560 PARAMETER Experiment Name: At_Drought_Soil_Dry_P Parameter: Organism Value: A. thaliana
  misc_feature: MA Experiment 20001560 PARAMETER Experiment Name: At_Drought_Soil_Dry_P Parameter: Plant Line Value: WS
  misc_feature: MA Experiment 20001560 PARAMETER Experiment Name: At_Drought_Soil_Dry_P Parameter: Post Timepoint (hr) Value: None
  misc_feature: MA Experiment 20001560 PARAMETER Experiment Name: At_Drought_Soil_Dry_P Parameter: Post-Treatment Value: None
  misc_feature: MA Experiment 20001560 PARAMETER Experiment Name: At_Drought_Soil_Dry_P Parameter: Timepoint (day) Value: 14
  misc_feature: MA Experiment 20001560 PARAMETER Experiment Name: At_Drought_Soil_Dry_P Parameter: Treatment Value: Drought vs. No Drought
  misc_feature: MA Experiment ID: 20001757 Result: Up-regulated in Transcription
  misc_feature: MA Experiment 20001757 PARAMETER Experiment Name: At_50mM_NH4NO3_L-to-H_P Parameter: Timepoint (hr) Value: 6
  misc_feature: MA Experiment 20001757 PARAMETER Experiment Name: At_50mM_NH4NO3_L-to-H_P Parameter: Tissue Value: Leaf
  misc_feature: MA Experiment 20001757 PARAMETER Experiment Name: At_50mM_NH4NO3_L-to-H_P Parameter: Treatment Value: 50mM NH4NO3 vs 100mM Mannitol

SEQ ID NO: 39000 - protein, 444 aa, Arabidopsis thaliana; identical to SEQ ID NO: 28344
  peptide (1)..(444): Ceres Seq. ID no. 13645742
  misc_feature (127)..(423): Pfam Name: Bystin Pfam Description: Bystin
  misc_feature (127)..(423): Pfam Name: Bystin Pfam Description: Bystin
  misc_feature (128)..(420): Homolog of NCBI NO: 15011984 NR Description: bystin [Homo sapiens]
  misc_feature (128)..(420): Homolog of NCBI NO: 15208645 NR Description: bystin [Homo sapiens]
  misc_feature (127)..(420): Homolog of NCBI NO: 21264404 NR Description: Bystin
  misc_feature (116)..(420): Homolog of NCBI NO: 33873575 NR Description: BYSL protein [Homo sapiens]
  misc_feature (116)..(420): Homolog of NCBI NO: 38566213 NR Description: BYSL protein [Homo sapiens]
  misc_feature (128)..(420): Homolog of NCBI NO: 15011984 NR Description: bystin [Homo sapiens]
  misc_feature (127)..(420): Homolog of NCBI NO: 21264404 NR Description: Bystin
  misc_feature (116)..(420): Homolog of NCBI NO: 38566213 NR Description: BYSL protein [Homo sapiens]
  misc_feature (1)..(444): Homolog of NCBI NO: 20268780 NR Description: putative bystin [Arabidopsis thaliana]
  misc_feature (1)..(444): Homolog of NCBI NO: 15222394 NR Description: bystin -related [Arabidopsis thaliana]
  misc_feature (12)..(418): Homolog of NCBI NO: 31419416 NR Description: Unknown (protein for MGC:63889) [Danio rerio]
  misc_feature (15)..(420): Homolog of NCBI NO: 29792064 NR Description: bystin-like [Homo sapiens]
  misc_feature (111)..(421): Homolog of NCBI NO: 32996727 NR Description: bystin-like [Rattus norvegicus]
  misc_feature (116)..(420): Homolog of NCBI NO: 33873575 NR Description: BYSL protein [Homo sapiens]
  misc_feature (128)..(420): Homolog of NCBI NO: 15208645 NR Description: bystin [Homo sapiens]
  misc_feature (111)..(421): Homolog of NCBI NO: 32996727 NR Description: bystin-like [Rattus norvegicus]
  misc_feature (15)..(420): Homolog of NCBI NO: 29792064 NR Description: bystin-like [Homo sapiens]
  misc_feature (12)..(418): Homolog of NCBI NO: 31419416 NR Description: Unknown (protein for MGC:63889) [Danio rerio]
  misc_feature (1)..(444): Homolog of NCBI NO: 15222394 NR Description: bystin -related [Arabidopsis thaliana]
  misc_feature (1)..(444): Homolog of NCBI NO: 20268780 NR Description: putative bystin [Arabidopsis thaliana]

SEQ ID NO: 39001 - protein, 400 aa, Arabidopsis thaliana; identical to SEQ ID NO: 28345
  peptide (1)..(400): Ceres Seq. ID no. 13645743
  misc_feature (83)..(379): Pfam Name: Bystin Pfam Description: Bystin
  misc_feature (83)..(379): Pfam Name: Bystin Pfam Description: Bystin
  misc_feature (84)..(376): Homolog of NCBI NO: 15011984 NR Description: bystin [Homo sapiens]
  misc_feature (84)..(376): Homolog of NCBI NO: 15208645 NR Description: bystin [Homo sapiens]
  misc_feature (83)..(376): Homolog of NCBI NO: 21264404 NR Description: Bystin
  misc_feature (72)..(376): Homolog of NCBI NO: 33873575 NR Description: BYSL protein [Homo sapiens]
  misc_feature (72)..(376): Homolog of NCBI NO: 38566213 NR Description: BYSL protein [Homo sapiens]
  misc_feature (84)..(376): Homolog of NCBI NO: 15011984 NR Description: bystin [Homo sapiens]
  misc_feature (83)..(376): Homolog of NCBI NO: 21264404 NR Description: Bystin
  misc_feature (72)..(376): Homolog of NCBI NO: 38566213 NR Description: BYSL protein [Homo sapiens]
  misc_feature (1)..(400): Homolog of NCBI NO: 20268780 NR Description: putative bystin [Arabidopsis thaliana]
  misc_feature (1)..(400): Homolog of NCBI NO: 15222394 NR Description: bystin -related [Arabidopsis thaliana]
  misc_feature (1)..(374): Homolog of NCBI NO: 31419416 NR Description: Unknown (protein for MGC:63889) [Danio rerio]
  misc_feature (1)..(376): Homolog of NCBI NO: 29792064 NR Description: bystin-like [Homo sapiens]
  misc_feature (67)..(377): Homolog of NCBI NO: 32996727 NR Description: bystin-like [Rattus norvegicus]
  misc_feature (72)..(376): Homolog of NCBI NO: 33873575 NR Description: BYSL protein [Homo sapiens]
  misc_feature (84)..(376): Homolog of NCBI NO: 15208645 NR Description: bystin [Homo sapiens]
  misc_feature (67)..(377): Homolog of NCBI NO: 32996727 NR Description: bystin-like [Rattus norvegicus]
  misc_feature (1)..(376): Homolog of NCBI NO: 29792064 NR Description: bystin-like [Homo sapiens]
  misc_feature (1)..(374): Homolog of NCBI NO: 31419416 NR Description: Unknown (protein for MGC:63889) [Danio rerio]
  misc_feature (1)..(400): Homolog of NCBI NO: 15222394 NR Description: bystin -related [Arabidopsis thaliana]
  misc_feature (1)..(400): Homolog of NCBI NO: 20268780 NR Description: putative bystin [Arabidopsis thaliana]

SEQ ID NO: 39002 - protein, 395 aa, Arabidopsis thaliana; identical to SEQ ID NO: 28346
  peptide (1)..(395): Ceres Seq. ID no. 13645744
  misc_feature (78)..(374): Pfam Name: Bystin Pfam Description: Bystin
  misc_feature (78)..(374): Pfam Name: Bystin Pfam Description: Bystin
  misc_feature (79)..(371): Homolog of NCBI NO: 15011984 NR Description: bystin [Homo sapiens]
  misc_feature (79)..(371): Homolog of NCBI NO: 15208645 NR Description: bystin [Homo sapiens]
  misc_feature (78)..(371): Homolog of NCBI NO: 21264404 NR Description: Bystin
  misc_feature (67)..(371): Homolog of NCBI NO: 33873575 NR Description: BYSL protein [Homo sapiens]
  misc_feature (67)..(371): Homolog of NCBI NO: 38566213 NR Description: BYSL protein [Homo sapiens]
  misc_feature (79)..(371): Homolog of NCBI NO: 15011984 NR Description: bystin [Homo sapiens]
  misc_feature (78)..(371): Homolog of NCBI NO: 21264404 NR Description: Bystin
  misc_feature (67)..(371): Homolog of NCBI NO: 38566213 NR Description: BYSL protein [Homo sapiens]
  misc_feature (1)..(395): Homolog of NCBI NO: 20268780 NR Description: putative bystin [Arabidopsis thaliana]
  misc_feature (1)..(395): Homolog of NCBI NO: 15222394 NR Description: bystin -related [Arabidopsis thaliana]
  misc_feature (1)..(369): Homolog of NCBI NO: 31419416 NR Description: Unknown (protein for MGC:63889) [Danio rerio]
  misc_feature (1)..(371): Homolog of NCBI NO: 29792064 NR Description: bystin-like [Homo sapiens]
  misc_feature (62)..(372): Homolog of NCBI NO: 32996727 NR Description: bystin-like [Rattus norvegicus]
  misc_feature (67)..(371): Homolog of NCBI NO: 33873575 NR Description: BYSL protein [Homo sapiens]
  misc_feature (79)..(371): Homolog of NCBI NO: 15208645 NR Description: bystin [Homo sapiens]
  misc_feature (62)..(372): Homolog of NCBI NO: 32996727 NR Description: bystin-like [Rattus norvegicus]
  misc_feature (1)..(371): Homolog of NCBI NO: 29792064 NR Description: bystin-like [Homo sapiens]
  misc_feature (1)..(369): Homolog of NCBI NO: 31419416 NR Description: Unknown (protein for MGC:63889) [Danio rerio]
  misc_feature (1)..(395): Homolog of NCBI NO: 15222394 NR Description: bystin -related [Arabidopsis thaliana]
  misc_feature (1)..(395): Homolog of NCBI NO: 20268780 NR Description: putative bystin [Arabidopsis thaliana]

SEQ ID NO: 39003 - DNA, 1578 bp, Arabidopsis thaliana
  misc_feature (1)..(1578): Ceres Seq. ID no. 12329047
  misc_feature: MA Experiment ID: 108433 Result: Up-regulated in Transcription
  misc_feature: MA Experiment 108433 PARAMETER Experiment Name: At_rhl_Mutant2_cDNA_P Parameter: Age (day) Value: 7
  misc_feature: MA Experiment 108433 PARAMETER Experiment Name: At_rhl_Mutant2_cDNA_P Parameter: Organism Value: A. thaliana
  misc_feature: MA Experiment 108433 PARAMETER Experiment Name: At_rhl_Mutant2_cDNA_P Parameter: Plant Line Value: rhl Mutant vs. wt landsburg
  misc_feature: MA Experiment 108433 PARAMETER Experiment Name: At_rhl_Mutant2_cDNA_P Parameter: Tissue Value: Roots
  misc_feature: MA Experiment ID: 108461 Result: Up-regulated in Transcription
  misc_feature: MA Experiment 108461 PARAMETER Experiment Name: At_Germinating_Seeds_cDNA_P Parameter: Age (day) Value: 1 vs. 0
  misc_feature: MA Experiment 108461 PARAMETER Experiment Name: At_Germinating_Seeds_cDNA_P Parameter: Tissue Value: Germinating Seeds
  misc_feature: MA Experiment ID: 108464 Result: Up-regulated in Transcription
  misc_feature: MA Experiment 108464 PARAMETER Experiment Name: At_Germinating_Seeds_cDNA_P Parameter: Age (day) Value: 4 vs. 0
  misc_feature: MA Experiment 108464 PARAMETER Experiment Name: At_Germinating_Seeds_cDNA_P Parameter: Tissue Value: Germinating Seeds
  misc_feature: MA Experiment ID: 108569 Result: Up-regulated in Transcription
  misc_feature: MA Experiment 108569 PARAMETER Experiment Name: At_0.001%_MeJA__cDNA_P Parameter: Timepoint (hr) Value: 6
  misc_feature: MA Experiment 108569 PARAMETER Experiment Name: At_0.001%_MeJA__cDNA_P Parameter: Tissue Value: Aerial
  misc_feature: MA Experiment 108569 PARAMETER Experiment Name: At_0.001%_MeJA__cDNA_P Parameter: Treatment Value: 0.001% MeJA vs. No Treatment
  misc_feature: MA Experiment ID: 108594 Result: Down-regulated in Transcription
  misc_feature: MA Experiment 108594 PARAMETER Experiment Name: At_Ler-rhl_Root_cDNA_P Parameter: Plant Line Value: null
  misc_feature: MA Experiment ID: 108595 Result: Up-regulated in Transcription
  misc_feature: MA Experiment 108595 PARAMETER Experiment Name: At_Ler-pi_Ovule_cDNA_P Parameter: Plant Line Value: null
  misc_feature: MA Experiment ID: 20000089 Result: Up-regulated in Transcription
  misc_feature: MA Experiment ID: 20000179 Result: Up-regulated in Transcription
  misc_feature: MA Experiment 20000179 PARAMETER Experiment Name: At_Germinating_Seeds_P Parameter: Age (hr) Value: 6 vs. 0
  misc_feature: MA Experiment 20000179 PARAMETER Experiment Name: At_Germinating_Seeds_P Parameter: Tissue Value: Germinating Seeds
  misc_feature: MA Experiment ID: 20000180 Result: Up-regulated in Transcription
  misc_feature: MA Experiment 20000180 PARAMETER Experiment Name: At_Germinating_Seeds_P Parameter: Age (hr) Value: 24 vs. 0
  misc_feature: MA Experiment 20000180 PARAMETER Experiment Name: At_Germinating_Seeds_P Parameter: Tissue Value: Germinating Seeds
  misc_feature: MA Experiment ID: 20000184 Result: Up-regulated in Transcription
  misc_feature: MA Experiment 20000184 PARAMETER Experiment Name: At_Shoots__P Parameter: Age (day) Value: 7
  misc_feature: MA Experiment 20000184 PARAMETER Experiment Name: At_Shoots__P Parameter: Tissue Value: Shoots vs. Whole Plant
  misc_feature: MA Experiment ID: 20000185 Result: Up-regulated in Transcription
  misc_feature: MA Experiment 20000185 PARAMETER Experiment Name: At_Roots__P Parameter: Age (day) Value: 7 vs. 21
  misc_feature: MA Experiment 20000185 PARAMETER Experiment Name: At_Roots__P Parameter: Organism Value: A. thaliana
  misc_feature: MA Experiment 20000185 PARAMETER Experiment Name: At_Roots__P Parameter: Tissue Value: Roots vs. Whole Plant
  misc_feature: MA Experiment ID: 20000211 Result: Up-regulated in Transcription
  misc_feature: MA Experiment 20000211 PARAMETER Experiment Name: At_0.001percent_MeJA__P Parameter: Age (day) Value: 14
  misc_feature: MA Experiment 20000211 PARAMETER Experiment Name: At_0.001percent_MeJA__P Parameter: Organism Value: A. thaliana
  misc_feature: MA Experiment 20000211 PARAMETER Experiment Name: At_0.001percent_MeJA__P Parameter: Plant Line Value: WS
  misc_feature: MA Experiment 20000211 PARAMETER Experiment Name: At_0.001percent_MeJA__P Parameter: Timepoint (hr) Value: 1
  misc_feature: MA Experiment 20000211 PARAMETER Experiment Name: At_0.001percent_MeJA__P Parameter: Tissue Value: Aerial
  misc_feature: MA Experiment 20000211 PARAMETER Experiment Name: At_0.001percent_MeJA__P Parameter: Treatment Value: 0.001percent MeJA vs. No Treatment
  misc_feature: MA Experiment ID: 20000224 Result: Up-regulated in Transcription
  misc_feature: MA Experiment ID: 20000227 Result: Down-regulated in Transcription
  misc_feature: MA Experiment 20000227 PARAMETER Experiment Name: At_Root-Tips-vs-Tops_P Parameter: Tissue Value: Root Tips vs. Root Tops
  misc_feature: MA Experiment ID: 20000264 Result: Down-regulated in Transcription
  misc_feature: MA Experiment 20000264 PARAMETER Experiment Name: At_Open_Flower_P Parameter: Age (day) Value: 21
  misc_feature: MA Experiment 20000264 PARAMETER Experiment Name: At_Open_Flower_P Parameter: Plant Line Value: WS
  misc_feature: MA Experiment 20000264 PARAMETER Experiment Name: At_Open_Flower_P Parameter: Tissue Value: Open Flower vs. Whole Plant
  misc_feature: MA Experiment ID: 20000265 Result: Down-regulated in Transcription
  misc_feature: MA Experiment 20000265 PARAMETER Experiment Name: At_Open_Flower_P Parameter: Age (day) Value: 21
  misc_feature: MA Experiment 20000265 PARAMETER Experiment Name: At_Open_Flower_P Parameter: Plant Line Value: WS
  misc_feature: MA Experiment 20000265 PARAMETER Experiment Name: At_Open_Flower_P Parameter: Tissue Value: Closed Flower vs. Whole Plant
  misc_feature: MA Experiment ID: 20000286 Result: Down-regulated in Transcription
  misc_feature: MA Experiment 20000286 PARAMETER Experiment Name: At_Open_Flower_P Parameter: Age (day) Value: 21
  misc_feature: MA Experiment 20000286 PARAMETER Experiment Name: At_Open_Flower_P Parameter: Plant Line Value: WS
  misc_feature: MA Experiment 20000286 PARAMETER Experiment Name: At_Open_Flower_P Parameter: Tissue Value: Half Open vs. Whole Plant
  misc_feature: MA Experiment ID: 20000438 Result: Up-regulated in Transcription
  misc_feature: MA Experiment 20000438 PARAMETER Experiment Name: At_Shoots__P Parameter: Age (day) Value: 14
  misc_feature: MA Experiment 20000438 PARAMETER Experiment Name: At_Shoots__P Parameter: Tissue Value: Shoots vs. Whole Plant
  misc_feature: MA Experiment ID: 20000439 Result: Up-regulated in Transcription
  misc_feature: MA Experiment 20000439 PARAMETER Experiment Name: At_Roots__P Parameter: Age (day) Value: 14 vs. 21
  misc_feature: MA Experiment 20000439 PARAMETER Experiment Name: At_Roots__P Parameter: Organism Value: A. thaliana
  misc_feature: MA Experiment 20000439 PARAMETER Experiment Name: At_Roots__P Parameter: Tissue Value: Roots vs. Whole Plant
  misc_feature: MA Experiment ID: 20000445 Result: Down-regulated in Transcription
  misc_feature: MA Experiment 20000445 PARAMETER Experiment Name: At_100uM_NAA__P Parameter: Age (day) Value: 14
  misc_feature: MA Experiment 20000445 PARAMETER Experiment Name: At_100uM_NAA__P Parameter: Organism Value: A. thaliana
  misc_feature: MA Experiment 20000445 PARAMETER Experiment Name: At_100uM_NAA__P Parameter: Plant Line Value: WS
  misc_feature: MA Experiment 20000445 PARAMETER Experiment Name: At_100uM_NAA__P Parameter: Timepoint (hr) Value: 6
  misc_feature: MA Experiment 20000445 PARAMETER Experiment Name: At_100uM_NAA__P Parameter: Tissue Value: Aerial
  misc_feature: MA Experiment 20000445 PARAMETER Experiment Name: At_100uM_NAA__P Parameter: Treatment Value: 100uM NAA vs. No Treatment
  misc_feature: MA Experiment ID: 20000452 Result: Up-regulated in Transcription
  misc_feature: MA Experiment 20000452 PARAMETER Experiment Name: At_CS6879_Shoots-Roots_P Parameter: Age (day) Value: 14
  misc_feature: MA Experiment 20000452 PARAMETER Experiment Name: At_CS6879_Shoots-Roots_P Parameter: Organism Value: A. thaliana
  misc_feature: MA Experiment 20000452 PARAMETER Experiment Name: At_CS6879_Shoots-Roots_P Parameter: Plant Line Value: CS6879 vs. WS
  misc_feature: MA Experiment 20000452 PARAMETER Experiment Name: At_CS6879_Shoots-Roots_P Parameter: Tissue Value: Shoots
  misc_feature: MA Experiment ID: 20000495 Result: Up-regulated in Transcription
  misc_feature: MA Experiment 20000495 PARAMETER Experiment Name: At_Guard_Cells_P Parameter: Harvest Date Value: 8/2/2002
  misc_feature: MA Experiment 20000495 PARAMETER Experiment Name: At_Guard_Cells_P Parameter: Organism Value: A. thaliana
  misc_feature: MA Experiment 20000495 PARAMETER Experiment Name: At_Guard_Cells_P Parameter: Tissue Value: Guard Cells vs. Leaves
  misc_feature: MA Experiment ID: 20000573 Result: Down-regulated in Transcription
  misc_feature: MA Experiment 20000573 PARAMETER Experiment Name: At_100uM_ABA_Mutants__P Parameter: Organism Value: A. thaliana
  misc_feature: MA Experiment 20000573 PARAMETER Experiment Name: At_100uM_ABA_Mutants__P Parameter: Plant Line Value: CS22 vs. Ler wt
  misc_feature: MA Experiment 20000573 PARAMETER Experiment Name: At_100uM_ABA_Mutants__P Parameter: Timepoint (hr) Value: N/A
  misc_feature: MA Experiment 20000573 PARAMETER Experiment Name: At_100uM_ABA_Mutants__P Parameter: Tissue Value: Whole Plant
  misc_feature: MA Experiment 20000573 PARAMETER Experiment Name: At_100uM_ABA_Mutants__P Parameter: Treatment Value: None
  misc_feature: MA Experiment ID: 20000574 Result: Down-regulated in Transcription
  misc_feature: MA Experiment 20000574 PARAMETER Experiment Name: At_100uM_ABA_Mutants__P Parameter: Organism Value: A. thaliana
  misc_feature: MA Experiment 20000574 PARAMETER Experiment Name: At_100uM_ABA_Mutants__P Parameter: Plant Line Value: CS23 vs. Ler wt
  misc_feature: MA Experiment 20000574 PARAMETER Experiment Name: At_100uM_ABA_Mutants__P Parameter: Timepoint (hr) Value: N/A
  misc_feature: MA Experiment 20000574 PARAMETER Experiment Name: At_100uM_ABA_Mutants__P Parameter: Tissue Value: Whole Plant
  misc_feature: MA Experiment 20000574 PARAMETER Experiment Name: At_100uM_ABA_Mutants__P Parameter: Treatment Value: None
  misc_feature: MA Experiment ID: 20001248 Result: Down-regulated in Transcription
  misc_feature: MA Experiment 20001248 PARAMETER Experiment Name: At_Far-red-induction_P Parameter: Age (day) Value: 7
  misc_feature: MA Experiment 20001248 PARAMETER Experiment Name: At_Far-red-induction_P Parameter: Light Value: Far-red vs. White
  misc_feature: MA Experiment 20001248 PARAMETER Experiment Name: At_Far-red-induction_P Parameter: Organism Value: A. thaliana
  misc_feature: MA Experiment 20001248 PARAMETER Experiment Name: At_Far-red-induction_P Parameter: Plant Line Value: Columbia
  misc_feature: MA Experiment 20001248 PARAMETER Experiment Name: At_Far-red-induction_P Parameter: Timepoint (hr) Value: 4
  misc_feature: MA Experiment 20001248 PARAMETER Experiment Name: At_Far-red-induction_P Parameter: Tissue Value: Whole Plant
  misc_feature: MA Experiment ID: 20001450 Result: Down-regulated in Transcription
  misc_feature: MA Experiment 20001450 PARAMETER Experiment Name: At_Far-red-induction_P Parameter: Age (day) Value: 7
  misc_feature: MA Experiment 20001450 PARAMETER Experiment Name: At_Far-red-induction_P Parameter: Light Value: Far-red vs. White
  misc_feature: MA Experiment 20001450 PARAMETER Experiment Name: At_Far-red-induction_P Parameter: Organism Value: A. thaliana
  misc_feature: MA Experiment 20001450 PARAMETER Experiment Name: At_Far-red-induction_P Parameter: Plant Line Value: Columbia
  misc_feature: MA Experiment 20001450 PARAMETER Experiment Name: At_Far-red-induction_P Parameter: Timepoint (hr) Value: 8
  misc_feature: MA Experiment 20001450 PARAMETER Experiment Name: At_Far-red-induction_P Parameter: Tissue Value: Whole Plant
aatcaccaaagaaagaagtacaaaatgtttaactatgtgattattcttcctttagctctcttcctcttggcttacaaattcttctttacatctaaaaagcagcgttactatctccctccctctccatcttactctctcccaatcctcggccaccacctcctcatcaaaccgccggttcaccgtctcttccaccgcctttccaatatccatggcccaatcttctacctccgacttggttcccgccgtgccgtcgtcatatcttcctcctcgctggcaagagaatgcttcacaggtcaaaacgatgtcattgtatcaaaccgccctcgttttctaacctccaaatacattgcttacaactacacaaccatcgcaacaacatcttacggtgaccactggcgtaacctccgccgcatttgctccctcgaaatcgtctcctcaaaacgtctcgccaactttctccacatccgcaaagaggagatccagcgcatgctaacgagactctcacgtgacgcccgtgtcggcaaagaggtcgagctcgagtctatcttgtacgacctaacgttcaacaatatcgtgaggatggttacagggaagatatactacggcgacgatgtcagcgacaaagaagaagcagagttgttcaagaagctttttactttcatcaccactaatagtggcgcgaggcatcctggagaatacttgcccttcatgaagatattcggagggagctttgagaaggaggtgaaagctgcagcaaaagtcatcgatgaaatgttgcagcgtctgcttgacgagtgcaagagtgataaagacggtaacactatggttaatcacttgctctctttgcaacaggacgaccctgagtactacactgacatcattatcaaaggcttaatgctgggtataatggttgcctcatcagagacctccgctttgacaatagagtgggcgatggcgagtttgttgaaccacccaaaagttttggacaaagtaaaattagagatcgacgagataatcggacaagaccgtttgatcgaagaatcagacatagcaaaccttccttacctccaaaacgtagtatccgagacactccggctacatccagcagcgccggttcttgtgccaagatcaacagcagaagacatcaagatcggaggatacgatgtgccacgtgacacaatggtaatggtgaacgcgtgggcgatacatagagatccagatctttggaccgaaccggagaggtttaaccctgagaggttcaacggtggagaaggagaaaaagatgatgttcgtatgctgatagcgtttggaagcggacggagaatatgtcccggtgttggactagcgcacaagattgtgacattagcgttaggatcgttaattcaatgctttgattggaaaaaggtgaacgaaaaagagattgatatgagtgagggtccggggatggctatgcgtatgatggtgccgttacgagccttgtgtaagactcgacccataatgaataagctcccggcctacacgaaagtttagttatgtttttgtatttttcaatggaaaaattgttacattatgttgtgt

SEQ ID NO: 39004 - protein, 509 aa, Arabidopsis thaliana
  peptide (1)..(509): Ceres Seq. ID no. 12329048
  misc_feature (12)..(489): Homolog of NCBI NO: 23397303 NR Description: putative cytochrome P450 monooxygenase (CYP91A2)
  misc_feature (11)..(505): Homolog of NCBI NO: 15242068 NR Description: cytochrome p450 family
  misc_feature (12)..(503): Homolog of NCBI NO: 25282605 NR Description: cytochrome P450 monooxygenase [imported] -
  misc_feature (12)..(503): Homolog of NCBI NO: 18491105 NR Description: AT4g37430/F6G17_80 [Arabidopsis thaliana]
  misc_feature (12)..(503): Homolog of NCBI NO: 21618274 NR Description: cytochrome P450 monooxygenase CYP91A2
  misc_feature (12)..(503): Homolog of NCBI NO: 15235559 NR Description: cytochrome p450 family
  misc_feature (9)..(508): Homolog of NCBI NO: 21618287 NR Description: cytochrome P450 monooxygenase-like protein
  misc_feature (9)..(508): Homolog of NCBI NO: 18420031 NR Description: cytochrome p450 family
  misc_feature (9)..(465): Homolog of NCBI NO: 18252165 NR Description: cytochrome P450 monooxygenase - like protein
  misc_feature (9)..(509): Homolog of NCBI NO: 15235541 NR Description: cytochrome p450, putative
NHQRKKYKMFNYVIILPLALFLLAYKFFFTSKKQRYYLPPSPSYSLPILGHHLLIKPPVHRLFHRLSNIHGPIFYLRLGSRRAVVISSSSLARECFTGQNDVIVSNRPRFLTSKYIAYNYTTIATTSYGDHWRNLRRICSLEIVSSKRLANFLHIRKEEIQRMLTRLSRDARVGKEVELESILYDLTFNNIVRMVTGKIYYGDDVSDKEEAELFKKLFTFITTNSGARHPGEYLPFMKIFGGSFEKEVKAAAKVIDEMLQRLLDECKSDKDGNTMVNHLLSLQQDDPEYYTDIIIKGLMLGIMVASSETSALTIEWAMASLLNHPKVLDKVKLEIDEIIGQDRLIEESDIANLPYLQNVVSETLRLHPAAPVLVPRSTAEDIKIGGYDVPRDTMVMVNAWAIHRDPDLWTEPERFNPERFNGGEGEKDDVRMLIAFGSGRRICPGVGLAHKIVTLALGSLIQCFDWKKVNEKEIDMSEGPGMAMRMMVPLRALCKTRPIMNKLPAYTKV

SEQ ID NO: 39005 - protein, 501 aa, Arabidopsis thaliana
  peptide (1)..(501): Ceres Seq. ID no. 12329049
  misc_feature (4)..(481): Homolog of NCBI NO: 23397303 NR Description: putative cytochrome P450 monooxygenase (CYP91A2)
  misc_feature (3)..(497): Homolog of NCBI NO: 15242068 NR Description: cytochrome p450 family
  misc_feature (4)..(495): Homolog of NCBI NO: 25282605 NR Description: cytochrome P450 monooxygenase [imported] -
  misc_feature (4)..(495): Homolog of NCBI NO: 18491105 NR Description: AT4g37430/F6G17_80 [Arabidopsis thaliana]
  misc_feature (4)..(495): Homolog of NCBI NO: 21618274 NR Description: cytochrome P450 monooxygenase CYP91A2
  misc_feature (4)..(495): Homolog of NCBI NO: 15235559 NR Description: cytochrome p450 family
  misc_feature (1)..(500): Homolog of NCBI NO: 21618287 NR Description: cytochrome P450 monooxygenase-like protein
  misc_feature (1)..(500): Homolog of NCBI NO: 18420031 NR Description: cytochrome p450 family
  misc_feature (1)..(457): Homolog of NCBI NO: 18252165 NR Description: cytochrome P450 monooxygenase - like protein
  misc_feature (1)..(501): Homolog of NCBI NO: 15235541 NR Description: cytochrome p450, putative
MFNYVIILPLALFLLAYKFFFTSKKQRYYLPPSPSYSLPILGHHLLIKPPVHRLFHRLSNIHGPIFYLRLGSRRAVVISSSSLARECFTGQNDVIVSNRPRFLTSKYIAYNYTTIATTSYGDHWRNLRRICSLEIVSSKRLANFLHIRKEEIQRMLTRLSRDARVGKEVELESILYDLTFNNIVRMVTGKIYYGDDVSDKEEAELFKKLFTFITTNSGARHPGEYLPFMKIFGGSFEKEVKAAAKVIDEMLQRLLDECKSDKDGNTMVNHLLSLQQDDPEYYTDIIIKGLMLGIMVASSETSALTIEWAMASLLNHPKVLDKVKLEIDEIIGQDRLIEESDIANLPYLQNVVSETLRLHPAAPVLVPRSTAEDIKIGGYDVPRDTMVMVNAWAIHRDPDLWTEPERFNPERFNGGEGEKDDVRMLIAFGSGRRICPGVGLAHKIVTLALGSLIQCFDWKKVNEKEIDMSEGPGMAMRMMVPLRALCKTRPIMNKLPAYTKV

SEQ ID NO: 39006 - protein, 347 aa, Arabidopsis thaliana
  peptide (1)..(347): Ceres Seq. ID no. 12329050
  misc_feature (1)..(327): Homolog of NCBI NO: 23397303 NR Description: putative cytochrome P450 monooxygenase (CYP91A2)
  misc_feature (1)..(343): Homolog of NCBI NO: 15242068 NR Description: cytochrome p450 family
  misc_feature (1)..(341): Homolog of NCBI NO: 25282605 NR Description: cytochrome P450 monooxygenase [imported] -
  misc_feature (1)..(341): Homolog of NCBI NO: 18491105 NR Description: AT4g37430/F6G17_80 [Arabidopsis thaliana]
  misc_feature (1)..(341): Homolog of NCBI NO: 21618274 NR Description: cytochrome P450 monooxygenase CYP91A2
  misc_feature (1)..(341): Homolog of NCBI NO: 15235559 NR Description: cytochrome p450 family
  misc_feature (1)..(346): Homolog of NCBI NO: 21618287 NR Description: cytochrome P450 monooxygenase-like protein
  misc_feature (1)..(346): Homolog of NCBI NO: 18420031 NR Description: cytochrome p450 family
  misc_feature (1)..(303): Homolog of NCBI NO: 18252165 NR Description: cytochrome P450 monooxygenase - like protein
  misc_feature (1)..(347): Homolog of NCBI NO: 15235541 NR Description: cytochrome p450, putative
MLTRLSRDARVGKEVELESILYDLTFNNIVRMVTGKIYYGDDVSDKEEAELFKKLFTFITTNSGARHPGEYLPFMKIFGGSFEKEVKAAAKVIDEMLQRLLDECKSDKDGNTMVNHLLSLQQDDPEYYTDIIIKGLMLGIMVASSETSALTIEWAMASLLNHPKVLDKVKLEIDEIIGQDRLIEESDIANLPYLQNVVSETLRLHPAAPVLVPRSTAEDIKIGGYDVPRDTMVMVNAWAIHRDPDLWTEPERFNPERFNGGEGEKDDVRMLIAFGSGRRICPGVGLAHKIVTLALGSLIQCFDWKKVNEKEIDMSEGPGMAMRMMVPLRALCKTRPIMNKLPAYTKV

SEQ ID NO: 39007 - DNA, 1205 bp, Arabidopsis thaliana
  misc_feature (1)..(1205): Ceres Seq. ID no. 12329051
  misc_feature: MA Experiment ID: 20000112 Result: Up-regulated in Transcription
  misc_feature: MA Experiment 20000112 PARAMETER Experiment Name: At_42deg_Heat_cDNA_P Parameter: Temperature (deg C) Value: 42 vs. 22
  misc_feature: MA Experiment 20000112 PARAMETER Experiment Name: At_42deg_Heat_cDNA_P Parameter: Timepoint (hr) Value: 2
  misc_feature: MA Experiment 20000112 PARAMETER Experiment Name: At_42deg_Heat_cDNA_P Parameter: Tissue Value: Aerial
  misc_feature: MA Experiment ID: 20000144 Result: Up-regulated in Transcription
  misc_feature: MA Experiment 20000144 PARAMETER Experiment Name: At_42deg_Heat_cDNA_P Parameter: Temperature (deg C) Value: 42 vs. 22
  misc_feature: MA Experiment 20000144 PARAMETER Experiment Name: At_42deg_Heat_cDNA_P Parameter: Timepoint (hr) Value: 1
  misc_feature: MA Experiment 20000144 PARAMETER Experiment Name: At_42deg_Heat_cDNA_P Parameter: Tissue Value: Aerial
  misc_feature: MA Experiment ID: 20000496 Result: Up-regulated in Transcription
  misc_feature: MA Experiment 20000496 PARAMETER Experiment Name: At_Guard_Cells_P Parameter: Harvest Date Value: 7/19/2002
  misc_feature: MA Experiment 20000496 PARAMETER Experiment Name: At_Guard_Cells_P Parameter: Organism Value: Canola
  misc_feature: MA Experiment 20000496 PARAMETER Experiment Name: At_Guard_Cells_P Parameter: Tissue Value: Guard Cells vs. Leaves
actaaaagccctaatctctgcttctgtaaagttcaacatttggccgagtcaaagaaaccgagtgattctctgatccgattccggcgaaagaggacgaaacaaacggaacttgttcatcatcttctccagaaatgacgtcgtttcaggtgatgcgttcttcaaattctagaaactcggatctatctcgtcgtatctctacttcttcttcgtctgtaagacctcaacaacagttccggcgagatctaacaagtgtcggttacggcggaagaaacgacggattatacagttcaaattcgatgacggtggaagggattttacacgatactttcgcatcagatccaccagcaccaacggaatcttcactcttagatgcgtcgataaatctgatggatgcttctccagcaccaatggagataacaacaacgacgggttctgatgttgtagatcacggcggaggaacggagacgacgcgtagtgggaagagtgtcgatgaggtttggagagagatggtctcaggagaaggtaaagggatgaaggaagagacgtcggaagagataatgacgttagaggattttctagcgaaagctgcggtggaagacgaaacagcggtgacggcgtcggcggaggatttggatgtgaagattccggtgacgaattacggattcgatcattctgcaccgccgcataatccgtttcagatgattgataaagtagaaggatcaatagttgcgtttgggaatggtttagatgtttacggaggaggagctagagggaagagagcgagagtgatggttgagccattggataaagcagctgcacagagacagagaaggatgattaagaatcgtgaatctgcagctaggtctagagagaggaaacaagcttatcaagttgagttagaagctttggctgcgaagcttgaggaagagaatgagttgctttctaaggagattgaagataagaggaaagagagataccagaagttgatggagtttgtgattcctgttgttgagaaaccgaagcagcagccaccacggtttttacgcaggattcggtctttggaatggtgataagaggtatagacttttgaggattttagggtcttaatgttacttactttgtgtatgtgtgtgtgagagttgattcataatctgcagtagagtgtaatgattatggttaataacttatatattatattagattgc

SEQ ID NO: 39008 - protein, 312 aa, Arabidopsis thaliana
  peptide (1)..(312): Ceres Seq. ID no. 12329052
  misc_feature (226)..(290): Pfam Name: bZIP transcription factor Pfam Description: bZIP transcription factor
  misc_feature (115)..(275): Homolog of NCBI NO: 7487620 NR Description: probable bZIP transcription factor
  misc_feature (113)..(309): Homolog of NCBI NO: 33146493 NR Description: putative bZIP protein DPBF3
  misc_feature (115)..(275): Homolog of NCBI NO: 26451276 NR Description: putative bZIP transcription factor AtbZIP12 /
  misc_feature (117)..(312): Homolog of NCBI NO: 34908608 NR Description: putative DNA binding protein
  misc_feature (209)..(312): Homolog of NCBI NO: 29367541 NR Description: OSE2-like protein [Oryza sativa (japonica
  misc_feature (117)..(312): Homolog of NCBI NO: 7638404 NR Description: OSE2 [Oryza sativa]
  misc_feature (117)..(312): Homolog of NCBI NO: 7489466 NR Description: DNA binding protein - rice
  misc_feature (104)..(312): Homolog of NCBI NO: 15219608 NR Description: G-box binding factor 4, GBF4
  misc_feature (1)..(312): Homolog of NCBI NO: 15240086 NR Description: bZIP transcription factor, G-box binding factor
  misc_feature (1)..(312): Homolog of NCBI NO: 21554353 NR Description: unknown [Arabidopsis thaliana]
MTSFQVMRSSNSRNSDLSRRISTSSSSVRPQQQFRRDLTSVGYGGRNDGLYSSNSMTVEGILHDTFASDPPAPTESSLLDASINLMDASPAPMEITTTTGSDVVDHGGGTETTRSGKSVDEVWREMVSGEGKGMKEETSEEIMTLEDFLAKAAVEDETAVTASAEDLDVKIPVTNYGFDHSAPPHNPFQMIDKVEGSIVAFGNGLDVYGGGARGKRARVMVEPLDKAAAQRQRRMIKNRESAARSRERKQAYQVELEALAAKLEEENELLSKEIEDKRKERYQKLMEFVIPVVEKPKQQPPRFLRRIRSLEW

SEQ ID NO: 39009 - protein, 306 aa, Arabidopsis thaliana
  peptide (1)..(306): Ceres Seq. ID no. 12329053
  misc_feature (220)..(284): Pfam Name: bZIP transcription factor Pfam Description: bZIP transcription factor
  misc_feature (109)..(269): Homolog of NCBI NO: 7487620 NR Description: probable bZIP transcription factor
  misc_feature (107)..(303): Homolog of NCBI NO: 33146493 NR Description: putative bZIP protein DPBF3
  misc_feature (109)..(269): Homolog of NCBI NO: 26451276 NR Description: putative bZIP transcription factor AtbZIP12 /
  misc_feature (111)..(306): Homolog of NCBI NO: 34908608 NR Description: putative DNA binding protein
  misc_feature (203)..(306): Homolog of NCBI NO: 29367541 NR Description: OSE2-like protein [Oryza sativa (japonica
  misc_feature (111)..(306): Homolog of NCBI NO: 7638404 NR Description: OSE2 [Oryza sativa]
  misc_feature (111)..(306): Homolog of NCBI NO: 7489466 NR Description: DNA binding protein - rice
  misc_feature (98)..(306): Homolog of NCBI NO: 15219608 NR Description: G-box binding factor 4, GBF4
  misc_feature (1)..(306): Homolog of NCBI NO: 15240086 NR Description: bZIP transcription factor, G-box binding factor
  misc_feature (1)..(306): Homolog of NCBI NO: 21554353 NR Description: unknown [Arabidopsis thaliana]
MRSSNSRNSDLSRRISTSSSSVRPQQQFRRDLTSVGYGGRNDGLYSSNSMTVEGILHDTFASDPPAPTESSLLDASINLMDASPAPMEITTTTGSDVVDHGGGTETTRSGKSVDEVWREMVSGEGKGMKEETSEEIMTLEDFLAKAAVEDETAVTASAEDLDVKIPVTNYGFDHSAPPHNPFQMIDKVEGSIVAFGNGLDVYGGGARGKRARVMVEPLDKAAAQRQRRMIKNRESAARSRERKQAYQVELEALAAKLEEENELLSKEIEDKRKERYQKLMEFVIPVVEKPKQQPPRFLRRIRSLEW

SEQ ID NO: 39010 - protein, 257 aa, Arabidopsis thaliana
  peptide (1)..(257): Ceres Seq. ID no. 12329054
  misc_feature (171)..(235): Pfam Name: bZIP transcription factor Pfam Description: bZIP transcription factor
  misc_feature (60)..(220): Homolog of NCBI NO: 7487620 NR Description: probable bZIP transcription factor
  misc_feature (58)..(254): Homolog of NCBI NO: 33146493 NR Description: putative bZIP protein DPBF3
  misc_feature (60)..(220): Homolog of NCBI NO: 26451276 NR Description: putative bZIP transcription factor AtbZIP12 /
  misc_feature (62)..(257): Homolog of NCBI NO: 34908608 NR Description: putative DNA binding protein
  misc_feature (154)..(257): Homolog of NCBI NO: 29367541 NR Description: OSE2-like protein [Oryza sativa (japonica
  misc_feature (62)..(257): Homolog of NCBI NO: 7638404 NR Description: OSE2 [Oryza sativa]
  misc_feature (62)..(257): Homolog of NCBI NO: 7489466 NR Description: DNA binding protein - rice
  misc_feature (49)..(257): Homolog of NCBI NO: 15219608 NR Description: G-box binding factor 4, GBF4
  misc_feature (1)..(257): Homolog of NCBI NO: 15240086 NR Description: bZIP transcription factor, G-box binding factor
  misc_feature (1)..(257): Homolog of NCBI NO: 21554353 NR Description: unknown [Arabidopsis thaliana]
MTVEGILHDTFASDPPAPTESSLLDASINLMDASPAPMEITTTTGSDVVDHGGGTETTRSGKSVDEVWREMVSGEGKGMKEETSEEIMTLEDFLAKAAVEDETAVTASAEDLDVKIPVTNYGFDHSAPPHNPFQMIDKVEGSIVAFGNGLDVYGGGARGKRARVMVEPLDKAAAQRQRRMIKNRESAARSRERKQAYQVELEALAAKLEEENELLSKEIEDKRKERYQKLMEFVIPVVEKPKQQPPRFLRRIRSLEW

SEQ ID NO: 39011 - DNA, 1056 bp, Arabidopsis thaliana
  misc_feature (1)..(1056): Ceres Seq. ID no. 12329132
  misc_feature: MA Experiment ID: 108577 Result: Down-regulated in Transcription
  misc_feature: MA Experiment 108577 PARAMETER Experiment Name: At_42deg_Heat_cDNA_P Parameter: Temperature (deg C) Value: 42 vs. 22
  misc_feature: MA Experiment 108577 PARAMETER Experiment Name: At_42deg_Heat_cDNA_P Parameter: Timepoint (hr) Value: 6
  misc_feature: MA Experiment 108577 PARAMETER Experiment Name: At_42deg_Heat_cDNA_P Parameter: Tissue Value: Aerial
  misc_feature: MA Experiment ID: 108579 Result: Up-regulated in Transcription
  misc_feature: MA Experiment 108579 PARAMETER Experiment Name: At_4deg_Cold_cDNA_P Parameter: Temperature (deg C) Value: 4 vs. 22
  misc_feature: MA Experiment 108579 PARAMETER Experiment Name: At_4deg_Cold_cDNA_P Parameter: Timepoint (hr) Value: 6
  misc_feature: MA Experiment 108579 PARAMETER Experiment Name: At_4deg_Cold_cDNA_P Parameter: Tissue Value: Aerial
  misc_feature: MA Experiment ID: 20000090 Result: Up-regulated in Transcription
  misc_feature: MA Experiment ID: 20000111 Result: Down-regulated in Transcription
  misc_feature: MA Experiment 20000111 PARAMETER Experiment Name: At_42deg_Heat_cDNA_P Parameter: Temperature (deg C) Value: 42 vs. 22
  misc_feature: MA Experiment 20000111 PARAMETER Experiment Name: At_42deg_Heat_cDNA_P Parameter: Timepoint (hr) Value: 6
  misc_feature: MA Experiment 20000111 PARAMETER Experiment Name: At_42deg_Heat_cDNA_P Parameter: Tissue Value: Aerial
  misc_feature: MA Experiment ID: 20000117 Result: Up-regulated in Transcription
  misc_feature: MA Experiment 20000117 PARAMETER Experiment Name: At_100uM_ABA_Mutants_cDNA_P Parameter: Plant Line Value: Columbia
  misc_feature: MA Experiment 20000117 PARAMETER Experiment Name: At_100uM_ABA_Mutants_cDNA_P Parameter: Timepoint (hr) Value: 6
  misc_feature: MA Experiment 20000117 PARAMETER Experiment Name: At_100uM_ABA_Mutants_cDNA_P Parameter: Tissue Value: Aerial
  misc_feature: MA Experiment 20000117 PARAMETER Experiment Name: At_100uM_ABA_Mutants_cDNA_P Parameter: Treatment Value: 100uM ABA vs. No Treatment
  misc_feature: MA Experiment ID: 20000173 Result: Down-regulated in Transcription
  misc_feature: MA Experiment 20000173 PARAMETER Experiment Name: At_42deg_Heat_P Parameter: Age (day) Value: 14
  misc_feature: MA Experiment 20000173 PARAMETER Experiment Name: At_42deg_Heat_P Parameter: Organism Value: A. thaliana
  misc_feature: MA Experiment 20000173 PARAMETER Experiment Name: At_42deg_Heat_P Parameter: Plant Line Value: WS
  misc_feature: MA Experiment 20000173 PARAMETER Experiment Name: At_42deg_Heat_P Parameter: Temperature (deg C) Value: 42 vs. 22
  misc_feature: MA Experiment 20000173 PARAMETER Experiment Name: At_42deg_Heat_P Parameter: Timepoint (hr) Value: 6
  misc_feature: MA Experiment 20000173 PARAMETER Experiment Name: At_42deg_Heat_P Parameter: Tissue Value: Aerial
  misc_feature: MA Experiment ID: 20000184 Result: Down-regulated in Transcription
  misc_feature: MA Experiment 20000184 PARAMETER Experiment Name: At_Shoots__P Parameter: Age (day) Value: 7
  misc_feature: MA Experiment 20000184 PARAMETER Experiment Name: At_Shoots__P Parameter: Tissue Value: Shoots vs. Whole Plant
  misc_feature: MA Experiment ID: 20000213 Result: Up-regulated in Transcription
  misc_feature: MA Experiment 20000213 PARAMETER Experiment Name: At_4deg_Cold_P Parameter: Timepoint (hr) Value: 2
  misc_feature: MA Experiment ID: 20000224 Result: Down-regulated in Transcription
  misc_feature: MA Experiment ID: 20000227 Result: Up-regulated in Transcription
  misc_feature: MA Experiment 20000227 PARAMETER Experiment Name: At_Root-Tips-vs-Tops_P Parameter: Tissue Value: Root Tips vs. Root Tops
  misc_feature: MA Experiment ID: 20000438 Result: Down-regulated in Transcription
  misc_feature: MA Experiment 20000438 PARAMETER Experiment Name: At_Shoots__P Parameter: Age (day) Value: 14
  misc_feature: MA Experiment 20000438 PARAMETER Experiment Name: At_Shoots__P Parameter: Tissue Value: Shoots vs. Whole Plant
  misc_feature: MA Experiment ID: 20000460 Result: Up-regulated in Transcription
  misc_feature: MA Experiment 20000460 PARAMETER Experiment Name: At_10percent_PEG_P Parameter: Age (day) Value: 12
  misc_feature: MA Experiment 20000460 PARAMETER Experiment Name: At_10percent_PEG_P Parameter: Organism Value: A. thaliana
  misc_feature: MA Experiment 20000460 PARAMETER Experiment Name: At_10percent_PEG_P Parameter: Plant Line Value: WS
  misc_feature: MA Experiment 20000460 PARAMETER Experiment Name: At_10percent_PEG_P Parameter: Timepoint (day) Value: 12
  misc_feature: MA Experiment 20000460 PARAMETER Experiment Name: At_10percent_PEG_P Parameter: Tissue Value: Whole Plant
  misc_feature: MA Experiment 20000460 PARAMETER Experiment Name: At_10percent_PEG_P Parameter: Treatment Value: 10percent PEG vs. No Treatment
  misc_feature: MA Experiment ID: 20000495 Result: Down-regulated in Transcription
  misc_feature: MA Experiment 20000495 PARAMETER Experiment Name: At_Guard_Cells_P Parameter: Harvest Date Value: 8/2/2002
  misc_feature: MA Experiment 20000495 PARAMETER Experiment Name: At_Guard_Cells_P Parameter: Organism Value: A. thaliana
  misc_feature: MA Experiment 20000495 PARAMETER Experiment Name: At_Guard_Cells_P Parameter: Tissue Value: Guard Cells vs. Leaves
  misc_feature: MA Experiment ID: 20000527 Result: Up-regulated in Transcription
  misc_feature: MA Experiment 20000527 PARAMETER Experiment Name: At_10percent_PEG_P Parameter: Age (day) Value: 20
  misc_feature: MA Experiment 20000527 PARAMETER Experiment Name: At_10percent_PEG_P Parameter: Organism Value: A. thaliana
  misc_feature: MA Experiment 20000527 PARAMETER Experiment Name: At_10percent_PEG_P Parameter: Plant Line Value: WS
  misc_feature: MA Experiment 20000527 PARAMETER Experiment Name: At_10percent_PEG_P Parameter: Timepoint (day) Value: 20
  misc_feature: MA Experiment 20000527 PARAMETER Experiment Name: At_10percent_PEG_P Parameter: Tissue Value: Whole Plant
  misc_feature: MA Experiment 20000527 PARAMETER Experiment Name: At_10percent_PEG_P Parameter: Treatment Value: 10percent PEG vs. No Treatment
  misc_feature: MA Experiment ID: 20000794 Result: Down-regulated in Transcription
  misc_feature: MA Experiment 20000794 PARAMETER Experiment Name: At_Petals_P Parameter: Age (day) Value: 23-25 days
  misc_feature: MA Experiment 20000794 PARAMETER Experiment Name: At_Petals_P Parameter: Plant Line Value: WS
  misc_feature: MA Experiment 20000794 PARAMETER Experiment Name: At_Petals_P Parameter: Tissue Value: Petals vs. Whole plant
  misc_feature: MA Experiment ID: 20001557 Result: Up-regulated in Transcription
  misc_feature: MA Experiment 20001557 PARAMETER Experiment Name: At_Drought_Soil_Dry_P Parameter: Age (day) Value: 27
  misc_feature: MA Experiment 20001557 PARAMETER Experiment Name: At_Drought_Soil_Dry_P Parameter: Organism Value: A. thaliana
  misc_feature: MA Experiment 20001557 PARAMETER Experiment Name: At_Drought_Soil_Dry_P Parameter: Plant Line Value: WS
  misc_feature: MA Experiment 20001557 PARAMETER Experiment Name: At_Drought_Soil_Dry_P Parameter: Post Timepoint (hr) Value: 3
  misc_feature: MA Experiment 20001557 PARAMETER Experiment Name: At_Drought_Soil_Dry_P Parameter: Post-Treatment Value: Re-Water vs. No Drought
  misc_feature: MA Experiment 20001557 PARAMETER Experiment Name: At_Drought_Soil_Dry_P Parameter: Timepoint (day) Value: 13
  misc_feature: MA Experiment 20001557 PARAMETER Experiment Name: At_Drought_Soil_Dry_P Parameter: Treatment Value: Drought vs. No Drought
  misc_feature: MA Experiment ID: 20001560 Result: Up-regulated in Transcription
  misc_feature: MA Experiment 20001560 PARAMETER Experiment Name: At_Drought_Soil_Dry_P Parameter: Age (day) Value: 28
  misc_feature: MA Experiment 20001560 PARAMETER Experiment Name: At_Drought_Soil_Dry_P Parameter: Organism Value: A. thaliana
  misc_feature: MA Experiment 20001560 PARAMETER Experiment Name: At_Drought_Soil_Dry_P Parameter: Plant Line Value: WS
  misc_feature: MA Experiment 20001560 PARAMETER Experiment Name: At_Drought_Soil_Dry_P Parameter: Post Timepoint (hr) Value: None
  misc_feature: MA Experiment 20001560 PARAMETER Experiment Name: At_Drought_Soil_Dry_P Parameter: Post-Treatment Value: None
  misc_feature: MA Experiment 20001560 PARAMETER Experiment Name: At_Drought_Soil_Dry_P Parameter: Timepoint (day) Value: 14
  misc_feature: MA Experiment 20001560 PARAMETER Experiment Name: At_Drought_Soil_Dry_P Parameter: Treatment Value: Drought vs. No Drought
  misc_feature: MA Experiment ID: 20001911 Result: Down-regulated in Transcription
  misc_feature: MA Experiment 20001911 PARAMETER Experiment Name: At_Drought_Reproduction_P Parameter: Age (day) Value: 40
  misc_feature: MA Experiment 20001911 PARAMETER Experiment Name: At_Drought_Reproduction_P Parameter: Organism Value: A. thaliana
  misc_feature: MA Experiment 20001911 PARAMETER Experiment Name: At_Drought_Reproduction_P Parameter: Plant Line Value: WS
  misc_feature: MA Experiment 20001911 PARAMETER Experiment Name: At_Drought_Reproduction_P Parameter: Timepoint (day) Value: 10
  misc_feature: MA Experiment 20001911 PARAMETER Experiment Name: At_Drought_Reproduction_P Parameter: Tissue Value: Flowers
  misc_feature: MA Experiment 20001911 PARAMETER Experiment Name: At_Drought_Reproduction_P Parameter: Treatment Value: Drought vs. No Drought
gtttgatattttccaattccgcgtctttctctgttgaaatcgaaaaaattttcaaaacaaaatctaaggaaaaaagagcaacaagtttcaaatctcatttgggtttttcattttgaaaagaaggacccatttttatctctctctttgttttgttttctcgaatctgaaggagtaaagttaaaagctttgaaggagagaatcaatggcgggttacagagcagatgatgaatacgattacctattcaaggttgttctgataggtgattcaggtgtgggcaaatccaatttgctttcacgattcacgaagaacgagtttagtctcgagtcaaaatccacgatcggggtcgagttcgcgactcggagtttgaatgttgatgataaagtcatcaaagctcagatttgggatactgctggtcaagaaaggtaccgagccatcactagtgcgtattaccgaggagctgttggagcgcttcttgtctacgatgtaacccgacactcaacatttgaaaacgttgagacttggctgaaagaactcagaaaccacactgatccaaacattgtagtcatgctcgtgggcaacaaatctgaccttcgccatctcgtggctgttcagactgaagatgctaagtcattcgccgagaaagaatctctctacttcatggaaacctcggctctcgaagccaccaatgttgagaacgctttcgccgaagtcctcactcagattcaccacattgtgagcaagaaggcgatggaagctgcgagcgaatccgctaatgttccatcgaaaggagacaagatcgatatcggtaaagatgtttcagctgtgaagaaaggtggatgctgctcgaactaatcagagagtagaattattgttaacaacctaaggatcggtttttgttaacggttctatcgaatatgaagattgcttttaggttgagtaatgcccatttggcgtatttctgttatttatctgatctatcaatgttattgtttgaaaatgctatgtcaaattttcagaaccctaaattatatttatctcaaacaatagaattgttg

SEQ ID NO: 39012 - protein, 216 aa, Arabidopsis thaliana
  peptide (1)..(216): Ceres Seq. ID no. 12329133
  misc_feature (15)..(176): Pfam Name: Ras family Pfam Description: Ras family
  misc_feature (1)..(216): Homolog of NCBI NO: 541979 NR Description: GTP-binding protein, ras-like - fava bean
  misc_feature (1)..(216): Homolog of NCBI NO: 15234020 NR Description: ras-related GTP binding protein, putative
  misc_feature (1)..(216): Homolog of NCBI NO: 21536533 NR Description: Rab-type small GTP-binding protein-like
  misc_feature (1)..(216): Homolog of NCBI NO: 15242483 NR Description: GTP-binding protein, putative
MAGYRADDEYDYLFKVVLIGDSGVGKSNLLSRFTKNEFSLESKSTIGVEFATRSLNVDDKVIKAQIWDTAGQERYRAITSAYYRGAVGALLVYDVTRHSTFENVETWLKELRNHTDPNIVVMLVGNKSDLRHLVAVQTEDAKSFAEKESLYFMETSALEATNVENAFAEVLTQIHHIVSKKAMEAASESANVPSKGDKIDIGKDVSAVKKGGCCSN

SEQ ID NO: 39013 - DNA, 778 bp, Arabidopsis thaliana
  misc_feature (1)..(778): Ceres Seq. ID no. 12396902
  misc_feature: MA Experiment ID: 108434 Result: Down-regulated in Transcription
  misc_feature: MA Experiment 108434 PARAMETER Experiment Name: At_Root_Tips_cDNA_P Parameter: Tissue Value: Root Tips
  misc_feature: MA Experiment ID: 108461 Result: Down-regulated in Transcription
  misc_feature: MA Experiment 108461 PARAMETER Experiment Name: At_Germinating_Seeds_cDNA_P Parameter: Age (day) Value: 1 vs. 0
  misc_feature: MA Experiment 108461 PARAMETER Experiment Name: At_Germinating_Seeds_cDNA_P Parameter: Tissue Value: Germinating Seeds
  misc_feature: MA Experiment ID: 108579 Result: Down-regulated in Transcription
  misc_feature: MA Experiment 108579 PARAMETER Experiment Name: At_4deg_Cold_cDNA_P Parameter: Temperature (deg C) Value: 4 vs. 22
  misc_feature: MA Experiment 108579 PARAMETER Experiment Name: At_4deg_Cold_cDNA_P Parameter: Timepoint (hr) Value: 6
  misc_feature: MA Experiment 108579 PARAMETER Experiment Name: At_4deg_Cold_cDNA_P Parameter: Tissue Value: Aerial
  misc_feature: MA Experiment ID: 20000224 Result: Down-regulated in Transcription
  misc_feature: MA Experiment ID: 20000234 Result: Down-regulated in Transcription
  misc_feature: MA Experiment 20000234 PARAMETER Experiment Name: At_Siliques_P Parameter: Age (day) Value: 21
  misc_feature: MA Experiment 20000234 PARAMETER Experiment Name: At_Siliques_P Parameter: Organism Value: A. thaliana
  misc_feature: MA Experiment 20000234 PARAMETER Experiment Name: At_Siliques_P Parameter: Plant Line Value: WS
  misc_feature: MA Experiment 20000234 PARAMETER Experiment Name: At_Siliques_P Parameter: Tissue Value: Less Than 5mm Siliques vs. Whole Plant
  misc_feature: MA Experiment ID: 20000264 Result: Down-regulated in Transcription
  misc_feature: MA Experiment 20000264 PARAMETER Experiment Name: At_Open_Flower_P Parameter: Age (day) Value: 21
  misc_feature: MA Experiment 20000264 PARAMETER Experiment Name: At_Open_Flower_P Parameter: Plant Line Value: WS
  misc_feature: MA Experiment 20000264 PARAMETER Experiment Name: At_Open_Flower_P Parameter: Tissue Value: Open Flower vs. Whole Plant
  misc_feature: MA Experiment ID: 20000286 Result: Down-regulated in Transcription
  misc_feature: MA Experiment 20000286 PARAMETER Experiment Name: At_Open_Flower_P Parameter: Age (day) Value: 21
  misc_feature: MA Experiment 20000286 PARAMETER Experiment Name: At_Open_Flower_P Parameter: Plant Line Value: WS
  misc_feature: MA Experiment 20000286 PARAMETER Experiment Name: At_Open_Flower_P Parameter: Tissue Value: Half Open vs. Whole Plant
  misc_feature: MA Experiment ID: 20000437 Result: Up-regulated in Transcription
  misc_feature: MA Experiment 20000437 PARAMETER Experiment Name: At_Drought_P Parameter: Age (day) Value: 8
  misc_feature: MA Experiment 20000437 PARAMETER Experiment Name: At_Drought_P Parameter: Organism Value: A. thaliana
  misc_feature: MA Experiment 20000437 PARAMETER Experiment Name: At_Drought_P Parameter: Plant Line Value: WS
  misc_feature: MA Experiment 20000437 PARAMETER Experiment Name: At_Drought_P Parameter: Timepoint (hr) Value: 24
  misc_feature: MA Experiment 20000437 PARAMETER Experiment Name: At_Drought_P Parameter: Tissue Value: Whole Plant
  misc_feature: MA Experiment 20000437 PARAMETER Experiment Name: At_Drought_P Parameter: Treatment Value: Drought vs. No Drought
  misc_feature: MA Experiment ID: 20000453 Result: Up-regulated in Transcription
  misc_feature: MA Experiment 20000453 PARAMETER Experiment Name: At_100uM_ABA_P Parameter: Age (day) Value: 15
  misc_feature: MA Experiment 20000453 PARAMETER Experiment Name: At_100uM_ABA_P Parameter: Organism Value: A. thaliana
  misc_feature: MA Experiment 20000453 PARAMETER Experiment Name: At_100uM_ABA_P Parameter: Plant Line Value: WS
  misc_feature: MA Experiment 20000453 PARAMETER Experiment Name: At_100uM_ABA_P Parameter: Timepoint (hr) Value: 24
  misc_feature: MA Experiment 20000453 PARAMETER Experiment Name: At_100uM_ABA_P Parameter: Tissue Value: Aerial
  misc_feature: MA Experiment 20000453 PARAMETER Experiment Name: At_100uM_ABA_P Parameter: Treatment Value: 100uM ABA vs. No Treatment
  misc_feature: MA Experiment ID: 20001248 Result: Up-regulated in Transcription
  misc_feature: MA Experiment 20001248 PARAMETER Experiment Name: At_Far-red-induction_P Parameter: Age (day) Value: 7
  misc_feature: MA Experiment 20001248 PARAMETER Experiment Name: At_Far-red-induction_P Parameter: Light Value: Far-red vs. White
  misc_feature: MA Experiment 20001248 PARAMETER Experiment Name: At_Far-red-induction_P Parameter: Organism Value: A. thaliana
  misc_feature: MA Experiment 20001248 PARAMETER Experiment Name: At_Far-red-induction_P Parameter: Plant Line Value: Columbia
  misc_feature: MA Experiment 20001248 PARAMETER Experiment Name: At_Far-red-induction_P Parameter: Timepoint (hr) Value: 4
  misc_feature: MA Experiment 20001248 PARAMETER Experiment Name: At_Far-red-induction_P Parameter: Tissue Value: Whole Plant
  misc_feature: MA Experiment ID: 20001450 Result: Up-regulated in Transcription
  misc_feature: MA Experiment 20001450 PARAMETER Experiment Name: At_Far-red-induction_P Parameter: Age (day) Value: 7
  misc_feature: MA Experiment 20001450 PARAMETER Experiment Name: At_Far-red-induction_P Parameter: Light Value: Far-red vs. White
  misc_feature: MA Experiment 20001450 PARAMETER Experiment Name: At_Far-red-induction_P Parameter: Organism Value: A. thaliana
  misc_feature: MA Experiment 20001450 PARAMETER Experiment Name: At_Far-red-induction_P Parameter: Plant Line Value: Columbia
  misc_feature: MA Experiment 20001450 PARAMETER Experiment Name: At_Far-red-induction_P Parameter: Timepoint (hr) Value: 8
  misc_feature: MA Experiment 20001450 PARAMETER Experiment Name: At_Far-red-induction_P Parameter: Tissue Value: Whole Plant
  misc_feature: MA Experiment ID: 20001451 Result: Up-regulated in Transcription
  misc_feature: MA Experiment 20001451 PARAMETER Experiment Name: At_Far-red-induction_P Parameter: Age (day) Value: 7
  misc_feature: MA Experiment 20001451 PARAMETER Experiment Name: At_Far-red-induction_P Parameter: Light Value: Far-red vs. White
  misc_feature: MA Experiment 20001451 PARAMETER Experiment Name: At_Far-red-induction_P Parameter: Organism Value: A. thaliana
  misc_feature: MA Experiment 20001451 PARAMETER Experiment Name: At_Far-red-induction_P Parameter: Plant Line Value: Columbia
  misc_feature: MA Experiment 20001451 PARAMETER Experiment Name: At_Far-red-induction_P Parameter: Timepoint (hr) Value: 24
  misc_feature: MA Experiment 20001451 PARAMETER Experiment Name: At_Far-red-induction_P Parameter: Tissue Value: Whole Plant
gttttccttaagagcttcatcgtcatcatccgagaattggagcagagatacgaagatttggcgaaaaatggggagcgagccaacaaaagtgatggtggcggtgaacgcttcgacgatcaaagactatcctaacccttcgattagctgcaaaagagcattcgaatggactctggagaagatcgtaaggtccaacacttccgatttcaagattctcttgctccacgtacaagtcgtcgacgaagacggttttgatgacgtggatagcatttatgcttcccctgaggatttccgagacatgagacaatctaacaaggcaaaaggtcttcaccttctcgagtttttcgttaataaatgtcatgagattggggttggttgcgaggcctggattaagacaggtgatcccaaggatgtcatatgccaagaagtgaagcgagttcgaccagattttctggtcgtgggaagtcgtggacttggccggtttcaaaaggtctttgtggggactgtgagtgcgttctgtgtgaaacatgcggagtgtccagttatgacgatcaaacgcaatgccgatgaaactcccagtgatccagctgatgactaaacaataacaacgtcccttccttctttgatctatacagagagagagtgcttttgtgtgtacaaaatccaaattcctacccctatatgtatttgtatctgtgtatgtatgtgtgtgtgcagcttgttccgttttctgaattggttttcaaactgaaccaaactgctatatatttggtttctttgc

SEQ ID NO: 39014 - protein, 197 aa, Arabidopsis thaliana
  peptide (1)..(197): Ceres Seq. ID no. 12396903
  misc_feature (27)..(184): Pfam Name: Universal stress protein family Pfam Description: Universal stress protein family
  misc_feature (52)..(190): Homolog of NCBI NO: 30681321 NR Description: ER6 protein -related [Arabidopsis thaliana]
  misc_feature (29)..(184): Homolog of NCBI NO: 40539010 NR Description: putative stress-related protein
  misc_feature (70)..(193): Homolog of NCBI NO: 30694811 NR Description: expressed protein [Arabidopsis thaliana]
  misc_feature (24)..(185): Homolog of NCBI NO: 34914610 NR Description: P0520B06.18 [Oryza sativa (japonica
  misc_feature (50)..(187): Homolog of NCBI NO: 18408994 NR Description: expressed protein
  misc_feature (25)..(197): Homolog of NCBI NO: 19387249 NR Description: putative ethylene-responsive protein
  misc_feature (23)..(197): Homolog of NCBI NO: 15241464 NR Description: putative protein; protein id: At5g14680.1
  misc_feature (31)..(197): Homolog of NCBI NO: 21536534 NR Description: putative ethylene-responsive protein [Arabidopsis
  misc_feature (23)..(197): Homolog of NCBI NO: 18395845 NR Description: expressed protein
  misc_feature (8)..(197): Homolog of NCBI NO: 6016711 NR Description: unknown protein [Arabidopsis thaliana]
FSLRASSSSSENWSRDTKIWRKMGSEPTKVMVAVNASTIKDYPNPSISCKRAFEWTLEKIVRSNTSDFKILLLHVQVVDEDGFDDVDSIYASPEDFRDMRQSNKAKGLHLLEFFVNKCHEIGVGCEAWIKTGDPKDVICQEVKRVRPDFLVVGSRGLGRFQKVFVGTVSAFCVKHAECPVMTIKRNADETPSDPADD

SEQ ID NO: 39015 - protein, 175 aa, Arabidopsis thaliana
  peptide (1)..(175): Ceres Seq. ID no. 12396904
  misc_feature (5)..(162): Pfam Name: Universal stress protein family Pfam Description: Universal stress protein family
  misc_feature (30)..(168): Homolog of NCBI NO: 30681321 NR Description: ER6 protein -related [Arabidopsis thaliana]
  misc_feature (7)..(162): Homolog of NCBI NO: 40539010 NR Description: putative stress-related protein
  misc_feature (48)..(171): Homolog of NCBI NO: 30694811 NR Description: expressed protein [Arabidopsis thaliana]
  misc_feature (2)..(163): Homolog of NCBI NO: 34914610 NR Description: P0520B06.18 [Oryza sativa (japonica
  misc_feature (28)..(165): Homolog of NCBI NO: 18408994 NR Description: expressed protein
  misc_feature (3)..(175): Homolog of NCBI NO: 19387249 NR Description: putative ethylene-responsive protein
  misc_feature (1)..(175): Homolog of NCBI NO: 15241464 NR Description: putative protein; protein id: At5g14680.1
  misc_feature (9)..(175): Homolog of NCBI NO: 21536534 NR Description: putative ethylene-responsive protein [Arabidopsis
  misc_feature (1)..(175): Homolog of NCBI NO: 18395845 NR Description: expressed protein
  misc_feature (1)..(175): Homolog of NCBI NO: 6016711 NR Description: unknown protein [Arabidopsis thaliana]
MGSEPTKVMVAVNASTIKDYPNPSISCKRAFEWTLEKIVRSNTSDFKILLLHVQVVDEDGFDDVDSIYASPEDFRDMRQSNKAKGLHLLEFFVNKCHEIGVGCEAWIKTGDPKDVICQEVKRVRPDFLVVGSRGLGRFQKVFVGTVSAFCVKHAECPVMTIKRNADETPSDPADD

SEQ ID NO: 39016 - protein, 167 aa, Arabidopsis thaliana
  peptide (1)..(167): Ceres Seq. ID no. 12396905
  misc_feature (1)..(154): Pfam Name: Universal stress protein family Pfam Description: Universal stress protein family
  misc_feature (22)..(160): Homolog of NCBI NO: 30681321 NR Description: ER6 protein -related [Arabidopsis thaliana]
  misc_feature (1)..(154): Homolog of NCBI NO: 40539010 NR Description: putative stress-related protein
  misc_feature (40)..(163): Homolog of NCBI NO: 30694811 NR Description: expressed protein [Arabidopsis thaliana]
  misc_feature (1)..(155): Homolog of NCBI NO: 34914610 NR Description: P0520B06.18 [Oryza sativa (japonica
  misc_feature (20)..(157): Homolog of NCBI NO: 18408994 NR Description: expressed protein
  misc_feature (1)..(167): Homolog of NCBI NO: 19387249 NR Description: putative ethylene-responsive protein
  misc_feature (1)..(167): Homolog of NCBI NO: 15241464 NR Description: putative protein; protein id: At5g14680.1
  misc_feature (1)..(167): Homolog of NCBI NO: 21536534 NR Description: putative ethylene-responsive protein [Arabidopsis
  misc_feature (1)..(167): Homolog of NCBI NO: 18395845 NR Description: expressed protein
  misc_feature (1)..(167): Homolog of NCBI NO: 6016711 NR Description: unknown protein [Arabidopsis thaliana]
MVAVNASTIKDYPNPSISCKRAFEWTLEKIVRSNTSDFKILLLHVQVVDEDGFDDVDSIYASPEDFRDMRQSNKAKGLHLLEFFVNKCHEIGVGCEAWIKTGDPKDVICQEVKRVRPDFLVVGSRGLGRFQKVFVGTVSAFCVKHAECPVMTIKRNADETPSDPADD

SEQ ID NO: 39017 - DNA, 2066 bp, Arabidopsis thaliana
  misc_feature (1)..(2066): Ceres Seq. ID no. 13495924
  misc_feature: MA Experiment ID: 108434 Result: Down-regulated in Transcription
  misc_feature: MA Experiment 108434 PARAMETER Experiment Name: At_Root_Tips_cDNA_P Parameter: Tissue Value: Root Tips
  misc_feature: MA Experiment ID: 108435 Result: Down-regulated in Transcription
  misc_feature: MA Experiment 108435 PARAMETER Experiment Name: At_stm_Mutants_cDNA_P Parameter: Plant Line Value: wt Landsburg vs stm
  misc_feature: MA Experiment 108435 PARAMETER Experiment Name: At_stm_Mutants_cDNA_P Parameter: Tissue Value: Shoot Apical Meristem Region
  misc_feature: MA Experiment ID: 108463 Result: Up-regulated in Transcription
  misc_feature: MA Experiment 108463 PARAMETER Experiment Name: At_Germinating_Seeds_cDNA_P Parameter: Age (day) Value: 3 vs. 0
  misc_feature: MA Experiment 108463 PARAMETER Experiment Name: At_Germinating_Seeds_cDNA_P Parameter: Tissue Value: Germinating Seeds
  misc_feature: MA Experiment ID: 108573 Result: Up-regulated in Transcription
  misc_feature: MA Experiment 108573 PARAMETER Experiment Name: At_Drought_cDNA_P Parameter: Timepoint (hr) Value: 6
  misc_feature: MA Experiment 108573 PARAMETER Experiment Name: At_Drought_cDNA_P Parameter: Tissue Value: Aerial
  misc_feature: MA Experiment 108573 PARAMETER Experiment Name: At_Drought_cDNA_P Parameter: Treatment Value: Drought vs. No Drought
  misc_feature: MA Experiment ID: 108574 Result: Down-regulated in Transcription
  misc_feature: MA Experiment 108574 PARAMETER Experiment Name: At_Wounding__cDNA_P Parameter: Timepoint (hr) Value: 1
  misc_feature: MA Experiment 108574 PARAMETER Experiment Name: At_Wounding__cDNA_P Parameter: Tissue Value: Aerial
  misc_feature: MA Experiment 108574 PARAMETER Experiment Name: At_Wounding__cDNA_P Parameter: Treatment Value: Wounding vs. No Wounding
  misc_feature: MA Experiment ID: 108577 Result: Down-regulated in Transcription
  misc_feature: MA Experiment 108577 PARAMETER Experiment Name: At_42deg_Heat_cDNA_P Parameter: Temperature (deg C) Value: 42 vs. 22
  misc_feature: MA Experiment 108577 PARAMETER Experiment Name: At_42deg_Heat_cDNA_P Parameter: Timepoint (hr) Value: 6
  misc_feature: MA Experiment 108577 PARAMETER Experiment Name: At_42deg_Heat_cDNA_P Parameter: Tissue Value: Aerial
  misc_feature: MA Experiment ID: 108668 Result: Down-regulated in Transcription
  misc_feature: MA Experiment 108668 PARAMETER Experiment Name: At_2mM_SA_cDNA_P Parameter: Plant Line Value: WS
  misc_feature: MA Experiment 108668 PARAMETER Experiment Name: At_2mM_SA_cDNA_P Parameter: Timepoint (hr) Value: 6
  misc_feature: MA Experiment 108668 PARAMETER Experiment Name: At_2mM_SA_cDNA_P Parameter: Treatment Value: 2mM SA vs. No Treatment
  misc_feature: MA Experiment ID: 20000030 Result: Down-regulated in Transcription
  misc_feature: MA Experiment 20000030 PARAMETER Experiment Name: At_CS6630_Roots_cDNA_P Parameter: Plant Line Value: CS6630 vs. WS
  misc_feature: MA Experiment 20000030 PARAMETER Experiment Name: At_CS6630_Roots_cDNA_P Parameter: Tissue Value: Roots
  misc_feature: MA Experiment ID: 20000071 Result: Up-regulated in Transcription
  misc_feature: MA Experiment 20000071 PARAMETER Experiment Name: At_100uM_ABA_Mutants_cDNA_P Parameter: Plant Line Value: CS8104
  misc_feature: MA Experiment 20000071 PARAMETER Experiment Name: At_100uM_ABA_Mutants_cDNA_P Parameter: Timepoint (hr) Value: 6
  misc_feature: MA Experiment 20000071 PARAMETER Experiment Name: At_100uM_ABA_Mutants_cDNA_P Parameter: Tissue Value: Aerial
  misc_feature: MA Experiment 20000071 PARAMETER Experiment Name: At_100uM_ABA_Mutants_cDNA_P Parameter: Treatment Value: 100uM ABA vs. No Treatment
  misc_feature: MA Experiment ID: 20000224 Result: Up-regulated in Transcription
  misc_feature: MA Experiment ID: 20000315 Result: Down-regulated in Transcription
  misc_feature: MA Experiment 20000315 PARAMETER Experiment Name: At_14day_Shoots-Roots_Sub_P Parameter: Age (day) Value: 14
  misc_feature: MA Experiment 20000315 PARAMETER Experiment Name: At_14day_Shoots-Roots_Sub_P Parameter: Organism Value: A. thaliana
  misc_feature: MA Experiment 20000315 PARAMETER Experiment Name: At_14day_Shoots-Roots_Sub_P Parameter: Plant Line Value: WS
  misc_feature: MA Experiment 20000315 PARAMETER Experiment Name: At_14day_Shoots-Roots_Sub_P Parameter: Tissue Value: Shoots vs. Whole Plant
  misc_feature: MA Experiment ID: 20000328 Result: Down-regulated in Transcription
  misc_feature: MA Experiment 20000328 PARAMETER Experiment Name: At_42deg_Heat_Sub_P Parameter: Age (day) Value: 14
  misc_feature: MA Experiment 20000328 PARAMETER Experiment Name: At_42deg_Heat_Sub_P Parameter: Organism Value: A. thaliana
  misc_feature: MA Experiment 20000328 PARAMETER Experiment Name: At_42deg_Heat_Sub_P Parameter: Plant Line Value: WS
  misc_feature: MA Experiment 20000328 PARAMETER Experiment Name: At_42deg_Heat_Sub_P Parameter: Temperature (deg C) Value: 42 vs. 22
  misc_feature: MA Experiment 20000328 PARAMETER Experiment Name: At_42deg_Heat_Sub_P Parameter: Timepoint (hr) Value: 6
  misc_feature: MA Experiment 20000328 PARAMETER Experiment Name: At_42deg_Heat_Sub_P Parameter: Tissue Value: Aerial
  misc_feature: MA Experiment ID: 20000355 Result: Down-regulated in Transcription
  misc_feature: MA Experiment 20000355 PARAMETER Experiment Name: At_Siliques_Sub_P Parameter: Age (day) Value: 21
  misc_feature: MA Experiment 20000355 PARAMETER Experiment Name: At_Siliques_Sub_P Parameter: Organism Value: A. thaliana
  misc_feature: MA Experiment 20000355 PARAMETER Experiment Name: At_Siliques_Sub_P Parameter: Plant Line Value: WS
  misc_feature: MA Experiment 20000355 PARAMETER Experiment Name: At_Siliques_Sub_P Parameter: Tissue Value: Less Than 5mm Siliques vs. Whole Plant
  misc_feature: MA Experiment ID: 20000440 Result: Down-regulated in Transcription
  misc_feature: MA Experiment 20000440 PARAMETER Experiment Name: At_Closed-Flower__Sub_P Parameter: Tissue Value: Closed Flower vs. Whole Plant
ttccaaattcctctgttttcttcttttaaaagcctcctcttcttcctcttctctctcctcacaactcaaaactctctccatctctcttctaaaatcagacaagaaagatggctcaagaggaagtacagaaatcggctgatgtcgctgctgctccggtggtgaaggagaaacctattaccgataaggaggttactattcctacccctgtggcagagaaagaggaagttgctgctcctgtctctgatgagaaggcggttccagagaaggaggtgactccggagaaggaagccccagcggcggaagcggagaaatctgtttcggtgaaggaggaagagacggttgttgtagctgagaaggttgttgttttaactgctgaggaagttcagaagaaggcacttgaggagtttaaggagcttgtaagggaggctttgaacaaacgtgaattcactgctccggtgacgccggttaaggaagagaaaacagaggagaagaaaacagaggaggaaactaaagaggaagagaaaacagaggagaagaaagaagagacaacgactgaggttaaggttgaagaagagaaaccggcggttccagcggcggaggaggagaaatcatcagaggctgctccggttgagaccaaatctgaggagaaacctgaagagaaagcagaggtaacaaccgagaaagcatccagtgccgaagaagatggaaccaagaccgtggaagcaatcgaagaatctatcgtctctgtttcaccacctgaatccgccgtagcacctgtcgtggtagagactgtcgccgttgctgaggcagagccagtggagccggaagaagtctcgatctggggagttccactactccaagacgagagatctgacgtgatcctcacgaaattcctccgtgcaagagactttaaggtcaaagaagctttaaccatgcttaaaaacaccgtccagtggcgtaaagaaaacaaaatcgacgaactcgttgaatccggagaagaagtgagtgagttcgagaagatggtgtttgctcacggtgttgacaaagaaggacacgtcgtgatctacagttcttacggtgagtttcagaacaaggagcttttctccgacaaggagaagcttaacaagttcctcagctggaggattcagctacaagagaagtgtgtgagagctattgatttcagcaaccctgaagcgaagtcttcgtttgtgttcgtcagcgacttcaggaacgctccaggacttggtaaaagagccttgtggcaattcatcagacgcgctgttaaacaattcgaggacaattatcctgaattcgccgctaaagagctattcatcaatgtcccatggtggtacattccatactacaaaacattcggatctatcatcacatccccaaggactaggagcaagatggtccttgctggtccatccaaatctgccgatactattttcaaatacatagctcctgaacaagttcccgttaaatacggtggacttagcaaagatactcctttgaccgaagaaaccataacggaagccatcgttaaaccggcagcaaactacactattgaattgcctgcttctgaggcttgcacgctttcatgggagcttagggttttgggtgctgatgtgagctacggagctcagtttgagccaaccaccgaaggaagctatgctgtgatcgtctctaagacacggaagattggatcaaccgatgaaccggtgataaccgattcttttaaggtgggtgaaccgggaaagattgtgatcacaatcgacaaccagacttccaagaagaagaaagtgctctacaggttcaaaactcaataaaaggtctgatctttgaaatccaaatccaaggaagaagcaaaaaaaatgttattttgttatttgggggaaacaaattttaattaattaatttagtttgttatttattatgtaattttgaaatctcaagatgtggttgtgtttttgctttgttttggtattgggggttgttttcgtgtgtggagaatatgtgattaaaattcaaaagaaagtaaagaacactttgtttcatgatttctt

SEQ ID NO: 39018 - protein, 573 aa, Arabidopsis thaliana
  peptide (1)..(573): Ceres Seq. ID no. 13495925
  misc_feature (305)..(489): Pfam Name: CRAL/TRIO domain Pfam Description: CRAL/TRIO domain
  misc_feature (305)..(489): Pfam Name: CRAL/TRIO domain Pfam Description: CRAL/TRIO domain
  misc_feature (305)..(489): Pfam Name: CRAL/TRIO domain Pfam Description: CRAL/TRIO domain
  misc_feature (5)..(489): Homolog of NCBI NO: 25407487 NR Description: hypothetical protein AT4g09160 [imported] -
  misc_feature (5)..(573): Homolog of NCBI NO: 30680992 NR Description: expressed protein [Arabidopsis thaliana]
  misc_feature (27)..(573): Homolog of NCBI NO: 14334978 NR Description: unknown protein [Arabidopsis thaliana]
  misc_feature (27)..(573): Homolog of NCBI NO: 18397616 NR Description: expressed protein [Arabidopsis thaliana]
  misc_feature (239)..(573): Homolog of NCBI NO: 15081614 NR Description: At1g72160/T9N14_8 [Arabidopsis thaliana]
  misc_feature (5)..(489): Homolog of NCBI NO: 25407487 NR Description: hypothetical protein AT4g09160 [imported] -
  misc_feature (27)..(573): Homolog of NCBI NO: 14334978 NR Description: unknown protein [Arabidopsis thaliana]
  misc_feature (239)..(573): Homolog of NCBI NO: 15081614 NR Description: At1g72160/T9N14_8 [Arabidopsis thaliana]
  misc_feature (27)..(573): Homolog of NCBI NO: 18397616 NR Description: expressed protein [Arabidopsis thaliana]
  misc_feature (27)..(573): Homolog of NCBI NO: 14334978 NR Description: unknown protein [Arabidopsis thaliana]
  misc_feature (5)..(573): Homolog of NCBI NO: 30680992 NR Description: expressed protein [Arabidopsis thaliana]
  misc_feature (5)..(489): Homolog of NCBI NO: 25407487 NR Description: hypothetical protein AT4g09160 [imported] -
  misc_feature (1)..(573): Homolog of NCBI NO: 15218382 NR Description: cytosolic factor -related [Arabidopsis thaliana]
  misc_feature (1)..(573): Homolog of NCBI NO: 15219901 NR Description: expressed protein [Arabidopsis thaliana]
  misc_feature (121)..(572): Homolog of NCBI NO: 8894548 NR Description: hypothetical protein [Cicer arietinum]
  misc_feature (36)..(573): Homolog of NCBI NO: 34907288 NR Description: contains ESTs
  misc_feature (117)..(573): Homolog of NCBI NO: 15218383 NR Description: cytosolic factor -related [Arabidopsis thaliana]
  misc_feature (1)..(573): Homolog of NCBI NO: 15218382 NR Description: cytosolic factor -related [Arabidopsis thaliana]
  misc_feature (1)..(573): Homolog of NCBI NO: 15219901 NR Description: expressed protein [Arabidopsis thaliana]
  misc_feature (121)..(572): Homolog of NCBI NO: 8894548 NR Description: hypothetical protein [Cicer arietinum]
  misc_feature (36)..(573): Homolog of NCBI NO: 34907288 NR Description: contains ESTs
  misc_feature (117)..(573): Homolog of NCBI NO: 15218383 NR Description: cytosolic factor -related [Arabidopsis thaliana]
  misc_feature (239)..(573): Homolog of NCBI NO: 15081614 NR Description: At1g72160/T9N14_8 [Arabidopsis thaliana]
  misc_feature (27)..(573): Homolog of NCBI NO: 18397616 NR Description: expressed protein [Arabidopsis thaliana]
  misc_feature (5)..(573): Homolog of NCBI NO: 30680992 NR Description: expressed protein [Arabidopsis thaliana]
  misc_feature (117)..(573): Homolog of NCBI NO: 15218383 NR Description: cytosolic factor -related [Arabidopsis thaliana]
  misc_feature (36)..(573): Homolog of NCBI NO: 34907288 NR Description: contains ESTs
  misc_feature (121)..(572): Homolog of NCBI NO: 8894548 NR Description: hypothetical protein [Cicer arietinum]
  misc_feature (1)..(573): Homolog of NCBI NO: 15219901 NR Description: expressed protein [Arabidopsis thaliana]
  misc_feature (1)..(573): Homolog of NCBI NO: 15218382 NR Description: cytosolic factor -related [Arabidopsis thaliana]
MAQEEVQKSADVAAAPVVKEKPITDKEVTIPTPVAEKEEVAAPVSDEKAVPEKEVTPEKEAPAAEAEKSVSVKEEETVVVAEKVVVLTAEEVQKKALEEFKELVREALNKREFTAPVTPVKEEKTEEKKTEEETKEEEKTEEKKEETTTEVKVEEEKPAVPAAEEEKSSEAAPVETKSEEKPEEKAEVTTEKASSAEEDGTKTVEAIEESIVSVSPPESAVAPVVVETVAVAEAEPVEPEEVSIWGVPLLQDERSDVILTKFLRARDFKVKEALTMLKNTVQWRKENKIDELVESGEEVSEFEKMVFAHGVDKEGHVVIYSSYGEFQNKELFSDKEKLNKFLSWRIQLQEKCVRAIDFSNPEAKSSFVFVSDFRNAPGLGKRALWQFIRRAVKQFEDNYPEFAAKELFINVPWWYIPYYKTFGSIITSPRTRSKMVLAGPSKSADTIFKYIAPEQVPVKYGGLSKDTPLTEETITEAIVKPAANYTIELPASEACTLSWELRVLGADVSYGAQFEPTTEGSYAVIVSKTRKIGSTDEPVITDSFKVGEPGKIVITIDNQTSKKKKVLYRFKTQ

SEQ ID NO: 39019 - protein, 298 aa, Arabidopsis thaliana
  peptide (1)..(298): Ceres Seq. ID no. 13495926
  misc_feature (30)..(214): Pfam Name: CRAL/TRIO domain Pfam Description: CRAL/TRIO domain
  misc_feature (30)..(214): Pfam Name: CRAL/TRIO domain Pfam Description: CRAL/TRIO domain
  misc_feature (30)..(214): Pfam Name: CRAL/TRIO domain Pfam Description: CRAL/TRIO domain
  misc_feature (1)..(214): Homolog of NCBI NO: 25407487 NR Description: hypothetical protein AT4g09160 [imported] -
  misc_feature (1)..(298): Homolog of NCBI NO: 30680992 NR Description: expressed protein [Arabidopsis thaliana]
  misc_feature (1)..(298): Homolog of NCBI NO: 14334978 NR Description: unknown protein [Arabidopsis thaliana]
  misc_feature (1)..(298): Homolog of NCBI NO: 18397616 NR Description: expressed protein [Arabidopsis thaliana]
  misc_feature (1)..(298): Homolog of NCBI NO: 15081614 NR Description: At1g72160/T9N14_8 [Arabidopsis thaliana]
  misc_feature (1)..(214): Homolog of NCBI NO: 25407487 NR Description: hypothetical protein AT4g09160 [imported] -
  misc_feature (1)..(298): Homolog of NCBI NO: 14334978 NR Description: unknown protein [Arabidopsis thaliana]
  misc_feature (1)..(298): Homolog of NCBI NO: 15081614 NR Description: At1g72160/T9N14_8 [Arabidopsis thaliana]
  misc_feature (1)..(298): Homolog of NCBI NO: 18397616 NR Description: expressed protein [Arabidopsis thaliana]
  misc_feature (1)..(298): Homolog of NCBI NO: 14334978 NR Description: unknown protein [Arabidopsis thaliana]
  misc_feature (1)..(298): Homolog of NCBI NO: 30680992 NR Description: expressed protein [Arabidopsis thaliana]
  misc_feature (1)..(214): Homolog of NCBI NO: 25407487 NR Description: hypothetical protein AT4g09160 [imported] -
  misc_feature (1)..(298): Homolog of NCBI NO: 15218382 NR Description: cytosolic factor -related [Arabidopsis thaliana]
  misc_feature (1)..(298): Homolog of NCBI NO: 15219901 NR Description: expressed protein [Arabidopsis thaliana]
  misc_feature (1)..(297): Homolog of NCBI NO: 8894548 NR Description: hypothetical protein [Cicer arietinum]
  misc_feature (1)..(298): Homolog of NCBI NO: 34907288 NR Description: contains ESTs
  misc_feature (1)..(298): Homolog of NCBI NO: 15218383 NR Description: cytosolic factor -related [Arabidopsis thaliana]
  misc_feature (1)..(298): Homolog of NCBI NO: 15218382 NR Description: cytosolic factor -related [Arabidopsis thaliana]
  misc_feature (1)..(298): Homolog of NCBI NO: 15219901 NR Description: expressed protein [Arabidopsis thaliana]
  misc_feature (1)..(297): Homolog of NCBI NO: 8894548 NR Description: hypothetical protein [Cicer arietinum]
  misc_feature (1)..(298): Homolog of NCBI NO: 34907288 NR Description: contains ESTs
  misc_feature (1)..(298): Homolog of NCBI NO: 15218383 NR Description: cytosolic factor -related [Arabidopsis thaliana]
  misc_feature (1)..(298): Homolog of NCBI NO: 15081614 NR Description: At1g72160/T9N14_8 [Arabidopsis thaliana]
  misc_feature (1)..(298): Homolog of NCBI NO: 18397616 NR Description: expressed protein [Arabidopsis thaliana]
  misc_feature (1)..(298): Homolog of NCBI NO: 30680992 NR Description: expressed protein [Arabidopsis thaliana]
  misc_feature (1)..(298): Homolog of NCBI NO: 15218383 NR Description: cytosolic factor -related [Arabidopsis thaliana]
  misc_feature (1)..(298): Homolog of NCBI NO: 34907288 NR Description: contains ESTs
  misc_feature (1)..(297): Homolog of NCBI NO: 8894548 NR Description: hypothetical protein [Cicer arietinum]
  misc_feature (1)..(298): Homolog of NCBI NO: 15219901 NR Description: expressed protein [Arabidopsis thaliana]
  misc_feature (1)..(298): Homolog of NCBI NO: 15218382 NR Description: cytosolic factor -related [Arabidopsis thaliana]
MLKNTVQWRKENKIDELVESGEEVSEFEKMVFAHGVDKEGHVVIYSSYGEFQNKELFSDKEKLNKFLSWRIQLQEKCVRAIDFSNPEAKSSFVFVSDFRNAPGLGKRALWQFIRRAVKQFEDNYPEFAAKELFINVPWWYIPYYKTFGSIITSPRTRSKMVLAGPSKSADTIFKYIAPEQVPVKYGGLSKDTPLTEETITEAIVKPAANYTIELPASEACTLSWELRVLGADVSYGAQFEPTTEGSYAVIVSKTRKIGSTDEPVITDSFKVGEPGKIVITIDNQTSKKKKVLYRFKTQ

SEQ ID NO: 39020 - DNA, 809 bp, Arabidopsis thaliana
  misc_feature (1)..(809): Ceres Seq. ID no. 12559194
  misc_feature: MA Experiment ID: 20000180 Result: Up-regulated in Transcription
  misc_feature: MA Experiment 20000180 PARAMETER Experiment Name: At_Germinating_Seeds_P Parameter: Age (hr) Value: 24 vs. 0
  misc_feature: MA Experiment 20000180 PARAMETER Experiment Name: At_Germinating_Seeds_P Parameter: Tissue Value: Germinating Seeds
  misc_feature: MA Experiment ID: 20000185 Result: Down-regulated in Transcription
  misc_feature: MA Experiment 20000185 PARAMETER Experiment Name: At_Roots__P Parameter: Age (day) Value: 7 vs. 21
  misc_feature: MA Experiment 20000185 PARAMETER Experiment Name: At_Roots__P Parameter: Organism Value: A. thaliana
  misc_feature: MA Experiment 20000185 PARAMETER Experiment Name: At_Roots__P Parameter: Tissue Value: Roots vs. Whole Plant
  misc_feature: MA Experiment ID: 20000264 Result: Down-regulated in Transcription
  misc_feature: MA Experiment 20000264 PARAMETER Experiment Name: At_Open_Flower_P Parameter: Age (day) Value: 21
  misc_feature: MA Experiment 20000264 PARAMETER Experiment Name: At_Open_Flower_P Parameter: Plant Line Value: WS
  misc_feature: MA Experiment 20000264 PARAMETER Experiment Name: At_Open_Flower_P Parameter: Tissue Value: Open Flower vs. Whole Plant
  misc_feature: MA Experiment ID: 20000439 Result: Down-regulated in Transcription
  misc_feature: MA Experiment 20000439 PARAMETER Experiment Name: At_Roots__P Parameter: Age (day) Value: 14 vs. 21
  misc_feature: MA Experiment 20000439 PARAMETER Experiment Name: At_Roots__P Parameter: Organism Value: A. thaliana
  misc_feature: MA Experiment 20000439 PARAMETER Experiment Name: At_Roots__P Parameter: Tissue Value: Roots vs. Whole Plant
  misc_feature: MA Experiment ID: 20000794 Result: Down-regulated in Transcription
  misc_feature: MA Experiment 20000794 PARAMETER Experiment Name: At_Petals_P Parameter: Age (day) Value: 23-25 days
  misc_feature: MA Experiment 20000794 PARAMETER Experiment Name: At_Petals_P Parameter: Plant Line Value: WS
  misc_feature: MA Experiment 20000794 PARAMETER Experiment Name: At_Petals_P Parameter: Tissue Value: Petals vs. Whole plant
  misc_feature: MA Experiment ID: 20001248 Result: Down-regulated in Transcription
  misc_feature: MA Experiment 20001248 PARAMETER Experiment Name: At_Far-red-induction_P Parameter: Age (day) Value: 7
  misc_feature: MA Experiment 20001248 PARAMETER Experiment Name: At_Far-red-induction_P Parameter: Light Value: Far-red vs. White
  misc_feature: MA Experiment 20001248 PARAMETER Experiment Name: At_Far-red-induction_P Parameter: Organism Value: A. thaliana
  misc_feature: MA Experiment 20001248 PARAMETER Experiment Name: At_Far-red-induction_P Parameter: Plant Line Value: Columbia
  misc_feature: MA Experiment 20001248 PARAMETER Experiment Name: At_Far-red-induction_P Parameter: Timepoint (hr) Value: 4
  misc_feature: MA Experiment 20001248 PARAMETER Experiment Name: At_Far-red-induction_P Parameter: Tissue Value: Whole Plant
  misc_feature: MA Experiment ID: 20001451 Result: Down-regulated in Transcription
  misc_feature: MA Experiment 20001451 PARAMETER Experiment Name: At_Far-red-induction_P Parameter: Age (day) Value: 7
  misc_feature: MA Experiment 20001451 PARAMETER Experiment Name: At_Far-red-induction_P Parameter: Light Value: Far-red vs. White
  misc_feature: MA Experiment 20001451 PARAMETER Experiment Name: At_Far-red-induction_P Parameter: Organism Value: A. thaliana
  misc_feature: MA Experiment 20001451 PARAMETER Experiment Name: At_Far-red-induction_P Parameter: Plant Line Value: Columbia
  misc_feature: MA Experiment 20001451 PARAMETER Experiment Name: At_Far-red-induction_P Parameter: Timepoint (hr) Value: 24
  misc_feature: MA Experiment 20001451 PARAMETER Experiment Name: At_Far-red-induction_P Parameter: Tissue Value: Whole Plant
  misc_feature: MA Experiment ID: 20001557 Result: Down-regulated in Transcription
  misc_feature: MA Experiment 20001557 PARAMETER Experiment Name: At_Drought_Soil_Dry_P Parameter: Age (day) Value: 27
  misc_feature: MA Experiment 20001557 PARAMETER Experiment Name: At_Drought_Soil_Dry_P Parameter: Organism Value: A. thaliana
  misc_feature: MA Experiment 20001557 PARAMETER Experiment Name: At_Drought_Soil_Dry_P Parameter: Plant Line Value: WS
  misc_feature: MA Experiment 20001557 PARAMETER Experiment Name: At_Drought_Soil_Dry_P Parameter: Post Timepoint (hr) Value: 3
  misc_feature: MA Experiment 20001557 PARAMETER Experiment Name: At_Drought_Soil_Dry_P Parameter: Post-Treatment Value: Re-Water vs. No Drought
  misc_feature: MA Experiment 20001557 PARAMETER Experiment Name: At_Drought_Soil_Dry_P Parameter: Timepoint (day) Value: 13
  misc_feature: MA Experiment 20001557 PARAMETER Experiment Name: At_Drought_Soil_Dry_P Parameter: Treatment Value: Drought vs. No Drought
  misc_feature: MA Experiment ID: 20001558 Result: Down-regulated in Transcription
  misc_feature: MA Experiment 20001558 PARAMETER Experiment Name: At_Drought_Soil_Dry_P Parameter: Age (day) Value: 27
  misc_feature: MA Experiment 20001558 PARAMETER Experiment Name: At_Drought_Soil_Dry_P Parameter: Organism Value: A. thaliana
  misc_feature: MA Experiment 20001558 PARAMETER Experiment Name: At_Drought_Soil_Dry_P Parameter: Plant Line Value: WS
  misc_feature: MA Experiment 20001558 PARAMETER Experiment Name: At_Drought_Soil_Dry_P Parameter: Post Timepoint (hr) Value: 6
  misc_feature: MA Experiment 20001558 PARAMETER Experiment Name: At_Drought_Soil_Dry_P Parameter: Post-Treatment Value: Re-Water vs. No Drought
  misc_feature: MA Experiment 20001558 PARAMETER Experiment Name: At_Drought_Soil_Dry_P Parameter: Timepoint (day) Value: 13
  misc_feature: MA Experiment 20001558 PARAMETER Experiment Name: At_Drought_Soil_Dry_P Parameter: Treatment Value: Drought vs. No Drought
  misc_feature: MA Experiment ID: 20001757 Result: Up-regulated in Transcription
  misc_feature: MA Experiment 20001757 PARAMETER Experiment Name: At_50mM_NH4NO3_L-to-H_P Parameter: Timepoint (hr) Value: 6
  misc_feature: MA Experiment 20001757 PARAMETER Experiment Name: At_50mM_NH4NO3_L-to-H_P Parameter: Tissue Value: Leaf
  misc_feature: MA Experiment 20001757 PARAMETER Experiment Name: At_50mM_NH4NO3_L-to-H_P Parameter: Treatment Value: 50mM NH4NO3 vs 100mM Mannitol
  misc_feature: MA Experiment ID: 20001904 Result: Down-regulated in Transcription
  misc_feature: MA Experiment 20001904 PARAMETER Experiment Name: At_Drought_Reproduction_P Parameter: Age (day) Value: 37
  misc_feature: MA Experiment 20001904 PARAMETER Experiment Name: At_Drought_Reproduction_P Parameter: Organism Value: A. thaliana
  misc_feature: MA Experiment 20001904 PARAMETER Experiment Name: At_Drought_Reproduction_P Parameter: Plant Line Value: WS
  misc_feature: MA Experiment 20001904 PARAMETER Experiment Name: At_Drought_Reproduction_P Parameter: Timepoint (day) Value: 7
  misc_feature: MA Experiment 20001904 PARAMETER Experiment Name: At_Drought_Reproduction_P Parameter: Tissue Value: Rosettes
  misc_feature: MA Experiment 20001904 PARAMETER Experiment Name: At_Drought_Reproduction_P Parameter: Treatment Value: Drought vs. No Drought
  misc_feature: MA Experiment ID: 20001905 Result: Down-regulated in Transcription
  misc_feature: MA Experiment 20001905 PARAMETER Experiment Name: At_Drought_Reproduction_P Parameter: Age (day) Value: 40
  misc_feature: MA Experiment 20001905 PARAMETER Experiment Name: At_Drought_Reproduction_P Parameter: Organism Value: A. thaliana
  misc_feature: MA Experiment 20001905 PARAMETER Experiment Name: At_Drought_Reproduction_P Parameter: Plant Line Value: WS
  misc_feature: MA Experiment 20001905 PARAMETER Experiment Name: At_Drought_Reproduction_P Parameter: Timepoint (day) Value: 10
  misc_feature: MA Experiment 20001905 PARAMETER Experiment Name: At_Drought_Reproduction_P Parameter: Tissue Value: Rosettes
  misc_feature: MA Experiment 20001905 PARAMETER Experiment Name: At_Drought_Reproduction_P Parameter: Treatment Value: Drought vs. No Drought
  misc_feature: MA Experiment ID: 20001906 Result: Down-regulated in Transcription
  misc_feature: MA Experiment 20001906 PARAMETER Experiment Name: At_Drought_Reproduction_P Parameter: Age (day) Value: 35
  misc_feature: MA Experiment 20001906 PARAMETER Experiment Name: At_Drought_Reproduction_P Parameter: Organism Value: A. thaliana
  misc_feature: MA Experiment 20001906 PARAMETER Experiment Name: At_Drought_Reproduction_P Parameter: Plant Line Value: WS
  misc_feature: MA Experiment 20001906 PARAMETER Experiment Name: At_Drought_Reproduction_P Parameter: Timepoint (day) Value: 5
  misc_feature: MA Experiment 20001906 PARAMETER Experiment Name: At_Drought_Reproduction_P Parameter: Tissue Value: Siliques
  misc_feature: MA Experiment 20001906 PARAMETER Experiment Name: At_Drought_Reproduction_P Parameter: Treatment Value: Drought vs. No Drought
  misc_feature: MA Experiment ID: 20001908 Result: Down-regulated in Transcription
  misc_feature: MA Experiment 20001908 PARAMETER Experiment Name: At_Drought_Reproduction_P Parameter: Age (day) Value: 40
  misc_feature: MA Experiment 20001908 PARAMETER Experiment Name: At_Drought_Reproduction_P Parameter: Organism Value: A. thaliana
  misc_feature: MA Experiment 20001908 PARAMETER Experiment Name: At_Drought_Reproduction_P Parameter: Plant Line Value: WS
  misc_feature: MA Experiment 20001908 PARAMETER Experiment Name: At_Drought_Reproduction_P Parameter: Timepoint (day) Value: 10
  misc_feature: MA Experiment 20001908 PARAMETER Experiment Name: At_Drought_Reproduction_P Parameter: Tissue Value: Siliques
  misc_feature: MA Experiment 20001908 PARAMETER Experiment Name: At_Drought_Reproduction_P Parameter: Treatment Value: Drought vs. No Drought
acacgaatcttgtttagtaaaaagcgcagctgcaaaaaaaatcgagtagagaagaagtaggcagacaaagaagaagaagaagaagttctcggcgtgcttcaatggcgatatcagtagcagcttcgtcctctatggccgtgatggttccacgtgttcccgccgtatccacccgttgctccgccgtcccttatcttcctcctcgctcctttggccgatcctctttcaccgttccgttgaagcttgtttcagggaatggattgcaaaaagttgaattgttgaagacaagagcttcttcagaagagacctcgtccattgataccaacgaactcatcacagatttgaaggaaaagtgggatggtcttgagaacaaatctactgtacttatatatggaggaggagccattgttgctgtttggttatcttccattgttgttggtgccatcaactctgttcctctggtaacaacactctctatataattcttttgagattagaaaatgtgtaatgagtttgagttaaagtgatgtttccatttcttgtgtttgtagcttccgaaagttatggaacttgtcggtctcgggtacactggatggtttgtctacagataccttctcttcaagtcaagccagaaaggaattggctggaggatattgaatccttaaagaaaaagatcgcaggaagcgaatagattcattttcaaataaaaccagctttctctctgtatgttttcctgtaatatcgtgttatattatacaatgtctctgtttcaacattgtatctgttgcatctgaaactattatcttggatcc

SEQ ID NO: 39021 - protein, 125 aa, Arabidopsis thaliana
  peptide (1)..(125): Ceres Seq. ID no. 12559195
  misc_feature (6)..(123): Homolog of NCBI NO: 37536446 NR Description: hypothetical protein [Oryza sativa (japonica
  misc_feature (62)..(123): Homolog of NCBI NO: 18420175 NR Description: expressed protein
  misc_feature (20)..(120): Homolog of NCBI NO: 34393236 NR Description: unknown protein [Oryza sativa (japonica
  misc_feature (4)..(120): Homolog of NCBI NO: 21555057 NR Description: unknown [Arabidopsis thaliana]
  misc_feature (62)..(123): Homolog of NCBI NO: 7485852 NR Description: hypothetical protein F20D10.220 - Arabidopsis
  misc_feature (4)..(120): Homolog of NCBI NO: 18407178 NR Description: expressed protein
  misc_feature (11)..(123): Homolog of NCBI NO: 38175474 NR Description: unknown protein [Oryza sativa (japonica
  misc_feature (1)..(120): Homolog of NCBI NO: 687677 NR Description: unknown
  misc_feature (1)..(120): Homolog of NCBI NO: 18411555 NR Description: expressed protein
MAISVAASSSMAVMVPRVPAVSTRCSAVPYLPPRSFGRSSFTVPLKLVSGNGLQKVELLKTRASSEETSSIDTNELITDLKEKWDGLENKSTVLIYGGGAIVAVWLSSIVVGAINSVPLVTTLSI

SEQ ID NO: 39022 - protein, 115 aa, Arabidopsis thaliana
  peptide (1)..(115): Ceres Seq. ID no. 12559196
  misc_feature (1)..(113): Homolog of NCBI NO: 37536446 NR Description: hypothetical protein [Oryza sativa (japonica
  misc_feature (52)..(113): Homolog of NCBI NO: 18420175 NR Description: expressed protein
  misc_feature (10)..(110): Homolog of NCBI NO: 34393236 NR Description: unknown protein [Oryza sativa (japonica
  misc_feature (1)..(110): Homolog of NCBI NO: 21555057 NR Description: unknown [Arabidopsis thaliana]
  misc_feature (52)..(113): Homolog of NCBI NO: 7485852 NR Description: hypothetical protein F20D10.220 - Arabidopsis
  misc_feature (1)..(110): Homolog of NCBI NO: 18407178 NR Description: expressed protein
  misc_feature (1)..(113): Homolog of NCBI NO: 38175474 NR Description: unknown protein [Oryza sativa (japonica
  misc_feature (1)..(110): Homolog of NCBI NO: 687677 NR Description: unknown
  misc_feature (1)..(110): Homolog of NCBI NO: 18411555 NR Description: expressed protein
MAVMVPRVPAVSTRCSAVPYLPPRSFGRSSFTVPLKLVSGNGLQKVELLKTRASSEETSSIDTNELITDLKEKWDGLENKSTVLIYGGGAIVAVWLSSIVVGAINSVPLVTTLSI

SEQ ID NO: 39023 - protein, 112 aa, Arabidopsis thaliana
  peptide (1)..(112): Ceres Seq. ID no. 12559197
  misc_feature (1)..(110): Homolog of NCBI NO: 37536446 NR Description: hypothetical protein [Oryza sativa (japonica
  misc_feature (49)..(110): Homolog of NCBI NO: 18420175 NR Description: expressed protein
  misc_feature (7)..(107): Homolog of NCBI NO: 34393236 NR Description: unknown protein [Oryza sativa (japonica
  misc_feature (1)..(107): Homolog of NCBI NO: 21555057 NR Description: unknown [Arabidopsis thaliana]
  misc_feature (49)..(110): Homolog of NCBI NO: 7485852 NR Description: hypothetical protein F20D10.220 - Arabidopsis
  misc_feature (1)..(107): Homolog of NCBI NO: 18407178 NR Description: expressed protein
  misc_feature (1)..(110): Homolog of NCBI NO: 38175474 NR Description: unknown protein [Oryza sativa (japonica
  misc_feature (1)..(107): Homolog of NCBI NO: 687677 NR Description: unknown
  misc_feature (1)..(107): Homolog of NCBI NO: 18411555 NR Description: expressed protein
MVPRVPAVSTRCSAVPYLPPRSFGRSSFTVPLKLVSGNGLQKVELLKTRASSEETSSIDTNELITDLKEKWDGLENKSTVLIYGGGAIVAVWLSSIVVGAINSVPLVTTLSI

SEQ ID NO: 39024 - DNA, 2566 bp, Arabidopsis thaliana
  misc_feature (1)..(2566): Ceres Seq. ID no. 13497704
  misc_feature: MA Experiment ID: 108434 Result: Down-regulated in Transcription
  misc_feature: MA Experiment 108434 PARAMETER Experiment Name: At_Root_Tips_cDNA_P Parameter: Tissue Value: Root Tips
  misc_feature: MA Experiment ID: 108461 Result: Up-regulated in Transcription
  misc_feature: MA Experiment 108461 PARAMETER Experiment Name: At_Germinating_Seeds_cDNA_P Parameter: Age (day) Value: 1 vs. 0
  misc_feature: MA Experiment 108461 PARAMETER Experiment Name: At_Germinating_Seeds_cDNA_P Parameter: Tissue Value: Germinating Seeds
  misc_feature: MA Experiment ID: 108462 Result: Up-regulated in Transcription
  misc_feature: MA Experiment 108462 PARAMETER Experiment Name: At_Germinating_Seeds_cDNA_P Parameter: Age (day) Value: 2 vs. 0
  misc_feature: MA Experiment 108462 PARAMETER Experiment Name: At_Germinating_Seeds_cDNA_P Parameter: Tissue Value: Germinating Seeds
  misc_feature: MA Experiment ID: 108463 Result: Up-regulated in Transcription
  misc_feature: MA Experiment 108463 PARAMETER Experiment Name: At_Germinating_Seeds_cDNA_P Parameter: Age (day) Value: 3 vs. 0
  misc_feature: MA Experiment 108463 PARAMETER Experiment Name: At_Germinating_Seeds_cDNA_P Parameter: Tissue Value: Germinating Seeds
  misc_feature: MA Experiment ID: 108464 Result: Up-regulated in Transcription
  misc_feature: MA Experiment 108464 PARAMETER Experiment Name: At_Germinating_Seeds_cDNA_P Parameter: Age (day) Value: 4 vs. 0
  misc_feature: MA Experiment 108464 PARAMETER Experiment Name: At_Germinating_Seeds_cDNA_P Parameter: Tissue Value: Germinating Seeds
  misc_feature: MA Experiment ID: 108469 Result: Up-regulated in Transcription
  misc_feature: MA Experiment ID: 108488 Result: Down-regulated in Transcription
  misc_feature: MA Experiment ID: 108501 Result: Down-regulated in Transcription
  misc_feature: MA Experiment 108501 PARAMETER Experiment Name: At_ap2_floral_buds_cDNA_P Parameter: Plant Line Value: ap2 (Ler.)
  misc_feature: MA Experiment 108501 PARAMETER Experiment Name: At_ap2_floral_buds_cDNA_P Parameter: Tissue Value: Closed Flower
  misc_feature: MA Experiment ID: 108572 Result: Up-regulated in Transcription
  misc_feature: MA Experiment 108572 PARAMETER Experiment Name: At_Drought_cDNA_P Parameter: Timepoint (hr) Value: 1
  misc_feature: MA Experiment 108572 PARAMETER Experiment Name: At_Drought_cDNA_P Parameter: Tissue Value: Aerial
  misc_feature: MA Experiment 108572 PARAMETER Experiment Name: At_Drought_cDNA_P Parameter: Treatment Value: Drought vs. No Drought
  misc_feature: MA Experiment ID: 108573 Result: Up-regulated in Transcription
  misc_feature: MA Experiment 108573 PARAMETER Experiment Name: At_Drought_cDNA_P Parameter: Timepoint (hr) Value: 6
  misc_feature: MA Experiment 108573 PARAMETER Experiment Name: At_Drought_cDNA_P Parameter: Tissue Value: Aerial
  misc_feature: MA Experiment 108573 PARAMETER Experiment Name: At_Drought_cDNA_P Parameter: Treatment Value: Drought vs. No Drought
  misc_feature: MA Experiment ID: 108574 Result: Down-regulated in Transcription
  misc_feature: MA Experiment 108574 PARAMETER Experiment Name: At_Wounding__cDNA_P Parameter: Timepoint (hr) Value: 1
  misc_feature: MA Experiment 108574 PARAMETER Experiment Name: At_Wounding__cDNA_P Parameter: Tissue Value: Aerial
  misc_feature: MA Experiment 108574 PARAMETER Experiment Name: At_Wounding__cDNA_P Parameter: Treatment Value: Wounding vs. No Wounding
  misc_feature: MA Experiment ID: 108579 Result: Down-regulated in Transcription
  misc_feature: MA Experiment 108579 PARAMETER Experiment Name: At_4deg_Cold_cDNA_P Parameter: Temperature (deg C) Value: 4 vs. 22
  misc_feature: MA Experiment 108579 PARAMETER Experiment Name: At_4deg_Cold_cDNA_P Parameter: Timepoint (hr) Value: 6
  misc_feature: MA Experiment 108579 PARAMETER Experiment Name: At_4deg_Cold_cDNA_P Parameter: Tissue Value: Aerial
  misc_feature: MA Experiment ID: 108605 Result: Up-regulated in Transcription
  misc_feature: MA Experiment 108605 PARAMETER Experiment Name: At_100uM_ABA_cDNA_P Parameter: Timepoint (hr) Value: 6
  misc_feature: MA Experiment 108605 PARAMETER Experiment Name: At_100uM_ABA_cDNA_P Parameter: Tissue Value: Aerial
  misc_feature: MA Experiment 108605 PARAMETER Experiment Name: At_100uM_ABA_cDNA_P Parameter: Treatment Value: 100uM ABA vs. No Treatment
  misc_feature: MA Experiment ID: 108607 Result: Up-regulated in Transcription
  misc_feature: MA Experiment 108607 PARAMETER Experiment Name: At_100uM_ABA_cDNA_P Parameter: Timepoint (hr) Value: 4
  misc_feature: MA Experiment 108607 PARAMETER Experiment Name: At_100uM_ABA_cDNA_P Parameter: Tissue Value: Aerial
  misc_feature: MA Experiment 108607 PARAMETER Experiment Name: At_100uM_ABA_cDNA_P Parameter: Treatment Value: 100uM ABA vs. No Treatment
  misc_feature: MA Experiment ID: 108668 Result: Up-regulated in Transcription
  misc_feature: MA Experiment 108668 PARAMETER Experiment Name: At_2mM_SA_cDNA_P Parameter: Plant Line Value: WS
  misc_feature: MA Experiment 108668 PARAMETER Experiment Name: At_2mM_SA_cDNA_P Parameter: Timepoint (hr) Value: 6
  misc_feature: MA Experiment 108668 PARAMETER Experiment Name: At_2mM_SA_cDNA_P Parameter: Treatment Value: 2mM SA vs. No Treatment
  misc_feature: MA Experiment ID: 20000087 Result: Up-regulated in Transcription
  misc_feature: MA Experiment 20000087 PARAMETER Experiment Name: At_100uM_ABA_Mutants_cDNA_P Parameter: Plant Line Value: WS
  misc_feature: MA Experiment 20000087 PARAMETER Experiment Name: At_100uM_ABA_Mutants_cDNA_P Parameter: Timepoint (hr) Value: 6
  misc_feature: MA Experiment 20000087 PARAMETER Experiment Name: At_100uM_ABA_Mutants_cDNA_P Parameter: Tissue Value: Aerial
  misc_feature: MA Experiment 20000087 PARAMETER Experiment Name: At_100uM_ABA_Mutants_cDNA_P Parameter: Treatment Value: 100uM ABA vs. No Treatment
  misc_feature: MA Experiment ID: 20000166 Result: Down-regulated in Transcription
  misc_feature: MA Experiment 20000166 PARAMETER Experiment Name: At_100uM_ABA_P Parameter: Age (day) Value: 14
  misc_feature: MA Experiment 20000166 PARAMETER Experiment Name: At_100uM_ABA_P Parameter: Organism Value: A. thaliana
  misc_feature: MA Experiment 20000166 PARAMETER Experiment Name: At_100uM_ABA_P Parameter: Plant Line Value: WS
  misc_feature: MA Experiment 20000166 PARAMETER Experiment Name: At_100uM_ABA_P Parameter: Timepoint (hr) Value: 1
  misc_feature: MA Experiment 20000166 PARAMETER Experiment Name: At_100uM_ABA_P Parameter: Tissue Value: Aerial
  misc_feature: MA Experiment 20000166 PARAMETER Experiment Name: At_100uM_ABA_P Parameter: Treatment Value: 100uM ABA vs. No Treatment
  misc_feature: MA Experiment ID: 20000169 Result: Up-regulated in Transcription
  misc_feature: MA Experiment 20000169 PARAMETER Experiment Name: At_100uM_ABA_P Parameter: Age (day) Value: 14
  misc_feature: MA Experiment 20000169 PARAMETER Experiment Name: At_100uM_ABA_P Parameter: Organism Value: A. thaliana
  misc_feature: MA Experiment 20000169 PARAMETER Experiment Name: At_100uM_ABA_P Parameter: Plant Line Value: WS
  misc_feature: MA Experiment 20000169 PARAMETER Experiment Name: At_100uM_ABA_P Parameter: Timepoint (hr) Value: 6
  misc_feature: MA Experiment 20000169 PARAMETER Experiment Name: At_100uM_ABA_P Parameter: Tissue Value: Aerial
  misc_feature: MA Experiment 20000169 PARAMETER Experiment Name: At_100uM_ABA_P Parameter: Treatment Value: 100uM ABA vs. No Treatment
  misc_feature: MA Experiment ID: 20000171 Result: Down-regulated in Transcription
  misc_feature: MA Experiment 20000171 PARAMETER Experiment Name: At_42deg_Heat_P Parameter: Age (day) Value: 14
  misc_feature: MA Experiment 20000171 PARAMETER Experiment Name: At_42deg_Heat_P Parameter: Organism Value: A. thaliana
  misc_feature: MA Experiment 20000171 PARAMETER Experiment Name: At_42deg_Heat_P Parameter: Plant Line Value: WS
  misc_feature: MA Experiment 20000171 PARAMETER Experiment Name: At_42deg_Heat_P Parameter: Temperature (deg C) Value: 42 vs. 22
  misc_feature: MA Experiment 20000171 PARAMETER Experiment Name: At_42deg_Heat_P Parameter: Timepoint (hr) Value: 1
  misc_feature: MA Experiment 20000171 PARAMETER Experiment Name: At_42deg_Heat_P Parameter: Tissue Value: Aerial
  misc_feature: MA Experiment ID: 20000173 Result: Down-regulated in Transcription
  misc_feature: MA Experiment 20000173 PARAMETER Experiment Name: At_42deg_Heat_P Parameter: Age (day) Value: 14
  misc_feature: MA Experiment 20000173 PARAMETER Experiment Name: At_42deg_Heat_P Parameter: Organism Value: A. thaliana
  misc_feature: MA Experiment 20000173 PARAMETER Experiment Name: At_42deg_Heat_P Parameter: Plant Line Value: WS
  misc_feature: MA Experiment 20000173 PARAMETER Experiment Name: At_42deg_Heat_P Parameter: Temperature (deg C) Value: 42 vs. 22
  misc_feature: MA Experiment 20000173 PARAMETER Experiment Name: At_42deg_Heat_P Parameter: Timepoint (hr) Value: 6
  misc_feature: MA Experiment 20000173 PARAMETER Experiment Name: At_42deg_Heat_P Parameter: Tissue Value: Aerial
  misc_feature: MA Experiment ID: 20000180 Result: Up-regulated in Transcription
  misc_feature: MA Experiment 20000180 PARAMETER Experiment Name: At_Germinating_Seeds_P Parameter: Age (hr) Value: 24 vs. 0
  misc_feature: MA Experiment 20000180 PARAMETER Experiment Name: At_Germinating_Seeds_P Parameter: Tissue Value: Germinating Seeds
  misc_feature: MA Experiment ID: 20000182 Result: Up-regulated in Transcription
  misc_feature: MA Experiment 20000182 PARAMETER Experiment Name: At_2mM_SA_P Parameter: Age (day) Value: 14
  misc_feature: MA Experiment 20000182 PARAMETER Experiment Name: At_2mM_SA_P Parameter: Organism Value: A. thaliana
  misc_feature: MA Experiment 20000182 PARAMETER Experiment Name: At_2mM_SA_P Parameter: Plant Line Value: WS
  misc_feature: MA Experiment 20000182 PARAMETER Experiment Name: At_2mM_SA_P Parameter: Timepoint (hr) Value: 6
  misc_feature: MA Experiment 20000182 PARAMETER Experiment Name: At_2mM_SA_P Parameter: Tissue Value: Aerial
  misc_feature: MA Experiment 20000182 PARAMETER Experiment Name: At_2mM_SA_P Parameter: Treatment Value: 2mM SA vs. No Treatment
  misc_feature: MA Experiment ID: 20000213 Result: Down-regulated in Transcription
  misc_feature: MA Experiment 20000213 PARAMETER Experiment Name: At_4deg_Cold_P Parameter: Timepoint (hr) Value: 2
  misc_feature: MA Experiment ID: 20000234 Result: Down-regulated in Transcription
  misc_feature: MA Experiment 20000234 PARAMETER Experiment Name: At_Siliques_P Parameter: Age (day) Value: 21
  misc_feature: MA Experiment 20000234 PARAMETER Experiment Name: At_Siliques_P Parameter: Organism Value: A. thaliana
  misc_feature: MA Experiment 20000234 PARAMETER Experiment Name: At_Siliques_P Parameter: Plant Line Value: WS
  misc_feature: MA Experiment 20000234 PARAMETER Experiment Name: At_Siliques_P Parameter: Tissue Value: Less Than 5mm Siliques vs. Whole Plant
  misc_feature: MA Experiment ID: 20000265 Result: Down-regulated in Transcription
  misc_feature: MA Experiment 20000265 PARAMETER Experiment Name: At_Open_Flower_P Parameter: Age (day) Value: 21
  misc_feature: MA Experiment 20000265 PARAMETER Experiment Name: At_Open_Flower_P Parameter: Plant Line Value: WS
  misc_feature: MA Experiment 20000265 PARAMETER Experiment Name: At_Open_Flower_P Parameter: Tissue Value: Closed Flower vs. Whole Plant
  misc_feature: MA Experiment ID: 20000267 Result: Down-regulated in Transcription
  misc_feature: MA Experiment 20000267 PARAMETER Experiment Name: At_Drought_P Parameter: Age (day) Value: 7
  misc_feature: MA Experiment 20000267 PARAMETER Experiment Name: At_Drought_P Parameter: Organism Value: A. thaliana
  misc_feature: MA Experiment 20000267 PARAMETER Experiment Name: At_Drought_P Parameter: Plant Line Value: WS
  misc_feature: MA Experiment 20000267 PARAMETER Experiment Name: At_Drought_P Parameter: Timepoint (hr) Value: 6
  misc_feature: MA Experiment 20000267 PARAMETER Experiment Name: At_Drought_P Parameter: Tissue Value: Whole Plant
  misc_feature: MA Experiment 20000267 PARAMETER Experiment Name: At_Drought_P Parameter: Treatment Value: Drought vs. No Drought
  misc_feature: MA Experiment ID: 20000269 Result: Down-regulated in Transcription
  misc_feature: MA Experiment 20000269 PARAMETER Experiment Name: At_1mM_KNO3_L-vs-H_Roots_P Parameter: Age (day) Value: 7,10,12
  misc_feature: MA Experiment 20000269 PARAMETER Experiment Name: At_1mM_KNO3_L-vs-H_Roots_P Parameter: Organism Value: A. thaliana
  misc_feature: MA Experiment 20000269 PARAMETER Experiment Name: At_1mM_KNO3_L-vs-H_Roots_P Parameter: Plant Line Value: WS
  misc_feature: MA Experiment 20000269 PARAMETER Experiment Name: At_1mM_KNO3_L-vs-H_Roots_P Parameter: Timepoint (day) Value: 7,10,12
  misc_feature: MA Experiment 20000269 PARAMETER Experiment Name: At_1mM_KNO3_L-vs-H_Roots_P Parameter: Tissue Value: Roots
  misc_feature: MA Experiment 20000269 PARAMETER Experiment Name: At_1mM_KNO3_L-vs-H_Roots_P Parameter: Treatment Value: 1mM KNO3 vs. 50mM KNO3
  misc_feature: MA Experiment ID: 20000308 Result: Down-regulated in Transcription
  misc_feature: MA Experiment 20000308 PARAMETER Experiment Name: At_100mM_NaCl__P Parameter: Age (day) Value: 17
  misc_feature: MA Experiment 20000308 PARAMETER Experiment Name: At_100mM_NaCl__P Parameter: Organism Value: A. thaliana
  misc_feature: MA Experiment 20000308 PARAMETER Experiment Name: At_100mM_NaCl__P Parameter: Plant Line Value: WS
  misc_feature: MA Experiment 20000308 PARAMETER Experiment Name: At_100mM_NaCl__P Parameter: Timepoint (hr) Value: 72
  misc_feature: MA Experiment 20000308 PARAMETER Experiment Name: At_100mM_NaCl__P Parameter: Tissue Value: Whole Plant
  misc_feature: MA Experiment 20000308 PARAMETER Experiment Name: At_100mM_NaCl__P Parameter: Treatment Value: 100mM NaCl vs. No Treatment
  misc_feature: MA Experiment ID: 20000436 Result: Down-regulated in Transcription
  misc_feature: MA Experiment 20000436 PARAMETER Experiment Name: At_Drought_P Parameter: Age (day) Value: 7
  misc_feature: MA Experiment 20000436 PARAMETER Experiment Name: At_Drought_P Parameter: Organism Value: A. thaliana
  misc_feature: MA Experiment 20000436 PARAMETER Experiment Name: At_Drought_P Parameter: Plant Line Value: WS
  misc_feature: MA Experiment 20000436 PARAMETER Experiment Name: At_Drought_P Parameter: Timepoint (hr) Value: 12
  misc_feature: MA Experiment 20000436 PARAMETER Experiment Name: At_Drought_P Parameter: Tissue Value: Whole Plant
  misc_feature: MA Experiment 20000436 PARAMETER Experiment Name: At_Drought_P Parameter: Treatment Value: Drought vs. No Drought
  misc_feature: MA Experiment ID: 20000438 Result: Down-regulated in Transcription
  misc_feature: MA Experiment 20000438 PARAMETER Experiment Name: At_Shoots__P Parameter: Age (day) Value: 14
  misc_feature: MA Experiment 20000438 PARAMETER Experiment Name: At_Shoots__P Parameter: Tissue Value: Shoots vs. Whole Plant
  misc_feature: MA Experiment ID: 20000441 Result: Up-regulated in Transcription
  misc_feature: MA Experiment 20000441 PARAMETER Experiment Name: At_1uM_BR-BRZ__P Parameter: Tissue Value: Shoot Apices
  misc_feature: MA Experiment 20000441 PARAMETER Experiment Name: At_1uM_BR-BRZ__P Parameter: Treatment Value: 1uM BR vs. No Treatment
  misc_feature: MA Experiment ID: 20000443 Result: Up-regulated in Transcription
  misc_feature: MA Experiment 20000443 PARAMETER Experiment Name: At_1uM_BR-BRZ__P Parameter: Tissue Value: Shoot Apices
  misc_feature: MA Experiment 20000443 PARAMETER Experiment Name: At_1uM_BR-BRZ__P Parameter: Treatment Value: 1uM BRZ vs. No Treatment
  misc_feature: MA Experiment ID: 20000451 Result: Down-regulated in Transcription
  misc_feature: MA Experiment 20000451 PARAMETER Experiment Name: At_CS6879_Shoots-Roots_P Parameter: Age (day) Value: 14
  misc_feature: MA Experiment 20000451 PARAMETER Experiment Name: At_CS6879_Shoots-Roots_P Parameter: Organism Value: A. thaliana
  misc_feature: MA Experiment 20000451 PARAMETER Experiment Name: At_CS6879_Shoots-Roots_P Parameter: Plant Line Value: CS6879 vs. WS
  misc_feature: MA Experiment 20000451 PARAMETER Experiment Name: At_CS6879_Shoots-Roots_P Parameter: Tissue Value: Roots
  misc_feature: MA Experiment ID: 20000452 Result: Down-regulated in Transcription
  misc_feature: MA Experiment 20000452 PARAMETER Experiment Name: At_CS6879_Shoots-Roots_P Parameter: Age (day) Value: 14
  misc_feature: MA Experiment 20000452 PARAMETER Experiment Name: At_CS6879_Shoots-Roots_P Parameter: Organism Value: A. thaliana
  misc_feature: MA Experiment 20000452 PARAMETER Experiment Name: At_CS6879_Shoots-Roots_P Parameter: Plant Line Value: CS6879 vs. WS
  misc_feature: MA Experiment 20000452 PARAMETER Experiment Name: At_CS6879_Shoots-Roots_P Parameter: Tissue Value: Shoots
  misc_feature: MA Experiment ID: 20000495 Result: Down-regulated in Transcription
  misc_feature: MA Experiment 20000495 PARAMETER Experiment Name: At_Guard_Cells_P Parameter: Harvest Date Value: 8/2/2002
  misc_feature: MA Experiment 20000495 PARAMETER Experiment Name: At_Guard_Cells_P Parameter: Organism Value: A. thaliana
  misc_feature: MA Experiment 20000495 PARAMETER Experiment Name: At_Guard_Cells_P Parameter: Tissue Value: Guard Cells vs. Leaves
  misc_feature: MA Experiment ID: 20000574 Result: Up-regulated in Transcription
  misc_feature: MA Experiment 20000574 PARAMETER Experiment Name: At_100uM_ABA_Mutants__P Parameter: Organism Value: A. thaliana
  misc_feature: MA Experiment 20000574 PARAMETER Experiment Name: At_100uM_ABA_Mutants__P Parameter: Plant Line Value: CS23 vs. Ler wt
  misc_feature: MA Experiment 20000574 PARAMETER Experiment Name: At_100uM_ABA_Mutants__P Parameter: Timepoint (hr) Value: N/A
  misc_feature: MA Experiment 20000574 PARAMETER Experiment Name: At_100uM_ABA_Mutants__P Parameter: Tissue Value: Whole Plant
  misc_feature: MA Experiment 20000574 PARAMETER Experiment Name: At_100uM_ABA_Mutants__P Parameter: Treatment Value: None
  misc_feature: MA Experiment ID: 20000606 Result: Up-regulated in Transcription
  misc_feature: MA Experiment 20000606 PARAMETER Experiment Name: At_CS8548_Mutant_P Parameter: Age (day) Value: 14
  misc_feature: MA Experiment 20000606 PARAMETER Experiment Name: At_CS8548_Mutant_P Parameter: Plant Line Value: CS8548 vs. wt
  misc_feature: MA Experiment 20000606 PARAMETER Experiment Name: At_CS8548_Mutant_P Parameter: Tissue Value: Whole Plant
  misc_feature: MA Experiment ID: 20000794 Result: Up-regulated in Transcription
  misc_feature: MA Experiment 20000794 PARAMETER Experiment Name: At_Petals_P Parameter: Age (day) Value: 23-25 days
  misc_feature: MA Experiment 20000794 PARAMETER Experiment Name: At_Petals_P Parameter: Plant Line Value: WS
  misc_feature: MA Experiment 20000794 PARAMETER Experiment Name: At_Petals_P Parameter: Tissue Value: Petals vs. Whole plant
  misc_feature: MA Experiment ID: 20001247 Result: Up-regulated in Transcription
  misc_feature: MA Experiment 20001247 PARAMETER Experiment Name: At_Far-red-induction_P Parameter: Age (day) Value: 7
  misc_feature: MA Experiment 20001247 PARAMETER Experiment Name: At_Far-red-induction_P Parameter: Light Value: Far-red vs. White
  misc_feature: MA Experiment 20001247 PARAMETER Experiment Name: At_Far-red-induction_P Parameter: Organism Value: A. thaliana
  misc_feature: MA Experiment 20001247 PARAMETER Experiment Name: At_Far-red-induction_P Parameter: Plant Line Value: Columbia
  misc_feature: MA Experiment 20001247 PARAMETER Experiment Name: At_Far-red-induction_P Parameter: Timepoint (hr) Value: 1
  misc_feature: MA Experiment 20001247 PARAMETER Experiment Name: At_Far-red-induction_P Parameter: Tissue Value: Whole Plant
  misc_feature: MA Experiment ID: 20001248 Result: Up-regulated in Transcription
  misc_feature: MA Experiment 20001248 PARAMETER Experiment Name: At_Far-red-induction_P Parameter: Age (day) Value: 7
  misc_feature: MA Experiment 20001248 PARAMETER Experiment Name: At_Far-red-induction_P Parameter: Light Value: Far-red vs. White
  misc_feature: MA Experiment 20001248 PARAMETER Experiment Name: At_Far-red-induction_P Parameter: Organism Value: A. thaliana
  misc_feature: MA Experiment 20001248 PARAMETER Experiment Name: At_Far-red-induction_P Parameter: Plant Line Value: Columbia
  misc_feature: MA Experiment 20001248 PARAMETER Experiment Name: At_Far-red-induction_P Parameter: Timepoint (hr) Value: 4
  misc_feature: MA Experiment 20001248 PARAMETER Experiment Name: At_Far-red-induction_P Parameter: Tissue Value: Whole Plant
  misc_feature: MA Experiment ID: 20001450 Result: Up-regulated in Transcription
  misc_feature: MA Experiment 20001450 PARAMETER Experiment Name: At_Far-red-induction_P Parameter: Age (day) Value: 7
  misc_feature: MA Experiment 20001450 PARAMETER Experiment Name: At_Far-red-induction_P Parameter: Light Value: Far-red vs. White
  misc_feature: MA Experiment 20001450 PARAMETER Experiment Name: At_Far-red-induction_P Parameter: Organism Value: A. thaliana
  misc_feature: MA Experiment 20001450 PARAMETER Experiment Name: At_Far-red-induction_P Parameter: Plant Line Value: Columbia
  misc_feature: MA Experiment 20001450 PARAMETER Experiment Name: At_Far-red-induction_P Parameter: Timepoint (hr) Value: 8
  misc_feature: MA Experiment 20001450 PARAMETER Experiment Name: At_Far-red-induction_P Parameter: Tissue Value: Whole Plant
  misc_feature: MA Experiment ID: 20001451 Result: Up-regulated in Transcription
  misc_feature: MA Experiment 20001451 PARAMETER Experiment Name: At_Far-red-induction_P Parameter: Age (day) Value: 7
  misc_feature: MA Experiment 20001451 PARAMETER Experiment Name: At_Far-red-induction_P Parameter: Light Value: Far-red vs. White
  misc_feature: MA Experiment 20001451 PARAMETER Experiment Name: At_Far-red-induction_P Parameter: Organism Value: A. thaliana
  misc_feature: MA Experiment 20001451 PARAMETER Experiment Name: At_Far-red-induction_P Parameter: Plant Line Value: Columbia
  misc_feature: MA Experiment 20001451 PARAMETER Experiment Name: At_Far-red-induction_P Parameter: Timepoint (hr) Value: 24
  misc_feature: MA Experiment 20001451 PARAMETER Experiment Name: At_Far-red-induction_P Parameter: Tissue Value: Whole Plant
  misc_feature: MA Experiment ID: 20001555 Result: Down-regulated in Transcription
  misc_feature: MA Experiment 20001555 PARAMETER Experiment Name: At_Drought_Soil_Dry_P Parameter: Age (day) Value: 24
  misc_feature: MA Experiment 20001555 PARAMETER Experiment Name: At_Drought_Soil_Dry_P Parameter: Organism Value: A. thaliana
  misc_feature: MA Experiment 20001555 PARAMETER Experiment Name: At_Drought_Soil_Dry_P Parameter: Plant Line Value: WS
  misc_feature: MA Experiment 20001555 PARAMETER Experiment Name: At_Drought_Soil_Dry_P Parameter: Post Timepoint (hr) Value: None
  misc_feature: MA Experiment 20001555 PARAMETER Experiment Name: At_Drought_Soil_Dry_P Parameter: Post-Treatment Value: None
  misc_feature: MA Experiment 20001555 PARAMETER Experiment Name: At_Drought_Soil_Dry_P Parameter: Timepoint (day) Value: 10
  misc_feature: MA Experiment 20001555 PARAMETER Experiment Name: At_Drought_Soil_Dry_P Parameter: Treatment Value: Drought vs. No Drought
  misc_feature: MA Experiment ID: 20001556 Result: Down-regulated in Transcription
  misc_feature: MA Experiment 20001556 PARAMETER Experiment Name: At_Drought_Soil_Dry_P Parameter: Age (day) Value: 26
  misc_feature: MA Experiment 20001556 PARAMETER Experiment Name: At_Drought_Soil_Dry_P Parameter: Organism Value: A. thaliana
  misc_feature: MA Experiment 20001556 PARAMETER Experiment Name: At_Drought_Soil_Dry_P Parameter: Plant Line Value: WS
  misc_feature: MA Experiment 20001556 PARAMETER Experiment Name: At_Drought_Soil_Dry_P Parameter: Post Timepoint (hr) Value: None
  misc_feature: MA Experiment 20001556 PARAMETER Experiment Name: At_Drought_Soil_Dry_P Parameter: Post-Treatment Value: None
  misc_feature: MA Experiment 20001556 PARAMETER Experiment Name: At_Drought_Soil_Dry_P Parameter: Timepoint (day) Value: 12
  misc_feature: MA Experiment 20001556 PARAMETER Experiment Name: At_Drought_Soil_Dry_P Parameter: Treatment Value: Drought vs. No Drought
  misc_feature: MA Experiment ID: 20001558 Result: Down-regulated in Transcription
  misc_feature: MA Experiment 20001558 PARAMETER Experiment Name: At_Drought_Soil_Dry_P Parameter: Age (day) Value: 27
  misc_feature: MA Experiment 20001558 PARAMETER Experiment Name: At_Drought_Soil_Dry_P Parameter: Organism Value: A. thaliana
  misc_feature: MA Experiment 20001558 PARAMETER Experiment Name: At_Drought_Soil_Dry_P Parameter: Plant Line Value: WS
  misc_feature: MA Experiment 20001558 PARAMETER Experiment Name: At_Drought_Soil_Dry_P Parameter: Post Timepoint (hr) Value: 6
  misc_feature: MA Experiment 20001558 PARAMETER Experiment Name: At_Drought_Soil_Dry_P Parameter: Post-Treatment Value: Re-Water vs. No Drought
  misc_feature: MA Experiment 20001558 PARAMETER Experiment Name: At_Drought_Soil_Dry_P Parameter: Timepoint (day) Value: 13
  misc_feature: MA Experiment 20001558 PARAMETER Experiment Name: At_Drought_Soil_Dry_P Parameter: Treatment Value: Drought vs. No Drought
  misc_feature: MA Experiment ID: 20001559 Result: Down-regulated in Transcription
  misc_feature: MA Experiment 20001559 PARAMETER Experiment Name: At_Drought_Soil_Dry_P Parameter: Age (day) Value: 28
  misc_feature: MA Experiment 20001559 PARAMETER Experiment Name: At_Drought_Soil_Dry_P Parameter: Organism Value: A. thaliana
  misc_feature: MA Experiment 20001559 PARAMETER Experiment Name: At_Drought_Soil_Dry_P Parameter: Plant Line Value: WS
  misc_feature: MA Experiment 20001559 PARAMETER Experiment Name: At_Drought_Soil_Dry_P Parameter: Post Timepoint (hr) Value: 29
  misc_feature: MA Experiment 20001559 PARAMETER Experiment Name: At_Drought_Soil_Dry_P Parameter: Post-Treatment Value: Re-Water vs. No Drought
  misc_feature: MA Experiment 20001559 PARAMETER Experiment Name: At_Drought_Soil_Dry_P Parameter: Timepoint (day) Value: 14
  misc_feature: MA Experiment 20001559 PARAMETER Experiment Name: At_Drought_Soil_Dry_P Parameter: Treatment Value: Drought vs. No Drought
  misc_feature: MA Experiment ID: 20001560 Result: Down-regulated in Transcription
  misc_feature: MA Experiment 20001560 PARAMETER Experiment Name: At_Drought_Soil_Dry_P Parameter: Age (day) Value: 28
  misc_feature: MA Experiment 20001560 PARAMETER Experiment Name: At_Drought_Soil_Dry_P Parameter: Organism Value: A. thaliana
  misc_feature: MA Experiment 20001560 PARAMETER Experiment Name: At_Drought_Soil_Dry_P Parameter: Plant Line Value: WS
  misc_feature: MA Experiment 20001560 PARAMETER Experiment Name: At_Drought_Soil_Dry_P Parameter: Post Timepoint (hr) Value: None
  misc_feature: MA Experiment 20001560 PARAMETER Experiment Name: At_Drought_Soil_Dry_P Parameter: Post-Treatment Value: None
  misc_feature: MA Experiment 20001560 PARAMETER Experiment Name: At_Drought_Soil_Dry_P Parameter: Timepoint (day) Value: 14
  misc_feature: MA Experiment 20001560 PARAMETER Experiment Name: At_Drought_Soil_Dry_P Parameter: Treatment Value: Drought vs. No Drought
  misc_feature: MA Experiment ID: 20001757 Result: Up-regulated in Transcription
  misc_feature: MA Experiment 20001757 PARAMETER Experiment Name: At_50mM_NH4NO3_L-to-H_P Parameter: Timepoint (hr) Value: 6
  misc_feature: MA Experiment 20001757 PARAMETER Experiment Name: At_50mM_NH4NO3_L-to-H_P Parameter: Tissue Value: Leaf
  misc_feature: MA Experiment 20001757 PARAMETER Experiment Name: At_50mM_NH4NO3_L-to-H_P Parameter: Treatment Value: 50mM NH4NO3 vs 100mM Mannitol
  misc_feature: MA Experiment ID: 20001769 Result: Down-regulated in Transcription
  misc_feature: MA Experiment 20001769 PARAMETER Experiment Name: At_Far-red-enriched-adult_P Parameter: Age (day) Value: 28
  misc_feature: MA Experiment 20001769 PARAMETER Experiment Name: At_Far-red-enriched-adult_P Parameter: Light Value: Far-red enriched vs. White
  misc_feature: MA Experiment 20001769 PARAMETER Experiment Name: At_Far-red-enriched-adult_P Parameter: Organism Value: A. thaliana
  misc_feature: MA Experiment 20001769 PARAMETER Experiment Name: At_Far-red-enriched-adult_P Parameter: Plant Line Value: Columbia
  misc_feature: MA Experiment 20001769 PARAMETER Experiment Name: At_Far-red-enriched-adult_P Parameter: Timepoint (hr) Value: 4
  misc_feature: MA Experiment 20001769 PARAMETER Experiment Name: At_Far-red-enriched-adult_P Parameter: Tissue Value: Aerial
  misc_feature: MA Experiment ID: 20001770 Result: Down-regulated in Transcription
  misc_feature: MA Experiment 20001770 PARAMETER Experiment Name: At_Far-red-enriched-adult_P Parameter: Age (day) Value: 28
  misc_feature: MA Experiment 20001770 PARAMETER Experiment Name: At_Far-red-enriched-adult_P Parameter: Light Value: Far-red enriched vs. White
  misc_feature: MA Experiment 20001770 PARAMETER Experiment Name: At_Far-red-enriched-adult_P Parameter: Organism Value: A. thaliana
  misc_feature: MA Experiment 20001770 PARAMETER Experiment Name: At_Far-red-enriched-adult_P Parameter: Plant Line Value: Columbia
  misc_feature: MA Experiment 20001770 PARAMETER Experiment Name: At_Far-red-enriched-adult_P Parameter: Timepoint (hr) Value: 8
  misc_feature: MA Experiment 20001770 PARAMETER Experiment Name: At_Far-red-enriched-adult_P Parameter: Tissue Value: Aerial
  misc_feature: MA Experiment ID: 20001773 Result: Up-regulated in Transcription
  misc_feature: MA Experiment 20001773 PARAMETER Experiment Name: At_Far-red-enriched-adult_P Parameter: Age (day) Value: 30
  misc_feature: MA Experiment 20001773 PARAMETER Experiment Name: At_Far-red-enriched-adult_P Parameter: Light Value: Far-red enriched vs. White
  misc_feature: MA Experiment 20001773 PARAMETER Experiment Name: At_Far-red-enriched-adult_P Parameter: Organism Value: A. thaliana
  misc_feature: MA Experiment 20001773 PARAMETER Experiment Name: At_Far-red-enriched-adult_P Parameter: Plant Line Value: Columbia
  misc_feature: MA Experiment 20001773 PARAMETER Experiment Name: At_Far-red-enriched-adult_P Parameter: Timepoint (hr) Value: 48
  misc_feature: MA Experiment 20001773 PARAMETER Experiment Name: At_Far-red-enriched-adult_P Parameter: Tissue Value: Aerial
  misc_feature: MA Experiment ID: 20001905 Result: Down-regulated in Transcription
  misc_feature: MA Experiment 20001905 PARAMETER Experiment Name: At_Drought_Reproduction_P Parameter: Age (day) Value: 40
  misc_feature: MA Experiment 20001905 PARAMETER Experiment Name: At_Drought_Reproduction_P Parameter: Organism Value: A. thaliana
  misc_feature: MA Experiment 20001905 PARAMETER Experiment Name: At_Drought_Reproduction_P Parameter: Plant Line Value: WS
  misc_feature: MA Experiment 20001905 PARAMETER Experiment Name: At_Drought_Reproduction_P Parameter: Timepoint (day) Value: 10
  misc_feature: MA Experiment 20001905 PARAMETER Experiment Name: At_Drought_Reproduction_P Parameter: Tissue Value: Rosettes
  misc_feature: MA Experiment 20001905 PARAMETER Experiment Name: At_Drought_Reproduction_P Parameter: Treatment Value: Drought vs. No Drought
atatatatatatatataactccaaaacaatcatttaatccaaacccaacatatccttttaacagaatcttctttatctgaaaatatctaaagaaaatggtattgaactttagagataagtcctgcatttttctggcaattctttgttgtttatcattgagttgtatagtaaaagcatcagtctcttatgatcgtaaagctgtgatcatcaatggacaaagaagaatccttctctccggttccattcactatccacgaagcacccctgagatgtggcctggcctaatacagaaagccaaagaaggaggcttggatgttattgagacttatgttttttggaatggccatgaaccttctcctggacaatattattttggagacaggtatgatttggttaagttcatcaagttggtgcaccaagctggtctctatgttaatctcagaattggcccttatgtttgtgctgaatggaattttgggggatttccggtttggctcaaatttgttcccggtatggcttttaggacggataatgaacctttcaaggctgcaatgaagaaattcactgaaaagattgtatggatgatgaaagcagaaaagttgtttcaaactcaaggaggacccatcattcttgcacagattgagaatgaatatggaccagtggaatgggaaataggagcaccgggaaaggcttatacaaaatgggtagctcaaatggcattaggactctcaactggtgttccatggattatgtgcaagcaagaagatgctcctggtcctatcatagacacatgcaatggttattactgtgaagatttcaaaccgaactcaatcaacaagccaaagatgtggacagagaattggactggttggtacacagattttggaggtgcggtaccatacagaccagtcgaagatattgcatactccgttgcacgatttatccaaaaaggaggttccctcatcaattactatatgtatcatggaggaacaaatttcgacagaacagccggtgagttcatggcttcaagctatgactatgacgctcctctcgatgaatacggcttaccaagagaaccaaagtatagtcacttgaaagcattgcataaagccatcaaacttagtgagccagctttgctttctgctgatgctaccgttacatcgcttggagctaagcaagaagcttatgtgttctggtctaaatcatcttgtgctgcgtttttatcgaacaaagatgagaactctgcagcgagagttctgttccgtggattcccatatgatttgcctccttggtcagtcagtattttacctgattgcaaaacagaggtttacaacactgcaaaggtcaatgcaccaagcgtacacaggaatatggttcctactggtactaaattctcttggggatcattcaacgaagcgactcctacagcgaatgaagctggtacgtttgcaagaaacgggcttgtggaacaaataagcatgacttgggacaaatctgactatttttggtatataacagacattacaatcggttccggtgagacatttttgaagactggtgattcacctcttcttacagttatgtcagctggacatgctcttcatgtgtttgtcaatggtcagctttcaggaactgcttatggaggacttgaccacccaaaactaacctttagccagaagatcaaactacatgcaggtgtcaacaagattgctcttctgagtgttgcagtgggtctcccgaacgttggtacacattttgaacagtggaataaaggagttcttggtccggtcacattgaagggagtaaactcaggaacatgggacatgtcgaaatggaaatggtcctataagattggtgtaaagggtgaggctttgagtcttcataccaacacagagagttccggtgtgagatggactcaaggatcatttgtggcgaagaagcaaccattaacctggtacaagtctacgtttgctacaccagcaggaaatgaaccattggctttagacatgaacacaatgggaaaaggtcaagtttggataaacggtagaaatattggacgtcattggcctgcatataaagctcaaggatcttgtggacgttgtaactacgctggaactttcgacgcaaagaaatgcttaagtaattgtggtgaagcttcacaaagatggtaccatgtacctcgttcatggcttaagtctcaaaaccttatagttgtgttcgaagagttaggtggtgatcctaacggaatctctttggttaaaagaacatgaaaagcttcttctgattccgagttttcaggacagaagcaagctgtttgattcgtttgtctatatctttctctggctttgctttgaagatagagacagagctggaattttttttcttttatggctttgtgcagtgattacaaaaattatacaacatgtatatgtataactgtatcctactactagtcatcatctatggctaaataaaattcacagaataaaggagtgtttctatttaccataacattttcgtttgttcaagcaaataactgtttcaatcatctcttgaagttggaacc

SEQ ID NO: 39025 - protein, 724 aa, Arabidopsis thaliana
  peptide (1)..(724): Ceres Seq. ID no. 13497705
  misc_feature (21)..(723): Homolog of NCBI NO: 20260596 NR Description: galactosidase, putative [Arabidopsis thaliana]
  misc_feature (21)..(723): Homolog of NCBI NO: 15231354 NR Description: glycosyl hydrolase family 35 (beta-galactosidase)
  misc_feature (11)..(724): Homolog of NCBI NO: 1168654 NR Description: Beta-galactosidase precursor (Lactase)
  misc_feature (27)..(723): Homolog of NCBI NO: 4138137 NR Description: ss-galactosidase [Lycopersicon esculentum]
  misc_feature (11)..(723): Homolog of NCBI NO: 1352077 NR Description: Beta-galactosidase precursor (Lactase) (Acid
  misc_feature (13)..(723): Homolog of NCBI NO: 14970839 NR Description: beta-galactosidase [Fragaria x ananassa]
  misc_feature (23)..(724): Homolog of NCBI NO: 7682677 NR Description: beta galactosidase [Vigna radiata]
  misc_feature (19)..(723): Homolog of NCBI NO: 12583687 NR Description: beta-D-galactosidase [Pyrus pyrifolia]
  misc_feature (19)..(723): Homolog of NCBI NO: 1352078 NR Description: Beta-galactosidase precursor (Lactase) (Acid
  misc_feature (8)..(723): Homolog of NCBI NO: 3869280 NR Description: beta-galactosidase precursor [Carica papaya]
  misc_feature (21)..(723): Homolog of NCBI NO: 20260596 NR Description: galactosidase, putative [Arabidopsis thaliana]
  misc_feature (21)..(723): Homolog of NCBI NO: 15231354 NR Description: glycosyl hydrolase family 35 (beta-galactosidase)
  misc_feature (11)..(724): Homolog of NCBI NO: 1168654 NR Description: Beta-galactosidase precursor (Lactase)
  misc_feature (27)..(723): Homolog of NCBI NO: 4138137 NR Description: ss-galactosidase [Lycopersicon esculentum]
  misc_feature (11)..(723): Homolog of NCBI NO: 1352077 NR Description: Beta-galactosidase precursor (Lactase) (Acid
  misc_feature (13)..(723): Homolog of NCBI NO: 14970839 NR Description: beta-galactosidase [Fragaria x ananassa]
  misc_feature (23)..(724): Homolog of NCBI NO: 7682677 NR Description: beta galactosidase [Vigna radiata]
  misc_feature (19)..(723): Homolog of NCBI NO: 12583687 NR Description: beta-D-galactosidase [Pyrus pyrifolia]
  misc_feature (19)..(723): Homolog of NCBI NO: 1352078 NR Description: Beta-galactosidase precursor (Lactase) (Acid
  misc_feature (8)..(723): Homolog of NCBI NO: 3869280 NR Description: beta-galactosidase precursor [Carica papaya]
MVLNFRDKSCIFLAILCCLSLSCIVKASVSYDRKAVIINGQRRILLSGSIHYPRSTPEMWPGLIQKAKEGGLDVIETYVFWNGHEPSPGQYYFGDRYDLVKFIKLVHQAGLYVNLRIGPYVCAEWNFGGFPVWLKFVPGMAFRTDNEPFKAAMKKFTEKIVWMMKAEKLFQTQGGPIILAQIENEYGPVEWEIGAPGKAYTKWVAQMALGLSTGVPWIMCKQEDAPGPIIDTCNGYYCEDFKPNSINKPKMWTENWTGWYTDFGGAVPYRPVEDIAYSVARFIQKGGSLINYYMYHGGTNFDRTAGEFMASSYDYDAPLDEYGLPREPKYSHLKALHKAIKLSEPALLSADATVTSLGAKQEAYVFWSKSSCAAFLSNKDENSAARVLFRGFPYDLPPWSVSILPDCKTEVYNTAKVNAPSVHRNMVPTGTKFSWGSFNEATPTANEAGTFARNGLVEQISMTWDKSDYFWYITDITIGSGETFLKTGDSPLLTVMSAGHALHVFVNGQLSGTAYGGLDHPKLTFSQKIKLHAGVNKIALLSVAVGLPNVGTHFEQWNKGVLGPVTLKGVNSGTWDMSKWKWSYKIGVKGEALSLHTNTESSGVRWTQGSFVAKKQPLTWYKSTFATPAGNEPLALDMNTMGKGQVWINGRNIGRHWPAYKAQGSCGRCNYAGTFDAKKCLSNCGEASQRWYHVPRSWLKSQNLIVVFEELGGDPNGISLVKRT

SEQ ID NO: 39026 - protein, 666 aa, Arabidopsis thaliana
  peptide (1)..(666): Ceres Seq. ID no. 13497706
  misc_feature (1)..(665): Homolog of NCBI NO: 20260596 NR Description: galactosidase, putative [Arabidopsis thaliana]
  misc_feature (1)..(665): Homolog of NCBI NO: 15231354 NR Description: glycosyl hydrolase family 35 (beta-galactosidase)
  misc_feature (1)..(666): Homolog of NCBI NO: 1168654 NR Description: Beta-galactosidase precursor (Lactase)
  misc_feature (1)..(665): Homolog of NCBI NO: 4138137 NR Description: ss-galactosidase [Lycopersicon esculentum]
  misc_feature (1)..(665): Homolog of NCBI NO: 1352077 NR Description: Beta-galactosidase precursor (Lactase) (Acid
  misc_feature (1)..(665): Homolog of NCBI NO: 14970839 NR Description: beta-galactosidase [Fragaria x ananassa]
  misc_feature (1)..(666): Homolog of NCBI NO: 7682677 NR Description: beta galactosidase [Vigna radiata]
  misc_feature (1)..(665): Homolog of NCBI NO: 12583687 NR Description: beta-D-galactosidase [Pyrus pyrifolia]
  misc_feature (1)..(665): Homolog of NCBI NO: 1352078 NR Description: Beta-galactosidase precursor (Lactase) (Acid
  misc_feature (1)..(665): Homolog of NCBI NO: 3869280 NR Description: beta-galactosidase precursor [Carica papaya]
  misc_feature (1)..(665): Homolog of NCBI NO: 20260596 NR Description: galactosidase, putative [Arabidopsis thaliana]
  misc_feature (1)..(665): Homolog of NCBI NO: 15231354 NR Description: glycosyl hydrolase family 35 (beta-galactosidase)
  misc_feature (1)..(666): Homolog of NCBI NO: 1168654 NR Description: Beta-galactosidase precursor (Lactase)
  misc_feature (1)..(665): Homolog of NCBI NO: 4138137 NR Description: ss-galactosidase [Lycopersicon esculentum]
  misc_feature (1)..(665): Homolog of NCBI NO: 1352077 NR Description: Beta-galactosidase precursor (Lactase) (Acid
  misc_feature (1)..(665): Homolog of NCBI NO: 14970839 NR Description: beta-galactosidase [Fragaria x ananassa]
  misc_feature (1)..(666): Homolog of NCBI NO: 7682677 NR Description: beta galactosidase [Vigna radiata]
  misc_feature (1)..(665): Homolog of NCBI NO: 12583687 NR Description: beta-D-galactosidase [Pyrus pyrifolia]
  misc_feature (1)..(665): Homolog of NCBI NO: 1352078 NR Description: Beta-galactosidase precursor (Lactase) (Acid
  misc_feature (1)..(665): Homolog of NCBI NO: 3869280 NR Description: beta-galactosidase precursor [Carica papaya]
MWPGLIQKAKEGGLDVIETYVFWNGHEPSPGQYYFGDRYDLVKFIKLVHQAGLYVNLRIGPYVCAEWNFGGFPVWLKFVPGMAFRTDNEPFKAAMKKFTEKIVWMMKAEKLFQTQGGPIILAQIENEYGPVEWEIGAPGKAYTKWVAQMALGLSTGVPWIMCKQEDAPGPIIDTCNGYYCEDFKPNSINKPKMWTENWTGWYTDFGGAVPYRPVEDIAYSVARFIQKGGSLINYYMYHGGTNFDRTAGEFMASSYDYDAPLDEYGLPREPKYSHLKALHKAIKLSEPALLSADATVTSLGAKQEAYVFWSKSSCAAFLSNKDENSAARVLFRGFPYDLPPWSVSILPDCKTEVYNTAKVNAPSVHRNMVPTGTKFSWGSFNEATPTANEAGTFARNGLVEQISMTWDKSDYFWYITDITIGSGETFLKTGDSPLLTVMSAGHALHVFVNGQLSGTAYGGLDHPKLTFSQKIKLHAGVNKIALLSVAVGLPNVGTHFEQWNKGVLGPVTLKGVNSGTWDMSKWKWSYKIGVKGEALSLHTNTESSGVRWTQGSFVAKKQPLTWYKSTFATPAGNEPLALDMNTMGKGQVWINGRNIGRHWPAYKAQGSCGRCNYAGTFDAKKCLSNCGEASQRWYHVPRSWLKSQNLIVVFEELGGDPNGISLVKRT

SEQ ID NO: 39027 - protein, 585 aa, Arabidopsis thaliana
  peptide (1)..(585): Ceres Seq. ID no. 13497707
  misc_feature (1)..(584): Homolog of NCBI NO: 20260596 NR Description: galactosidase, putative [Arabidopsis thaliana]
  misc_feature (1)..(584): Homolog of NCBI NO: 15231354 NR Description: glycosyl hydrolase family 35 (beta-galactosidase)
  misc_feature (1)..(585): Homolog of NCBI NO: 1168654 NR Description: Beta-galactosidase precursor (Lactase)
  misc_feature (1)..(584): Homolog of NCBI NO: 4138137 NR Description: ss-galactosidase [Lycopersicon esculentum]
  misc_feature (1)..(584): Homolog of NCBI NO: 1352077 NR Description: Beta-galactosidase precursor (Lactase) (Acid
  misc_feature (1)..(584): Homolog of NCBI NO: 14970839 NR Description: beta-galactosidase [Fragaria x ananassa]
  misc_feature (1)..(585): Homolog of NCBI NO: 7682677 NR Description: beta galactosidase [Vigna radiata]
  misc_feature (1)..(584): Homolog of NCBI NO: 12583687 NR Description: beta-D-galactosidase [Pyrus pyrifolia]
  misc_feature (1)..(584): Homolog of NCBI NO: 1352078 NR Description: Beta-galactosidase precursor (Lactase) (Acid
  misc_feature (1)..(584): Homolog of NCBI NO: 3869280 NR Description: beta-galactosidase precursor [Carica papaya]
  misc_feature (1)..(584): Homolog of NCBI NO: 20260596 NR Description: galactosidase, putative [Arabidopsis thaliana]
  misc_feature (1)..(584): Homolog of NCBI NO: 15231354 NR Description: glycosyl hydrolase family 35 (beta-galactosidase)
  misc_feature (1)..(585): Homolog of NCBI NO: 1168654 NR Description: Beta-galactosidase precursor (Lactase)
  misc_feature (1)..(584): Homolog of NCBI NO: 4138137 NR Description: ss-galactosidase [Lycopersicon esculentum]
  misc_feature (1)..(584): Homolog of NCBI NO: 1352077 NR Description: Beta-galactosidase precursor (Lactase) (Acid
  misc_feature (1)..(584): Homolog of NCBI NO: 14970839 NR Description: beta-galactosidase [Fragaria x ananassa]
  misc_feature (1)..(585): Homolog of NCBI NO: 7682677 NR Description: beta galactosidase [Vigna radiata]
  misc_feature (1)..(584): Homolog of NCBI NO: 12583687 NR Description: beta-D-galactosidase [Pyrus pyrifolia]
  misc_feature (1)..(584): Homolog of NCBI NO: 1352078 NR Description: Beta-galactosidase precursor (Lactase) (Acid
  misc_feature (1)..(584): Homolog of NCBI NO: 3869280 NR Description: beta-galactosidase precursor [Carica papaya]
MAFRTDNEPFKAAMKKFTEKIVWMMKAEKLFQTQGGPIILAQIENEYGPVEWEIGAPGKAYTKWVAQMALGLSTGVPWIMCKQEDAPGPIIDTCNGYYCEDFKPNSINKPKMWTENWTGWYTDFGGAVPYRPVEDIAYSVARFIQKGGSLINYYMYHGGTNFDRTAGEFMASSYDYDAPLDEYGLPREPKYSHLKALHKAIKLSEPALLSADATVTSLGAKQEAYVFWSKSSCAAFLSNKDENSAARVLFRGFPYDLPPWSVSILPDCKTEVYNTAKVNAPSVHRNMVPTGTKFSWGSFNEATPTANEAGTFARNGLVEQISMTWDKSDYFWYITDITIGSGETFLKTGDSPLLTVMSAGHALHVFVNGQLSGTAYGGLDHPKLTFSQKIKLHAGVNKIALLSVAVGLPNVGTHFEQWNKGVLGPVTLKGVNSGTWDMSKWKWSYKIGVKGEALSLHTNTESSGVRWTQGSFVAKKQPLTWYKSTFATPAGNEPLALDMNTMGKGQVWINGRNIGRHWPAYKAQGSCGRCNYAGTFDAKKCLSNCGEASQRWYHVPRSWLKSQNLIVVFEELGGDPNGISLVKRT
